United States Patent Application Publication US 2018/0126003 A1 - sequence listing, part 3

SEQ ID NO: 1535 - DNA, 2115 bp, Artificial Sequence
  derived and/or modified sequence
atggtgcccgacaccgcctgcgtgctgctgctgaccctggccgccctgggcgcctccggccagggacaaagtcccctggggagtgacctagggccacagatgttgcgagagctgcaggaaacgaatgcagcactccaagatgtacgggagttgctgcgacagcaagttcgcgagatcactttcctaaagaataccgtgatggaatgtgatgcctgtggcatgcagcagagtgtacggaccggcttaccaagcgtgcgccctctgttgcactgcgcccccggcttctgcttcccaggcgtagcctgcatacagacagagagtggggctagatgcggaccatgtcccgcaggctttactggaaacggctcccattgtactgacgtgaacgaatgtgaaacagggcagcataactgtgttcctaattccgtctgcataaatacccggggcagctttcaatgtgggccctgccaaccaggctttgtcggcgaccaagcgagcggctgccaaaggagagcacagcggttctgccctgatggcagccccagcgagtgccatgagcatgctgactgcgtgcttgagagggacggaagccgcagttgcgtatgcgcggttgggtgggctgggaacgggattttgtgcggcagggacacagatttagatgggtttcccgatgagaagctgaggtgccctgaacgccagtgccgcaaggacaactgtgtgacagttcctaactccggccaggaagatgtagacagagatggcattggggatgcttgcgaccctgacgctgacggtgatggtgtgcctaacgaaaaggataattgcccactggtgaggaacccagaccaacggaacacagacgaagacaagtggggtgacgcttgtgataattgcagaagtcagaaaaacgacgaccaaaaggataccgaccaggatggccggggggatgcctgtgatgacgacattgatggggatcggattagaaaccaagctgacaattgtccacgggtccccaactccgaccaaaaagacagtgatggcgacggcattggggacgcttgtgataactgtccacagaaaagcaatcctgaccaagccgatgttgatcatgatttcgttggagatgcttgtgactcagatcaagaccaggacggcgatgggcaccaggactcaagagataattgtcctactgtacctaacagcgcccaggaagacagcgaccatgacggtcagggagatgcctgcgatgatgatgatgataatgacggtgtcccagactcaagagataactgccgcttggtcccgaaccccggccaggaggatgcggaccgcgatggagttggagatgtgtgccaggacgacttcgacgccgataaggtggttgacaagatcgatgtgtgcccagaaaacgccgaggtcaccctgactgatttccgcgctttccaaaccgtggtgctggatcccgagggtgacgcccagatagatcccaactgggtagtattgaatcagggaagggagattgtgcagaccatgaatagcgaccccggcttggctgtggggtatacggccttcaacggggtggactttgaagggacttttcatgtgaataccgtaaccgacgatgactatgccggattcatattcggctatcaagattcatcatctttctacgtggtcatgtggaagcagatggaacagacatattggcaggctaacccctttcgcgccgttgctgaaccaggtattcagctcaaagctgttaaatcctcaacaggtcccggggagcagcttcggaatgccctatggcacacaggcgacacagaatcccaagtcagactgttgtggaaggaccctcgcaacgtaggatggaaggacaaaaaaagctatcggtggttcctacaacatcggccgcaggtcggctacattagagtccggttctatgaggggccagaactggttgcggattcaaatgtcgtgctcgatacaaccatgagagggggacggttaggcgtgttctgtttttcccaggagaacattatctgggccaatctgcggtatcggtgtaatgataccatccctgaggattatgagacacatcagttaagacaggcctag

SEQ ID NO: 1536 - DNA, 2235 bp, Artificial Sequence
  derived and/or modified sequence
atggtgcccgacaccgcctgcgtgctgctgctgaccctggccgccctcggggcctcgggacaggggcaatccccactgggtagcgacctcgggccacagatgctgcgcgagctgcaggagaccaatgctgcgcttcaggacgttcgggagcttctgcgccagcaagtgagagagatcaccttcctcaagaacacggttatggagtgtgatgcctgtgggatgcagcagtccgtgaggaccggcctccccagtgttaggcctcttcttcactgtgctcctggtttttgctttcccggcccatgtcctgctgggtttacgggcaacgggtctcactgcactgacgtcaatgaatgtaatgcacatccttgtttcccgagagttagatgtatcaatacctctcctgggtttaggtgtgaggcatgcccaccaggatacagcgggccaacccatcagggggtggggctggccttcgctaaggccaacaaacaagtttgcaccgatattaacgagtgtgagacaggccagcataattgtgtgcctaacagcgtgtgcatcaacacaagggggtcgtttcagtgtggaccttgccagcccggctttgtgggggaccaggcttctggctgccagcggcgagcccaacgcttctgtccagacggaagcccgtctgaatgccacgagcacgctgattgtgtcctggaaagggatgggagccgttcatgcgtgtgcgctgtaggatgggcaggtaacggaatcctgtgcggtcgggacaccgacctcgatgggttccctgacgaaaagcttcgatgccccgagcgtcagtgccgtaaggacaactgcgtcacagtccctaactccgggcaggaggacgttgaccgtgacgggatcggcgatgcttgcgacccagacgctgacggtgatggcgtccctaatgagaaagataattgccctctggtacgcaacccagatcagagaaacacggacgaagataaatggggtgatgcgtgcgacaactgccggagccagaagaatgatgaccagaaagacacagaccaagacggccggggggatgcctgcgatgatgatatcgacggcgataggattcgtaatcaggcagataattgcccgcgcgtgccaaactctgatcaaaaagattcagacggagatggtattggcgacgcctgtgacaactgcccacaaaaatccaaccccgaccaggcagacgtggatcatgacttcgtgggcgatgcatgtgattccgaccaagaccaagatggagatgggcaccaggactcacgggataattgtcccaccgtccccaactctgcacaggaagacagcgaccatgacggccagggcgacgcgtgcgacgacgacgacgacaatgatggcgtgcctgacagccgtgacaattgtagattagttcctaaccctggccaggaggacgccgaccgcgatggagtgggagatgtatgccaggatgactttgacgctgacaaagtggtggacaagatcgacgtgtgccccgagaacgcggaagtgactctgaccgattttagagcattccaaaccgtggtgctggaccctgagggagatgcacaaattgaccccaattgggtagtactgaatcagggccgggagattgtacagacgatgaattctgaccctggattggctgtgggttatactgcctttaacggggtcgatttcgaaggaaccttccacgtgaatactgtgactgacgatgactacgccgggtttatttttggataccaggactcatcttccttttacgttgtgatgtggaaacagatggaacagacttattggcaggcgaacccttttagggctgtagccgaacctggcatccagctgaaggccgtcaagagcagtaccggccctggggagcagctgaggaatgcgctttggcacaccggggacactgagagccaagtgcgcctgttatggaaagatccacggaacgtcggttggaaggacaaaaagtcttaccgatggtttctgcaacatcgccctcaggtcggatatatccgggtgagattttacgaaggaccggagctcgtggctgactcaaacgtagtgctggataccactatgaggggcggcaggctgggagtcttctgtttcagtcaggaaaacattatctgggccaatctgcgctatcggtgcaatgacactatcccggaagattacgaaacacaccagctgcgacaggcttag

SEQ ID NO: 1537 - DNA, 2274 bp, Artificial Sequence
  derived and/or modified sequence
atggtgcccgacaccgcctgcgtgctgctgctgaccctggccgccctcggagcttccggccaggggcagagcccactgggcagcgaccttggcccacagatgctaagagagctgcaggaaacaaatgccgctttgcaggatgtgcgcgaacttctccgacagcaagtaagggaaatcaccttcctaaaaaacactgtgatggagtgtgacgcttgtggcatgcaacagtccgttagaaccggtctgccttcagtgcggccactcctccactgtgctcctgggttctgttttccaggggttgcatgtatccaaactgagagtggagcccgctgcggaccttgcccagctggattcacaggcaatggatcacattgcactgatgtcaacgaatgcaatgcgcacccttgttttccccgagtccggtgtataaacacaagccccgggttcaggtgtgaggcctgcccccccggatatagtgggccaacccatcagggtgtcgggctcgcatttgccaaggcgaataagcaagtttgcactgatatcaacgaatgtgaaaccggtcagcataactgtgtgcctaatagtgtgtgcattaacacaaggggatcgtttcagtgcggtccgtgccagcccgggttcgtgggggatcaggcgtctggttgccaacggcgcgcacaaagattctgtcccgatggtagcccgagcgaatgccatgagcatgctgattgcgtgctcgagcgggacggatctaggtcttgcgtgtgtgctgtgggatgggccggcaacggaatcctgtgcggcagagacacagatcttgatggctttcccgacgagaaactgcggtgccctgagcgacagtgtaggaaagataactgcgttaccgttccaaatagtggccaagaggacgtcgaccgggacgggattggcgatgcttgtgaccctgatgctgacggtgatggggttccaaatgagaaggataattgtcccctggtgaggaaccctgatcagcggaacactgatgaggataagtggggcgacgcttgtgacaactgccgttcgcagaagaatgatgaccaaaaggacacggaccaggacggcaggggtgacgcttgcgatgatgacatagatggagaccgcattagaaaccaggccgataactgtcccagggtccccaacagtgaccagaaagatagtgacggcgacgggatcggcgatgcttgtgacaactgcccgcagaagagcaaccctgaccaggccgatgtcgatcatgatttcgtgggagatgcgtgcgacagcgaccaggaccaggatggcgacggacaccaggacagcagagataactgccccactgtaccaaactcagctcaggaagattctgaccacgacggacagggggacgcttgtgacgatgatgatgacaacgatggagttccagactctagggataactgtaggctggtgcccaacccgggtcaggaagacgcggacagggacggggtcggcgacgtatgccaggacgacttcgacgccgacaaagtggtagataagatcgacgtgtgccccgaaaatgctgaggtgacccttacagatttccgagccttccagaccgtggtgctggatccagagggagacgcacagattgaccccaattgggtggtgctcaaccagggacgagagatcgtacagacaatgaactcagaccctggcctggccgtcggatacactgcttttaacggcgttgactttgagggcacctttcacgttaataccgtaacagacgacgactatgccggattcattttcggatatcaggacagttccagtttttatgttgtgatgtggaagcagatggaacagacttactggcaggctaatccgttccgtgcggtggccgaaccaggcatccagctgaaagctgtgaagagttcaacaggccctggagagcagctcagaaatgcactgtggcacacaggcgatacggagtcccaggtccgcttgctgtggaaagatcctcggaacgtcgggtggaaagataagaagagctacagatggttcctccaacacagaccacaggtgggatacatcagagtccgattttacgaaggccccgaactggtggctgactccaatgtggtcctcgacacaaccatgcggggggggaggttaggcgtattctgtttttcacaggaaaacatcatttgggccaacttacgctaccgctgcaatgatactatccctgaggactatgagacacaccagctcaggcaagcatag

SEQ ID NO: 1538 - DNA, 2115 bp, Artificial Sequence
  derived and/or modified sequence
atggtgcctgacactgcatgcgttttgctgttaaccctcgccgctctcggagcttctggacagggtcagagccctctgggatcagacctggggcctcagatgctgcgggaactgcaggaaaccaatgccgctctgcaggatgtcagagagctgctgcgccagcaggtacgggagatcacttttcttaagaataccgtcatggagtgcgatgcatgcggcatgcagcagagtgtaaggactggcctgcccagcgtgcggccactccttcactgtgcaccaggattttgttttccaggagtggcatgcatccaaaccgagtccggggcaaggtgtggcccttgtccggcagggtttactggaaacggatcacactgtacagacgtgaacgaatgcgagacagggcagcacaattgcgttcctaactcggtttgcatcaacactagaggatcatttcagtgcggtccttgtcaacccggttttgtgggggatcaagcctctggctgccaaagaagagctcagcgcttttgtccagatggtagtccaagtgaatgccatgagcacgccgactgcgttcttgagagggatggatctcgcagctgcgtgtgcgccgtggggtgggctggcaatggcattctctgcggtcgcgatactgaccttgacggatttccggatgagaaattgagatgcccggaaaggcagtgtcgtaaggacaactgtgttaccgtgcccaattcaggacaggaggacgtcgaccgtgatggcattggagatgcctgcgacccagacgcagacggcgacggcgtccctaacgagaaggacaactgccctttagttaggaaccctgaccaacgtaacacggacgaggataagtggggcgacgcctgtgacaattgcagatcacagaaaaacgacgaccaaaaggacactgatcaggatggtaggggagacgcctgtgacgacgacatcgacggggataggatccgcaaccaggccgacaattgcccccgtgttcccaacagcgaccagaaggacagtgatggagacggcattggggatgcgtgcgataattgccctcagaagagcaaccccgatcaggctgacgtggaccatgatttcgtgggcgatgcttgcgatagcgaccaggaccaggacggagatggccatcaggactctagggataattgtccaacagtgcctaactcggcgcaagaggatagcgaccatgacgggcagggcgatgcttgcgacgatgatgatgacaacgatggtgttcccgactctcgtgataactgcaggcttgtgcccaaccccggacaagaggatgccgatagggatggcgttggcgacgtgtgtcaggacgattttgatgccgacaaggtagtggacaaaatcgacgtctgtccggagaatgccgaagtcactctgacggattttagggcctttcagaccgttgtccttgatccagagggcgacgcgcagatcgaccctaattgggtggttctgaatcaggggagagagatcgttcagacgatgaatagcgaccccggattggcggtgggatacaccgctttcaatggcgtagactttgagggcacattccacgtcaataccgtgaccgatgacgattatgctgggttcatcttcggctatcaagactctagctcgttctatgtggtgatgtggaaacagatggagcagacttactggcaggccaatcccttccgagcagtagccgaaccgggtattcagctgaaggctgtgaagtcatccactggtcccggagagcagttacgtaacgctctttggcacactggcgataccgaaagtcaggtccgtctgctgtggaaagatccaaggaacgtcggctggaaagataagaagtcctaccggtggtttctgcagcacagacctcaggtgggatatatccgagttcgcttttacgagggcccagagctcgtggccgactcaaatgtcgtcttggacacaacaatgcgcggagggcgactgggggtcttttgtttttcacaggaaaacatcatatgggctaatctgcgttatcggtgcaacgacactatccctgaggactatgagacacatcagctccgccaggcatag

SEQ ID NO: 1539 - DNA, 2235 bp, Artificial Sequence
  derived and/or modified sequence
atggtaccagatacagcctgcgtgcttctcttaactctggccgcattgggcgcaagcggccagggacaaagccccctcggatccgatctgggtcctcagatgctgagagagctgcaggagaccaacgctgccctgcaagacgttagagaactgctgcgccaacaggttagagagatcacatttctcaagaacactgtgatggagtgtgatgcctgcggtatgcagcaaagtgtccgaactggactgccttccgtacggcctctgttacactgtgcaccagggttttgtttccccggaccttgtcccgcaggcttcactggcaacgggagccattgcacagacgtcaatgagtgtaatgcccacccctgctttcctcgagtaaggtgcattaacacgtctcccggattccgatgcgaggcgtgccctcccggatattcaggaccaacccatcaaggggtagggctcgcattcgcaaaggccaataaacaggtgtgtacggacatcaacgagtgcgaaactggccagcataactgcgtgccgaattcagtgtgtatcaacactaggggttcttttcaatgcggaccgtgccagcccggtttcgtcggggaccaagcatccggatgccagcggagagcccagagattctgtcctgatggctccccctccgagtgtcacgagcacgctgactgtgtgctcgaacgagatggctctcgatcttgtgtgtgcgctgtgggctgggccggaaatgggatactgtgtggcagggacaccgacctcgacgggtttccagatgaaaagctcagatgtccagagcggcagtgccgaaaagataattgtgtcaccgtcccaaactcaggccaggaggatgtggatagagatgggataggagacgcttgtgatccagacgcggacggtgacggagtgcccaatgagaaagacaactgcccactggtccgtaacccagatcagagaaacaccgacgaggacaagtggggcgacgcttgtgacaactgtaggagtcagaagaacgacgaccagaaggataccgatcaggacggacggggtgatgcttgtgatgatgatatagacggcgacaggattcgcaatcaggcggacaactgtcctagggtgccaaactctgatcaaaaagactccgacggagatggaataggagatgcctgtgacaattgtccacagaagagcaatcccgatcaggccgatgtggaccacgacttcgtgggtgacgcatgcgactctgaccaggatcaagatggggatggacatcaggactcccgggacaattgtccaacagtgccaaatagtgcccaggaagactctgaccatgatggacagggcgatgcctgcgacgacgacgatgataacgatggcgtgcccgactcccgggacaactgtcgactcgttcccaaccctgggcaggaggacgcggaccgcgacggggtgggtgatgtgtgtcaagacgatttcgacgcagacaaagtggtggacaagatcgatgtctgtccagaaaatgctgaagtgactctcaccgatttcagagcgttccagaccgttgtgctagaccccgaaggggacgcgcaaatcgatccaaattgggtcgtcctaaaccaaggcagagagatagtccagacaatgaacagcgatccaggactggctgtgggttatacagctttcaatggagtggattttgaaggcacatttcatgttaacaccgttacagatgatgattacgcagggtttattttcggctaccaggatagctctagcttctatgtggtgatgtggaaacaaatggagcagacttactggcaggctaacccattccgagctgtggccgagccaggcatccaacttaaggccgtaaaaagtagtaccgggcctggggagcaactgaggaacgccttatggcacacaggcgacaccgaaagtcaggtaaggctgctgtggaaagacccacgaaatgttgggtggaaagataaaaaaagctatcgctggtttctgcagcatcggccacaggtaggatatattagagtaagattctacgaaggacctgaactggtggcagacagtaatgtcgtcctcgatactaccatgcggggtggcagactgggcgtcttttgctttagtcaggaaaatattatctgggctaacttgaggtacaggtgcaacgacaccattcccgaggattatgagactcaccagctgagacaggcttag

SEQ ID NO: 1540 - DNA, 2274 bp, Artificial Sequence
  derived and/or modified sequence
atggtgcccgatacggcttgcgtgctcctactgaccctggcggcactgggcgcttccggtcagggtcagtccccactcgggagtgacctcgggccacagatgctgcgagaactccaggagactaatgccgctcttcaagacgtgagggagctccttcgccagcaggttcgcgagattacattccttaagaatacagtaatggagtgcgatgcctgcggcatgcagcagtccgtgaggaccggcctccccagtgtgcggccactgttgcactgtgcgcctggattttgtttccccggagtggcgtgcattcagacggagtcgggcgctcggtgtggtccctgcccagcagggtttacaggcaatgggagtcactgtacagacgtaaacgagtgcaacgcccatccgtgtttccctagggtgcggtgcatcaacacttcaccgggtttccgctgtgaagcatgtccaccagggtattctgggcctacccatcagggggtgggcttagcgtttgccaaagcaaataaacaggtgtgcacagatataaacgagtgcgaaactgggcaacacaattgcgtgcctaactctgtgtgtataaacacaagaggttccttccagtgtgggccttgccagcctgggtttgtgggggatcaggcctcaggctgccagcgacgcgcacagaggttttgtcctgatggctcgcctagtgaatgccacgaacacgcagattgcgtcctggaacgggacggaagccgttcctgtgtgtgcgccgttgggtgggccggaaatggaatcctgtgcggcagggacaccgacctggatggatttccagatgagaaattacgctgccccgaacgacagtgcaggaaggataactgcgtgacggttcccaactctggtcaggaagatgtcgatcgggacggcatcggcgacgcgtgtgatccagacgccgatggagacggcgttccgaatgagaaggacaactgccctctggttcgcaatcctgaccaaaggaatacagatgaagataagtggggcgacgcctgcgataactgtcgctcccagaagaatgacgatcaaaaagacactgaccaagatggcaggggggatgcctgcgacgatgatattgatggcgatcgtattaggaatcaggctgacaactgcccaagggtgcccaattccgatcagaaagattctgacggtgacgggattggcgacgcttgcgataattgtccacagaagtctaacccagaccaggcggacgtagaccacgattttgtgggggatgcatgtgattcggatcaagatcaggatggcgatggccaccaagattctcgggacaattgcccaaccgtcccaaatagcgcccaggaggatagtgaccacgacgggcagggtgacgcgtgcgacgatgatgacgataatgacggcgtgcccgacagccgcgacaattgcagattggtccctaatcctggacaggaggatgccgatcgggatggggtaggggatgtgtgccaggacgactttgacgcagacaaggtcgttgataaaattgacgtgtgtcccgagaacgcagaagttaccctgacagactttcgggcttttcaaaccgtggtgcttgaccccgaaggcgacgcccagatagaccccaactgggttgtcctgaatcagggcagggaaatcgtccagactatgaatagcgatccaggtttggctgttggatatacagcctttaacggtgtagattttgagggcaccttccacgtgaatactgtgactgatgacgactacgctggctttattttcgggtaccaggactcgagtagcttctacgtcgtgatgtggaagcagatggagcagacttactggcaagccaaccctttcagggctgtcgcagagcccggtattcagttgaaggccgtcaagtcttccactggcccaggcgaacagttaaggaatgctttgtggcatacgggtgacacagaatcgcaagtgaggctgttgtggaaggaccctagaaatgtgggatggaaagacaaaaaatcatatcgttggtttttgcagcaccggcctcaggtgggatatataagggtgcggttctatgaaggtcctgagctcgtcgcggactcaaacgtagttttagataccacgatgaggggcggacgtctgggggtgttctgcttcagccaggaaaacatcatctgggcgaatctccggtaccgctgcaacgatactatcccggaagactatgaaacccatcaacttagacaggcctag

SEQ ID NO: 1541 - DNA, 2115 bp, Artificial Sequence
  derived and/or modified sequence
atggtgccggacacagcctgcgtgttactccttactctagccgcccttggcgccagcggacagggacagtcgcccttaggatcagaccttggacctcagatgctgagggaactccaggaaaccaacgccgcgcttcaggatgtaagggagctcctgagacagcaagttagagaaatcacatttctcaagaatacagtcatggagtgtgatgcatgtggtatgcagcaaagcgtacgaaccgggttaccaagtgtgagacccctgctgcactgcgcccccggcttctgcttcccaggagtcgcatgcattcagactgaaagcggagctcggtgcgggccttgtcctgcaggattcaccggcaacgggtcacattgcaccgatgttaatgaatgcgagaccggtcagcataactgtgtccctaattcggtctgtattaacacacgaggaagcttccagtgcggtccttgccagcccggttttgtgggagatcaggcaagtggttgccaacgacgcgctcagagattttgtcctgacggctccccatccgagtgccacgaacatgccgattgcgttctcgaacgagatggatcccgaagctgcgtatgcgcggtcggatgggcaggcaacgggatcctgtgtggacgtgataccgatctggacggttttccagatgaaaagttgagatgccctgaaaggcagtgtaggaaggacaattgcgtcacagttccaaacagtggccaagaagacgtagaccgggatggtatcggcgatgcctgtgatcccgacgccgatggcgatggtgtccctaatgagaaggataactgtccactggtacggaaccccgaccagcggaacacagacgaagataaatggggggacgcttgtgacaactgtcgatcccagaaaaatgatgaccagaaggacactgaccaggatggccgcggtgatgcatgcgatgacgatatcgacggcgacaggatcaggaatcaagctgacaattgccccagggttcctaattcagatcaaaaggattccgatggcgatgggattggtgatgcctgcgataactgcccacagaaatccaaccctgaccaagcggacgtcgaccatgacttcgtgggtgacgcgtgtgattctgaccaggatcaggacggcgacgggcaccaagattcacgggataactgccccaccgttcccaactcagctcaggaggacagcgaccacgatgggcagggagatgcctgcgatgatgacgatgataatgatggagtacccgactcccgcgacaactgtcgtctggtcccgaatccaggccaggaggacgccgaccgggacggagtgggtgacgtgtgccaggacgacttcgacgcggacaaagtggtggataagattgacgtgtgtcctgagaacgcagaggtgaccctcaccgacttccgggcatttcagaccgtggtcctcgacccagaaggcgacgcccagatcgaccccaattgggtggtactgaaccagggcagagagatcgtgcaaaccatgaatagcgatccagggttggccgtcggctacacagccttcaacggtgttgactttgaggggaccttccatgtcaacacggtcacggacgacgactatgcgggtttcattttcggataccaggatagcagctctttttatgtcgtgatgtggaaacagatggaacagacttattggcaggcgaacccattccgtgccgtggcagaacccggaatccagctgaaggcagtgaagtccagtacggggcctggcgaacagctcaggaatgcactgtggcacaccggcgacactgaaagccaggtcagactgttgtggaaggatccccgaaatgtggggtggaaggataagaaatcttaccgatggtttctccagcacaggccacaggtgggctatatcagagttcgtttctacgaaggaccagagttggtagctgacagcaatgttgtcctggacaccaccatgcgcggcggaagattaggagtcttctgctttagccaggaaaacatcatttgggccaacctaagataccgatgcaatgacaccatccctgaagattatgagacacatcagctgaggcaggcctag

SEQ ID NO: 1542 - DNA, 2235 bp, Artificial Sequence
  derived and/or modified sequence
atggtcccggacacagcctgcgtgctgttgctaaccctggcggccttgggcgcttcagggcagggacagtcacctctggggtcagatttagggcctcaaatgctccgtgagttacaggagacaaatgcggctttgcaggatgttcgagaacttctgcggcaacaggttcgtgagataactttcctgaagaacacagtgatggaatgtgatgcgtgtgggatgcagcaatctgtgcgcaccggccttcccagtgtcaggcctctcctacattgcgcccccgggttttgtttccctggcccttgccctgccggatttactggtaatggctctcactgtacagacgttaatgaatgtaacgcgcacccatgtttccctcgtgtgcggtgtattaatacttctcccgggtttagatgtgaagcgtgtcctcctggatattctgggccaactcaccaaggtgttggcctggcctttgccaaggcaaataagcaggtgtgcacagacattaatgagtgtgaaacagggcaacataactgcgtgccaaacagcgtctgtattaacactagaggatcctttcagtgtggtccatgccagcccgggttcgtgggggatcaggcatctggatgtcagcgaagagcccagaggttttgcccagacggaagcccctccgagtgccacgaacatgctgactgcgtgctggagagagacgggagtagaagctgcgtctgtgccgttgggtgggccgggaacggcattctgtgcgggcgcgacacagatctagatgggttcccagacgagaagttaagatgccccgaacggcagtgcagaaaagacaactgtgtgacggtgcctaacagcggacaggaggatgtagatcgggacggcattggggatgcatgcgatccggatgccgacggcgatggagtgccaaacgaaaaagacaactgtcccctggtgaggaacccagaccagcgaaataccgatgaagacaaatggggggacgcctgcgacaattgtagatctcagaagaatgacgaccagaaagacaccgaccaggacgggaggggcgacgcctgcgatgatgatattgacggcgatcgcatccggaaccaggccgataactgcccacgcgtccccaactcagatcagaaagattcagatggcgacggcattggggacgcctgcgataactgcccacagaagagcaaccccgatcaagccgacgtagaccacgacttcgtgggagatgcgtgtgactcagatcaggaccaagatggcgatggacaccaggatagccgcgataattgccccacagtcccgaatagcgctcaggaggacagcgaccacgatggtcagggcgatgcatgcgacgatgatgatgataacgatggtgtgccagatagtcgcgataattgtcgattagtccccaaccccggacaggaagacgctgatcgagacggtgtaggggacgtgtgccaggatgacttcgatgctgataaggtcgtggacaagattgacgtatgtcctgagaatgccgaagtaacacttaccgattttagagcctttcagactgtggtcttagacccagaaggcgatgcccagatagatccaaattgggtggtgcttaaccagggacgagagatcgtgcagactatgaacagcgacccaggtctcgccgtcggatatacagccttcaacggggttgatttcgaaggtaccttccacgtcaatacagtcacagacgatgattacgccggcttcatatttgggtaccaggacagcagctcgttttatgttgtgatgtggaagcagatggaacagacgtattggcaggctaatccctttagggccgtggcagagccaggcattcagcttaaagccgtcaaaagcagcacaggacctggggagcagctccggaacgctctgtggcacacgggcgacaccgaatcacaggttagactcctttggaaggatcctcgcaacgtgggttggaaagataagaaatcctatcgatggttcctccagcatcggcctcaggtagggtacatccgcgtgagattctacgagggccctgagttggtagccgattcgaacgttgtgctcgatacaaccatgcggggcggcaggcttggtgtgttctgtttctcccaggaaaacatcatttgggccaacttaaggtatcggtgtaacgacacgatcccggaagactacgaaactcaccaattgcggcaagcttag

SEQ ID NO: 1543 - DNA, 2274 bp, Artificial Sequence
  derived and/or modified sequence
atggttccagacactgcctgtgtgctgctcctgaccctggccgcactgggagcgagtggccaggggcaaagtccgctgggaagtgatctcggtccacagatgcttcgcgaactacaggaaacaaacgctgctctgcaggatgtgcgagaactgctcaggcagcaggtcagagagatcacttttctgaagaatacagtgatggaatgtgacgcctgcggaatgcagcagtccgtccgcacggggctccctagtgtcagacccctgctccactgcgcccctggcttctgttttcccggagttgcctgcattcagacagagagtggtgcaagatgtggcccctgtccagccggctttacaggcaatggctcacattgtactgacgttaatgagtgcaatgcgcacccttgctttcctagagtccgctgcatcaatactagccctggctttcgatgtgaagcatgtcctcccggttactcgggccccacacaccagggggtaggtctcgcttttgcgaaggccaataaacaggtgtgcaccgatataaatgagtgcgaaactggacagcacaactgcgttccaaactctgtttgcatcaatacaaggggatcattccagtgcgggccatgtcagccagggttcgtcggagatcaggcctccggctgtcagagaagggcccaaagattttgcccagacggaagcccaagtgaatgccatgagcatgccgattgcgtgttagaaagagatggctcgagaagctgcgtctgcgccgtcgggtgggcaggtaatgggatcctgtgtggaagagacaccgacctggacggatttcctgatgagaagctcagatgtccagagcggcaatgccggaaggataactgtgtgacagttccaaactctgggcaagaagatgtcgacagagacggcattggggatgcatgtgacccagacgcggacggcgacggagtgccgaatgaaaaggataactgtccactcgtgcgaaacccagaccagaggaatactgacgaagataagtggggcgatgcatgcgacaattgccggagccagaaaaatgacgaccagaaggacactgaccaggacgggcgtggtgatgcatgtgacgacgatatcgacggggaccgcattcgtaatcaagccgataactgcccccgggtcccaaattctgatcagaaggacagcgatggcgatggtatcggcgatgcctgtgacaactgccctcaaaagagcaatccggatcaagccgacgtggatcacgacttcgtcggggatgcctgcgacagcgaccaggatcaagatggcgatggtcaccaggactctagagataactgtcccactgtgccaaactccgcacaggaggatagcgatcatgatggtcagggcgacgcctgtgacgacgacgacgacaacgacggggttccggacagcagagacaactgccgcctagttcccaatccaggtcaagaggacgctgacagggatggcgtgggagacgtgtgccaggacgactttgatgcggataaggtcgtagacaagattgacgtctgtcctgagaatgctgaagtgaccctcaccgatttcagagccttccaaaccgtcgttctggaccccgaaggcgacgcccagatcgaccctaattgggtggttcttaatcaaggtagggagatcgtgcagacaatgaactccgacccaggactcgctgtggggtacaccgccttcaatggtgtggatttcgaggggactttccacgtgaacaccgtgaccgatgatgattatgccggcttcatctttgggtatcaggacagctcttcgttttatgtcgtaatgtggaaacagatggaacagacatactggcaagccaacccgtttcgtgcagtggccgagcccggcattcagttaaaagctgtcaaatcatctaccggcccaggtgaacaactgaggaatgcactgtggcacacaggtgataccgagtcccaagtgcggctgttgtggaaagatcctagaaacgtcggatggaaggataaaaagagttacaggtggtttctacaacatcgccctcaggtcggctacattagagtgcgcttctacgaaggccccgagctggtggccgactcaaatgtagtactggacaccaccatgcgagggggaaggctgggtgtcttctgtttttctcaggaaaatatcatatgggcaaacctgcgataccgatgtaacgatactatccccgaagactacgaaacacaccagctccgccaagcttag

SEQ ID NO: 1544 - DNA, 2115 bp, Artificial Sequence
  derived and/or modified sequence
atggtccctgatacagcctgtgtcctactgttaactctggccgccttaggtgcatctggccaaggtcagtctccactgggcagcgatctgggtccccaaatgctcagagaactgcaagagactaatgccgccctacaggacgtacgagagcttctacgccagcaagtgcgcgaaattactttcctgaaaaacacagtgatggaatgcgacgcttgtggaatgcaacaatcagtgcggacagggctcccatccgttagaccactcctgcattgcgcacctggtttctgctttccaggggtagcatgcattcagactgaaagcggagctcggtgcgggccttgtcctgcaggattcaccggcaacgggtcacattgcaccgatgttaatgaatgcgagaccggtcagcataactgtgtccctaattcggtctgtattaacacacgaggaagcttccagtgcggtccttgccagcccggttttgtgggagatcaggcaagtggttgccaacgacgcgctcagagattttgtcctgacggctccccatccgagtgccacgaacatgccgattgcgttctcgaacgagatggatcccgaagctgcgtatgtgcggtgggttgggccgggaatggtatcttgtgtggaagagacactgacctcgacgggttccctgatgaaaagttgcgatgtcccgagcggcagtgtcgtaaagataattgtgtgaccgttccgaacagtgggcaggaggacgtggatcgcgatggtataggagatgcctgtgaccctgacgccgacggcgatggcgtgcccaacgagaaggacaattgccccctagtgcggaacccagaccaaagaaacacagacgaagacaaatggggggacgcttgcgataattgtagatcacagaagaatgatgaccagaaagacaccgaccaggacggacggggagatgcttgtgacgacgatatagacggagacagaatccgcaaccaggccgataactgccctcgagtgccaaactctgatcagaaagactctgatggcgatggtattggagacgcttgtgataactgcccccagaaaagcaatcctgaccaggcggacgtggatcatgattttgtgggcgacgcatgtgacagcgaccaagatcaggatggcgacgggcaccaggactccagagacaattgcccaacagttcctaactcagcacaggaagacagtgaccatgatggacagggagatgcttgcgacgatgatgatgacaacgatggagtgcctgactcccgagacaactgtagactcgtgcctaaccctggccaagaggacgctgaccgagacggggtcggcgacgtgtgccaagacgactttgacgcggataaggtggtcgacaagatagacgtgtgtccagagaacgccgaagtgactttgaccgacttccgagccttccagaccgttgtactggatcccgaaggtgatgcacagatcgatcccaactgggtagtcctgaaccagggcagggaaatcgtgcagacaatgaattctgacccaggactggccgtagggtatactgcgtttaacggggtggacttcgaaggcaccttccatgttaataccgtgaccgacgacgactacgccgggtttatctttggttaccaagactcatcgtccttttacgtggttatgtggaaacagatggagcagacatattggcaggcgaatcctttccgcgccgttgctgaaccaggcatccagctcaaggcagtaaagagctcaactggacccggagagcaacttaggaacgcattgtggcatacaggagataccgaaagccaagtgcgcctgctatggaaagatcctaggaacgtgggctggaaggacaagaagagctatcgttggtttctgcagcaccggccccaggttggctacattagggttagattttacgaaggcccagaactggttgccgattcaaacgttgtgctggacacaactatgagagggggaagactgggtgtgttttgcttcagccaggagaatatcatttgggcgaatttacgttaccgctgcaacgacactatccccgaggactacgaaacccaccagctgagacaggcctag

SEQ ID NO: 1545 - DNA, 2235 bp, Artificial Sequence
  derived and/or modified sequence
atggtccccgacacagcctgcgtcctcctgcttacccttgccgctctcggcgcctccggacagggacaaagtccgctgggatccgacctgggcccacagatgctgagagagcttcaggaaaccaacgccgctctccaagacgtgcgggaattgctgaggcaacaggtacgggaaattacctttctcaaaaacaccgttatggaatgtgatgcctgtgggatgcaacagtctgttagaaccggcctgccaagtgttcggcccctgctgcattgcgctcctggcttctgttttcccggcccttgccccgcaggatttactggcaacggctctcattgtacggatgtcaacgaatgcaatgcccacccatgcttcccaagagtccgttgcataaacactagccctgggttccggtgcgaagcatgtcccccaggctactccggacccacacaccagggggttggtcttgctttcgccaaggccaataaacaggtctgcacagatatcaacgagtgcgaaacaggtcagcacaactgtgtcccaaattccgtctgcataaacacgcgcggctcctttcagtgcggcccttgtcagccaggattcgtgggcgatcaggcatctggatgccagagaagagcccagcgattctgtcctgacgggtctcccagcgaatgtcatgaacacgcggattgcgtcctggaaagagacggatcaagaagttgcgtctgtgcagtgggatgggcggggaacggcattttatgcggccgagatacagacctcgacgggtttccagacgagaaacttaggtgtccagaaaggcagtgtaggaaagacaactgtgtgaccgtgcctaactcaggacaggaggacgtggatagagatggcatcggtgacgcatgcgatccggacgctgacggagacggtgttccaaacgagaaagacaactgcccgttagtacgcaaccccgatcaacgaaacactgacgaagacaaatggggggatgcttgcgataattgtagaagccaaaagaacgacgatcagaaagatactgaccaggatggtaggggtgatgcctgtgacgacgatatagatggggatagaatcagaaaccaagccgataactgcccgcgggtgccgaattcagaccagaaggatagcgatggggacggaattggagatgcttgtgacaactgccctcagaagagtaaccctgaccaggcggatgttgaccatgactttgtgggcgacgcctgtgatagcgaccaggaccaggacggcgatggacaccaggattccagagacaactgtcccacggtaccaaattccgcacaggaggattcggatcatgatggacaaggagatgcatgcgacgacgacgatgacaacgatggggttcctgactcacgcgataactgccgactagtgcccaaccctggacaggaggacgcggaccgagacggcgtcggcgatgtctgtcaagatgactttgacgccgacaaagtggtggataaaatcgatgtgtgcccagaaaacgccgaggtgacgctgaccgattttcgcgcatttcagacagtcgtcttagacccggagggtgacgcccaaattgacccaaattgggttgttctgaaccagggaagagagatcgtccagaccatgaattcagacccaggactcgcagtcggatacacagcctttaatggagtagactttgagggcacctttcacgtaaacaccgtgacagacgacgattacgcgggctttatcttcggctatcaggattcctccagcttctatgtggtaatgtggaagcagatggagcagacatattggcaggcgaacccttttagggcagtggcagagccaggaattcagcttaaagcagtcaagtctagcaccggtccaggcgagcaactaagaaacgccctatggcacacaggagatactgaatcgcaagttagattgctatggaaagatccacgaaacgtcggctggaaagataaaaagtcttaccgttggttcctccaacacagaccccaggtgggttacatacgagtgaggttttacgagggccctgaacttgttgcagactctaacgtggtactggacaccaccatgcgcgggggaagattaggcgtgttctgtttttctcaagaaaatattatatgggccaacctcagatacaggtgcaatgatactatcccagaagattacgagactcatcagttacggcaagcctag

SEQ ID NO: 1546 - DNA, 2274 bp, Artificial Sequence
  derived and/or modified sequence
atggtgccagataccgcctgtgtgctcctgcttaccctggccgccctgggcgcgtccggtcagggacagtccccccttggctcagatcttggtcctcagatgctgcgtgagctacaagaaacaaatgcagcacttcaggatgtcagggagctacttcgacagcaggtgcgtgagattacttttctaaagaacactgtcatggaatgtgacgcctgcggaatgcagcaatctgtgcggacaggcctccccagcgtccgtccacttttgcactgtgcccccggcttttgtttccccggcgtcgcgtgtatccagaccgagagcggtgcacgctgcgggccctgccctgcaggatttacaggtaacggaagccactgtaccgatgttaatgaatgcaatgcccatccatgtttcccccgggttcgttgtatcaatacaagtccgggatttcgatgtgaggcttgcccaccgggatattctggcccgactcatcagggagtcggacttgccttcgcaaaggctaataaacaagtttgcacagacatcaatgagtgtgaaactggccagcataattgtgttcctaatagcgtatgcatcaacactagaggaagctttcaatgtggtccatgtcagccagggttcgtgggagatcaggcaagtggctgtcagaggcgtgcccaaaggttttgtccagatggatcccctagtgagtgccatgagcatgccgactgtgtcctggaacgcgacggctcaaggtcatgtgtgtgtgccgttgggtgggccggcaacgggatattatgcgggagagataccgacttagacggattcccggatgaaaagctccgatgcccagaaagacagtgcagaaaagataactgcgtgactgtgccaaacagcgggcaagaggacgttgaccgggacggaattggagatgcatgcgatcctgacgctgacggtgacggtgtgcccaacgagaaagataattgccccctggtaaggaacccggatcaacgcaacactgacgaggacaagtggggcgacgcttgtgacaattgcagatcacagaaaaatgatgaccagaaagataccgatcaggatggccgaggggatgcctgcgacgacgatatagatggcgatcggataagaaaccaagccgacaattgccctcgggtgcccaactctgaccagaaggactccgatggcgatggaataggtgacgcctgtgataattgcccgcaaaagtccaaccctgatcaggcagacgtagatcatgactttgtcggcgacgcttgcgacagcgatcaagaccaggatggcgacggacaccaagactcgagagacaactgcccaacagtacctaactccgcacaagaagattccgaccatgatggccagggcgacgcttgcgacgacgatgacgacaacgacggagtgcccgattccagagataactgccgcttggtccctaatccaggccaggaggatgccgatagagacggggtgggagacgtgtgccaagatgattttgatgcggacaaagtggttgacaagattgatgtatgtccagagaacgctgaggtcacccttacagactttcgtgcattccagacagttgttctcgacccagagggcgatgcgcagattgatcccaattgggtagtgctgaaccagggccgcgaaatagtacagactatgaactccgaccctggactcgccgtcggttacactgcttttaacggcgtagactttgagggaactttccatgtgaacactgtgactgacgacgactatgctggattcatttttgggtatcaggacagctcttcgttttatgtcgtaatgtggaaacagatggaacagacatactggcaagccaacccgtttcgtgcagtggccgagcccggcattcagttaaaagctgtcaaatcatctaccggcccaggtgaacaactgaggaatgcactgtggcacacaggtgataccgagtcccaagtgcggctgttgtggaaagatcctagaaacgtcggatggaaggataaaaagagttacaggtggtttctacaacatcgccctcaggtcggctacattagagtgcgcttctacgaaggaccggaattggttgctgatagcaacgtagtactggacacaacaatgagaggcggccgattgggcgtgttttgcttcagtcaggaaaatattatatgggccaacctgcgctatcgatgtaacgacacaattcccgaagattatgagacccatcagttgagacaggcttag

SEQ ID NO: 1547 - DNA, 2461 bp, Artificial Sequence
  derived and/or modified sequence
gtgggcggtagaaagcgagcagccacccagctccccgccaccgccatggtccccgacaccgcctgcgttcttctgctcaccctggctgccctcggcgcgtccggacagggccagagcccgttgggctcagacctgggcccgcagatgcttcgggaactgcaggaaaccaacgcggcgctgcaggacgtgcgggagctgctgcggcagcaggtcagggagatcacgttcctgaaaaacacggtgatggagtgtgacgcgtgcgggatgcagcagtcagtacgcaccggcctacccagcgtgcggcccctgctccactgcgcgcccggcttctgcttccccggcgtggcctgcatccagacggagagcggcgcgcgctgcggcccctgccccgcgggcttcacgggcaacggctcgcactgcaccgacgtcaacgagtgcaacgcccacccctgcttcccccgagtccgctgtatcaacaccagcccggggttccgctgcgaggcttgcccgccggggtacagcggccccacccaccagggcgtggggctggctttcgccaaggccaacaagcaggtttgcacggacatcaacgagtgtgagaccgggcaacataactgcgtccccaactccgtgtgcatcaacacccggggctccttccagtgcggcccgtgccagcccggcttcgtgggcgaccaggcgtccggctgccagcggcgcgcacagcgcttctgccccgacggctcgcccagcgagtgccacgagcatgcagactgcgtcctagagcgcgatggctcgcggtcgtgcgtgtgtgccgttggctgggccggcaacgggatcctctgtggtcgcgacactgacctagacggcttcccggacgagaagctgcgctgcccggagcgccagtgccgtaaggacaactgcgtgactgtgcccaactcagggcaggaggatgtggaccgcgatggcatcggagacgcctgcgatccggatgccgacggggacggggtccccaatgaaaaggacaactgcccgctggtgcggaacccagaccagcgcaacacggacgaggacaagtggggcgatgcgtgcgacaactgccggtcccagaagaacgacgaccaaaaggacacagaccaggacggccggggcgatgcgtgcgacgacgacatcgacggcgaccggatccgcaaccaggccgacaactgccctagggtacccaactcagaccagaaggacagtgatggcgatggtataggggatgcctgtgacaactgtccccagaagagcaacccggatcaggcggatgtggaccacgactttgtgggagatgcttgtgacagcgatcaagaccaggatggagacggacatcaggactctcgggacaactgtcccacggtgcctaacagtgcccaggaggactcagaccacgatggccagggtgatgcctgcgacgacgacgacgacaatgacggagtccctgacagtcgggacaactgccgcctggtgcctaaccccggccaggaggacgcggacagggacggcgtgggcgacgtgtgccaggacgactttgatgcagacaaggtggtagacaagatcgacgtgtgtccggagaacgctgaagtcacgctcaccgacttcagggccttccagacagtcgtgctggacccggagggtgacgcgcagattgaccccaactgggtggtgctcaaccagggaagggagatcgtgcagacaatgaacagcgacccaggcctggctgtgggttacactgccttcaatggcgtggacttcgagggcacgttccatgtgaacacggtcacggatgacgactatgcgggcttcatctttggctaccaggacagctccagcttctacgtggtcatgtggaagcagatggagcaaacgtattggcaggcgaaccccttccgtgctgtggccgagcctggcatccaactcaaggctgtgaagtcttccacaggccccggggaacagctgcggaacgctctgtggcatacaggagacacagagtcccaggtgcggctgctgtggaaggacccgcgaaacgtgggttggaaggacaagaagtcctatcgttggttcctgcagcaccggccccaagtgggctacatcagggtgcgattctatgagggccctgagctggtggccgacagcaacgtggtcttggacacaaccatgcggggtggccgcctgggggtcttctgcttctcccaggagaacatcatctgggccaacctgcgttaccgctgcaatgacaccatcccagaggactatgagacccatcagctgcggcaagcctagggaccagggtgaggacccgccggatgacagccaccctcaccgcggctggatgggggctctgcacccagccccaaggggtggccgtcctgagggggaagtgagaagggctcagagaggacaaaataaagtgtgtgtgcaggga

SEQ ID NO: 1548 - DNA, 2292 bp, Artificial Sequence
  derived and/or modified sequence
agaaagcgagcagccacccagctccccgccaccgccatggtccccgacaccgcctgcgttcttctgctcaccctggctgccctcggcgcgtccggacagggccagagcccgttgggctcagacctgggcccgcagatgcttcgggaactgcaggaaaccaacgcggcgctgcaggacgtgcgggagctgctgcggcagcaggtcagggagatcacgttcctgaaaaacacggtgatggagtgtgacgcgtgcgggatgcagcagtcagtacgcaccggcctacccagcgtgcggcccctgctccactgcgcgcccggcttctgcttccccggcgtggcctgcatccagacggagagcggcgcgcgctgcggcccctgccccgcgggcttcacgggcaacggctcgcactgcaccgacgtcaacgagtgtgagaccgggcaacataactgcgtccccaactccgtgtgcatcaacacccggggctccttccagtgcggcccgtgccagcccggcttcgtgggcgaccaggcgtccggctgccagcggcgcgcacagcgcttctgccccgacggctcgcccagcgagtgccacgagcatgcagactgcgtcctagagcgcgatggctcgcggtcgtgcgtgtgtgccgttggctgggccggcaacgggatcctctgtggtcgcgacactgacctagacggcttcccggacgagaagctgcgctgcccggagcgccagtgccgtaaggacaactgcgtgactgtgcccaactcagggcaggaggatgtggaccgcgatggcatcggagacgcctgcgatccggatgccgacggggacggggtccccaatgaaaaggacaactgcccgctggtgcggaacccagaccagcgcaacacggacgaggacaagtggggcgatgcgtgcgacaactgccggtcccagaagaacgacgaccaaaaggacacagaccaggacggccggggcgatgcgtgcgacgacgacatcgacggcgaccggatccgcaaccaggccgacaactgccctagggtacccaactcagaccagaaggacagtgatggcgatggtataggggatgcctgtgacaactgtccccagaagagcaacccggatcaggcggatgtggaccacgactttgtgggagatgcttgtgacagcgatcaagaccaggatggagacggacatcaggactctcgggacaactgtcccacggtgcctaacagtgcccaggaggactcagaccacgatggccagggtgatgcctgcgacgacgacgacgacaatgacggagtccctgacagtcgggacaactgccgcctggtgcctaaccccggccaggaggacgcggacagggacggcgtgggcgacgtgtgccaggacgactttgatgcagacaaggtggtagacaagatcgacgtgtgtccggagaacgctgaagtcacgctcaccgacttcagggccttccagacagtcgtgctggacccggagggtgacgcgcagattgaccccaactgggtggtgctcaaccagggaagggagatcgtgcagacaatgaacagcgacccaggcctggctgtgggttacactgccttcaatggcgtggacttcgagggcacgttccatgtgaacacggtcacggatgacgactatgcgggcttcatctttggctaccaggacagctccagcttctacgtggtcatgtggaagcagatggagcaaacgtattggcaggcgaaccccttccgtgctgtggccgagcctggcatccaactcaaggctgtgaagtcttccacaggccccggggaacagctgcggaacgctctgtggcatacaggagacacagagtcccaggtgcggctgctgtggaaggacccgcgaaacgtgggttggaaggacaagaagtcctatcgttggttcctgcagcaccggccccaagtgggctacatcagggtgcgattctatgagggccctgagctggtggccgacagcaacgtggtcttggacacaaccatgcggggtggccgcctgggggtcttctgcttctcccaggagaacatcatctgggccaacctgcgttaccgctgcaatgacaccatcccagaggactatgagacccatcagctgcggcaagcctagggaccagggtgaggacccgccggatgacagccaccctcaccgcggctggatgggggctctgcacccagccccaaggggtggccgtcctgagggggaagtgagaagggctcagagaggacaaaataaagtgtgtgtgcaggg

SEQ ID NO: 1549 - DNA, 2322 bp, Artificial Sequence
  derived and/or modified sequence
agaaagcgagcagccacccagctccccgccaccgccatggtccccgacaccgcctgcgttcttctgctcaccctggctgccctcggcgcgtccggacagggccagagcccgttgggctcagacctgggcccgcagatgcttcgggaactgcaggaaaccaacgcggcgctgcaggacgtgcgggagctgctgcggcagcaggtcagggagatcacgttcctgaaaaacacggtgatggagtgtgacgcgtgcgggatgcagcagtcagtacgcaccggcctacccagcgtgcggcccctgctccactgcgcgcccggcttctgcttccccggcccctgccccgcgggcttcacgggcaacggctcgcactgcaccgacgtcaacgagtgcaacgcccacccctgcttcccccgagtccgctgtatcaacaccagcccggggttccgctgcgaggcttgcccgccggggtacagcggccccacccaccagggcgtggggctggctttcgccaaggccaacaagcaggtttgcacggacatcaacgagtgtgagaccgggcaacataactgcgtccccaactccgtgtgcatcaacacccggggctccttccagtgcggcccgtgccagcccggcttcgtgggcgaccaggcgtccggctgccagcggcgcgcacagcgcttctgccccgacggctcgcccagcgagtgccacgagcatgcagactgcgtcctagagcgcgatggctcgcggtcgtgcgtgtgtgccgttggctgggccggcaacgggatcctctgtggtcgcgacactgacctagacggcttcccggacgagaagctgcgctgcccggagcgccagtgccgtaaggacaactgcgtgactgtgcccaactcagggcaggaggatgtggaccgcgatggcatcggagacgcctgcgatccggatgccgacggggacggggtccccaatgaaaaggacaactgcccgctggtgcggaacccagaccagcgcaacacggacgaggacaagtggggcgatgcgtgcgacaactgccggtcccagaagaacgacgaccaaaaggacacagaccaggacggccggggcgatgcgtgcgacgacgacatcgacggcgaccggatccgcaaccaggccgacaactgccctagggtacccaactcagaccagaaggacagtgatggcgatggtataggggatgcctgtgacaactgtccccagaagagcaacccggatcaggcggatgtggaccacgactttgtgggagatgcttgtgacagcgatcaagaccaggatggagacggacatcaggactctcgggacaactgtcccacggtgcctaacagtgcccaggaggactcagaccacgatggccagggtgatgcctgcgacgacgacgacgacaatgacggagtccctgacagtcgggacaactgccgcctggtgcctaaccccggccaggaggacgcggacagggacggcgtgggcgacgtgtgccaggacgactttgatgcagacaaggtggtagacaagatcgacgtgtgtccggagaacgctgaagtcacgctcaccgacttcagggccttccagacagtcgtgctggacccggagggtgacgcgcagattgaccccaactgggtggtgctcaaccagggaagggagatcgtgcagacaatgaacagcgacccaggcctggctgtgggttacactgccttcaatggcgtggacttcgagggcacgttccatgtgaacacggtcacggatgacgactatgcgggcttcatctttggctaccaggacagctccagcttctacgtggtcatgtggaagcagatggagcaaacgtattggcaggcgaaccccttccgtgctgtggccgagcctggcatccaactcaaggctgtgaagtcttccacaggccccggggaacagctgcggaacgctctgtggcatacaggagacacagagtcccaggtgcggctgctgtggaaggacccgcgaaacgtgggttggaaggacaagaagtcctatcgttggttcctgcagcaccggccccaagtgggctacatcagggtgcgattctatgagggccctgagctggtggccgacagcaacgtggtcttggacacaaccatgcggggtggccgcctgggggtcttctgcttctcccaggagaacatcatctgggccaacctgcgttaccgctgcaatgacaccatcccagaggactatgagacccatcagctgcggcaagcctagggaccagggtgaggacccgccggatgacagccaccctcaccgcggctggat

SEQ ID NO: 1550 - DNA, 2115 bp, Artificial Sequence
  derived and/or modified sequence
atggtgcccgacaccgcctgcgtgctgctgctgaccctggccgccctgggcgccagcggccagggccagagccccctgggcagcgacctgggcccccagatgctgagagagctgcaggagaccaacgccgccctgcaggacgtgagagagctgctgagacagcaggtgagagagatcaccttcctgaagaacaccgtgatggagtgcgacgcctgcggcatgcagcagagcgtgagaaccggcctgcccagcgtgagacccctgctgcactgcgcccccggcttctgcttccccggcgtggcctgcatccagaccgagagcggcgccagatgcggcccctgccccgccggcttcaccggcaacggcagccactgcaccgacgtgaacgagtgcgagaccggccagcacaactgcgtgcccaacagcgtgtgcatcaacaccagaggcagcttccagtgcggcccctgccagcccggcttcgtgggcgaccaggccagcggctgccagagaagagcccagagattctgccccgacggcagccccagcgagtgccacgagcacgccgactgcgtgctggagagagacggcagcagaagctgcgtgtgcgccgtgggctgggccggcaacggcatcctgtgcggcagagacaccgacctggacggcttccccgacgagaagctgagatgccccgagagacagtgcagaaaggacaactgcgtgaccgtgcccaacagcggccaggaggacgtggacagagacggcatcggcgacgcctgcgaccccgacgccgacggcgacggcgtgcccaacgagaaggacaactgccccctggtgagaaaccccgaccagagaaacaccgacgaggacaagtggggcgacgcctgcgacaactgcagaagccagaagaacgacgaccagaaggacaccgaccaggacggcagaggcgacgcctgcgacgacgacatcgacggcgacagaatcagaaaccaggccgacaactgccccagagtgcccaacagcgaccagaaggacagcgacggcgacggcatcggcgacgcctgcgacaactgcccccagaagagcaaccccgaccaggccgacgtggaccacgacttcgtgggcgacgcctgcgacagcgaccaggaccaggacggcgacggccaccaggacagcagagacaactgccccaccgtgcccaacagcgcccaggaggacagcgaccacgacggccagggcgacgcctgcgacgacgacgacgacaacgacggcgtgcccgacagcagagacaactgcagactggtgcccaaccccggccaggaggacgccgacagagacggcgtgggcgacgtgtgccaggacgacttcgacgccgacaaggtggtggacaagatcgacgtgtgccccgagaacgccgaggtgaccctgaccgacttcagagccttccagaccgtggtgctggaccccgagggcgacgcccagatcgaccccaactgggtggtgctgaaccagggcagagagatcgtgcagaccatgaacagcgaccccggcctggccgtgggctacaccgccttcaacggcgtggacttcgagggcaccttccacgtgaacaccgtgaccgacgacgactacgccggcttcatcttcggctaccaggacagcagcagcttctacgtggtgatgtggaagcagatggagcagacctactggcaggccaaccccttcagagccgtggccgagcccggcatccagctgaaggccgtgaagagcagcaccggccccggcgagcagctgagaaacgccctgtggcacaccggcgacaccgagagccaggtgagactgctgtggaaggaccccagaaacgtgggctggaaggacaagaagagctacagatggttcctgcagcacagaccccaggtgggctacatcagagtgagattctacgagggccccgagctggtggccgacagcaacgtggtgctggacaccaccatgagaggcggcagactgggcgtgttctgcttcagccaggagaacatcatctgggccaacctgagatacagatgcaacgacaccatccccgaggactacgagacccaccagctgagacaggcctag

SEQ ID NO: 1551 - DNA, 2235 bp, Artificial Sequence
  derived and/or modified sequence
atggtgcccgacaccgcctgcgtgctgctgctgaccctggccgccctgggcgccagcggccagggccagagccccctgggcagcgacctgggcccccagatgctgagagagctgcaggagaccaacgccgccctgcaggacgtgagagagctgctgagacagcaggtgagagagatcaccttcctgaagaacaccgtgatggagtgcgacgcctgcggcatgcagcagagcgtgagaaccggcctgcccagcgtgagacccctgctgcactgcgcccccggcttctgcttccccggcccctgccccgccggcttcaccggcaacggcagccactgcaccgacgtgaacgagtgcaacgcccacccctgcttccccagagtgagatgcatcaacaccagccccggcttcagatgcgaggcctgcccccccggctacagcggccccacccaccagggcgtgggcctggccttcgccaaggccaacaagcaggtgtgcaccgacatcaacgagtgcgagaccggccagcacaactgcgtgcccaacagcgtgtgcatcaacaccagaggcagcttccagtgcggcccctgccagcccggcttcgtgggcgaccaggccagcggctgccagagaagagcccagagattctgccccgacggcagccccagcgagtgccacgagcacgccgactgcgtgctggagagagacggcagcagaagctgcgtgtgcgccgtgggctgggccggcaacggcatcctgtgcggcagagacaccgacctggacggcttccccgacgagaagctgagatgccccgagagacagtgcagaaaggacaactgcgtgaccgtgcccaacagcggccaggaggacgtggacagagacggcatcggcgacgcctgcgaccccgacgccgacggcgacggcgtgcccaacgagaaggacaactgccccctggtgagaaaccccgaccagagaaacaccgacgaggacaagtggggcgacgcctgcgacaactgcagaagccagaagaacgacgaccagaaggacaccgaccaggacggcagaggcgacgcctgcgacgacgacatcgacggcgacagaatcagaaaccaggccgacaactgccccagagtgcccaacagcgaccagaaggacagcgacggcgacggcatcggcgacgcctgcgacaactgcccccagaagagcaaccccgaccaggccgacgtggaccacgacttcgtgggcgacgcctgcgacagcgaccaggaccaggacggcgacggccaccaggacagcagagacaactgccccaccgtgcccaacagcgcccaggaggacagcgaccacgacggccagggcgacgcctgcgacgacgacgacgacaacgacggcgtgcccgacagcagagacaactgcagactggtgcccaaccccggccaggaggacgccgacagagacggcgtgggcgacgtgtgccaggacgacttcgacgccgacaaggtggtggacaagatcgacgtgtgccccgagaacgccgaggtgaccctgaccgacttcagagccttccagaccgtggtgctggaccccgagggcgacgcccagatcgaccccaactgggtggtgctgaaccagggcagagagatcgtgcagaccatgaacagcgaccccggcctggccgtgggctacaccgccttcaacggcgtggacttcgagggcaccttccacgtgaacaccgtgaccgacgacgactacgccggcttcatcttcggctaccaggacagcagcagcttctacgtggtgatgtggaagcagatggagcagacctactggcaggccaaccccttcagagccgtggccgagcccggcatccagctgaaggccgtgaagagcagcaccggccccggcgagcagctgagaaacgccctgtggcacaccggcgacaccgagagccaggtgagactgctgtggaaggaccccagaaacgtgggctggaaggacaagaagagctacagatggttcctgcagcacagaccccaggtgggctacatcagagtgagattctacgagggccccgagctggtggccgacagcaacgtggtgctggacaccaccatgagaggcggcagactgggcgtgttctgcttcagccaggagaacatcatctgggccaacctgagatacagatgcaacgacaccatccccgaggactacgagacccaccagctgagacaggcctag

SEQ ID NO: 1552 - protein, 14 aa, Artificial Sequence
  derived and/or modified sequence
DIASGLIGPLIICK

SEQ ID NO: 1553 - protein, 13 aa, Artificial Sequence
  derived and/or modified sequence
GAYPLSIEPIGVR

SEQ ID NO: 1554 - protein, 1065 aa, Artificial Sequence
  derived and/or modified sequence
MKILILGIFLFLCSTPAWAKEKHYYIGIIETTWDYASDHGEKKLISVDTEHSNIYLQNGPDRIGRLYKKALYLQYTDETFRTTIEKPVWLGFLGPIIKAETGDKVYVHLKNLASRPYTFHSHGITYYKEHEGAIYPDNTTDFQRADDKVYPGEQYTYMLLATEEQSPGEGDGNCVTRIYHSHIDAPKDIASGLIGPLIICKKDSLDKEKEKHIDREFVVMFSVVDENFSWYLEDNIKTYCSEPEKVDKDNEDFQESNRMYSVNGYTFGSLPGLSMCAEDRVKWYLFGMGNEVDVHAAFFHGQALTNKNYRIDTINLFPATLFDAYMVAQNPGEWMLSCQNLNHLKAGLQAFFQVQECNKSSSKDNIRGKHVRHYYIAAEEIIWNYAPSGIDIFTKENLTAPGSDSAVFFEQGTTRIGGSYKKLVYREYTDASFTNRKERGPEEEHLGILGPVIWAEVGDTIRVTFHNKGAYPLSIEPIGVRFNKNNEGTYYSPNYNPQSRSVPPSASHVAPTETFTYEWTVPKEVGPTNADPVCLAKMYYSAVEPTKDIFTGLIGPMKICKKGSLHANGRQKDVDKEFYLFPTVFDENESLLLEDNIRMFTTAPDQVDKEDEDFQESNKMHSMNGFMYGNQPGLTMCKGDSVVWYLFSAGNEADVHGIYFSGNTYLWRGERRDTANLFPQTSLTLHMWPDTEGTFNVECLTTDHYTGGMKQKYTVNQCRRQSEDSTFYLGERTYYIAAVEVEWDYSPQREWEKELHHLQEQNVSNAFLDKGEFYIGSKYKKVVYRQYTDSTFRVPVERKAEEEHLGILGPQLHADVGDKVKIIFKNMATRPYSIHAHGVQTESSTVTPTLPGETLTYVWKIPERSGAGTEDSACIPWAYYSTVDQVKDLYSGLIGPLIVCRRPYLKVFNPRRKLEFALLFLVFDENESWYLDDNIKTYSDHPEKVNKDDEEFIESNKMHAINGRMFGNLQGLTMHVGDEVNWYLMGMGNEIDLHTVHFHGHSFQYKHRGVYSSDVFDIFPGTYQTLEMFPRTPGIWLLHCHVTDHIHAGMETTYTVLQNEDTKSG

SEQ ID NO: 1555 - DNA, 3195 bp, Artificial Sequence
  derived and/or modified sequence
atgaagatcctgatcctgggcatcttcctgttcctgtgcagcacccccgcctgggccaaggagaagcactactacatcggcatcatcgagaccacctgggactacgccagcgaccacggcgagaagaagctgatcagcgtggacaccgagcacagcaacatctacctgcagaacggccccgaccgcatcggccgcctgtacaagaaggccctgtacctgcagtacaccgacgagaccttccgcaccaccatcgagaagcccgtgtggctgggcttcctgggccccatcatcaaggccgagaccggcgacaaggtgtacgtgcacctgaagaacctggccagccgcccctacaccttccacagccacggcatcacctactacaaggagcacgagggcgccatctaccccgacaacaccaccgacttccagcgcgccgacgacaaggtgtaccccggcgagcagtacacctacatgctgctggccaccgaggagcagagccccggcgagggcgacggcaactgcgtgacccgcatctaccacagccacatcgacgcccccaaggacatcgccagcggcctgatcggccccctgatcatctgcaagaaggacagcctggacaaggagaaggagaagcacatcgaccgcgagttcgtggtgatgttcagcgtggtggacgagaacttcagctggtacctggaggacaacatcaagacctactgcagcgagcccgagaaggtggacaaggacaacgaggacttccaggagagcaaccgcatgtacagcgtgaacggctacaccttcggcagcctgcccggcctgagcatgtgcgccgaggaccgcgtgaagtggtacctgttcggcatgggcaacgaggtggacgtgcacgccgccttcttccacggccaggccctgaccaacaagaactaccgcatcgacaccatcaacctgttccccgccaccctgttcgacgcctacatggtggcccagaaccccggcgagtggatgctgagctgccagaacctgaaccacctgaaggccggcctgcaggccttcttccaggtgcaggagtgcaacaagagcagcagcaaggacaacatccgcggcaagcacgtgcgccactactacatcgccgccgaggagatcatctggaactacgcccccagcggcatcgacatcttcaccaaggagaacctgaccgcccccggcagcgacagcgccgtgttcttcgagcagggcaccacccgcatcggcggcagctacaagaagctggtgtaccgcgagtacaccgacgccagcttcaccaaccgcaaggagcgcggccccgaggaggagcacctgggcatcctgggccccgtgatctgggccgaggtgggcgacaccatccgcgtgaccttccacaacaagggcgcctaccccctgagcatcgagcccatcggcgtgcgcttcaacaagaacaacgagggcacctactacagccccaactacaacccccagagccgcagcgtgccccccagcgccagccacgtggcccccaccgagaccttcacctacgagtggaccgtgcccaaggaggtgggccccaccaacgccgaccccgtgtgcctggccaagatgtactacagcgccgtggagcccaccaaggacatcttcaccggcctgatcggccccatgaagatctgcaagaagggcagcctgcacgccaacggccgccagaaggacgtggacaaggagttctacctgttccccaccgtgttcgacgagaacgagagcctgctgctggaggacaacatccgcatgttcaccaccgcccccgaccaggtggacaaggaggacgaggacttccaggagagcaacaagatgcacagcatgaacggcttcatgtacggcaaccagcccggcctgaccatgtgcaagggcgacagcgtggtgtggtacctgttcagcgccggcaacgaggccgacgtgcacggcatctacttcagcggcaacacctacctgtggcgcggcgagcgccgcgacaccgccaacctgttcccccagaccagcctgaccctgcacatgtggcccgacaccgagggcaccttcaacgtggagtgcctgaccaccgaccactacaccggcggcatgaagcagaagtacaccgtgaaccagtgccgccgccagagcgaggacagcaccttctacctgggcgagcgcacctactacatcgccgccgtggaggtggagtgggactacagcccccagcgcgagtgggagaaggagctgcaccacctgcaggagcagaacgtgagcaacgccttcctggacaagggcgagttctacatcggcagcaagtacaagaaggtggtgtaccgccagtacaccgacagcaccttccgcgtgcccgtggagcgcaaggccgaggaggagcacctgggcatcctgggcccccagctgcacgccgacgtgggcgacaaggtgaagatcatcttcaagaacatggccacccgcccctacagcatccacgcccacggcgtgcagaccgagagcagcaccgtgacccccaccctgcccggcgagaccctgacctacgtgtggaagatccccgagcgcagcggcgccggcaccgaggacagcgcctgcatcccctgggcctactacagcaccgtggaccaggtgaaggacctgtacagcggcctgatcggccccctgatcgtgtgccgccgcccctacctgaaggtgttcaacccccgccgcaagctggagttcgccctgctgttcctggtgttcgacgagaacgagagctggtacctggacgacaacatcaagacctacagcgaccaccccgagaaggtgaacaaggacgacgaggagttcatcgagagcaacaagatgcacgccatcaacggccgcatgttcggcaacctgcagggcctgaccatgcacgtgggcgacgaggtgaactggtacctgatgggcatgggcaacgagatcgacctgcacaccgtgcacttccacggccacagcttccagtacaagcaccgcggcgtgtacagcagcgacgtgttcgacatcttccccggcacctaccagaccctggagatgttcccccgcacccccggcatctggctgctgcactgccacgtgaccgaccacatccacgccggcatggagaccacctacaccgtgctgcagaacgaggacaccaagagcggc

SEQ ID NO: 1556 - DNA, 3341 bp, Artificial Sequence
  derived and/or modified sequence
gggaaataagagagaaaagaagagtaagaagaaatataagagccaccatgaaaatccttattctcgggattttcctgttcttgtgctcgacaccggcatgggccaaagaaaagcactactacattgggattatcgagacaacgtgggattatgcgtcggaccatggggagaaaaagttgatctcggtggacacggaacactcaaacatctacctccaaaatggaccggacagaatcggacggctctacaagaaggcattgtacctccagtacaccgatgaaacttttcgaacaacaattgagaaacctgtctggctgggctttctgggacccatcattaaggctgagactggggataaggtgtatgtccacctcaagaatcttgcgtccaggccgtatactttccatagccatggaatcacatattacaaagaacatgagggggcgatctacccagacaacacgacggactttcagcgggcagacgacaaagtgtacccgggtgaacagtatacttatatgctcctggccacggaggaacagtcaccgggcgagggcgacggaaattgcgtaacgcggatctaccactcccacattgacgcgcctaaagatatcgcgtcgggattgattggtccgctcatcatttgcaaaaaggattccctggacaaagagaaggaaaaacatatcgatcgcgaatttgtggtcatgttcagcgtggtcgatgaaaactttagctggtacttggaggataacatcaagacatactgtagcgagcccgaaaaagtggataaggacaacgaagatttccaagagtccaatagaatgtactcggtgaacggttatacgttcggctccctgccgggactgtccatgtgcgctgaggaccgcgtgaaatggtacttgtttggtatggggaacgaagtggatgtgcacgcggcgttctttcacggccaagcgttgacgaacaaaaactacagaatcgatacgatcaatttgttccccgcaacgttgtttgatgcgtacatggtggcgcagaacccgggagagtggatgctttcgtgtcaaaatctcaatcatcttaaagcagggcttcaagcctttttccaagtgcaagaatgtaataagtcatcatccaaagataacattaggggtaaacacgtacgccactattacattgcggcggaggagatcatctggaattacgcgccgtcagggatcgacattttcacaaaagagaacttgaccgcaccagggtcagattcagcagtgtttttcgagcaggggacaaccagaatcggcggaagctataagaaacttgtgtaccgggagtacacagacgcctcctttacgaataggaaggagagaggtcccgaagaggagcacttggggattcttgggccggtgatttgggcggaagtaggggatactatccgggtcaccttccacaacaagggggcgtatccgctgtcgatcgaacccattggagtgcggttcaataagaataatgagggaacctactattcgcccaactataacccccagtcacgctcggtgcccccttcggcctcccatgtggctcccacggaaacgttcacgtatgaatggactgtacccaaagaagtgggaccaaccaacgcggaccccgtgtgtctggcgaagatgtattactccgcggtggaccctacgaaggacatctttacgggactgattggacctatgaagatttgtaagaagggatcgttgcacgccaacggtaggcagaaggatgtcgacaaggagttctacttatttcctactgtgtttgatgagaatgagtcacttctccttgaggacaatattcggatgttcaccactgcgccagaccaggtagacaaagaagatgaggattttcaagaatcaaataagatgcactcgatgaatggtttcatgtacggaaaccaacccggcctgacaatgtgcaagggggacagcgtagtctggtacttattctcagcaggaaacgaggctgacgtccacgggatctactttagcggaaacacctatttgtggaggggtgaacggagggataccgccaaccttttcccgcagacttccctcacgcttcatatgtggcccgacacagagggaactttcaatgtcgaatgccttacaaccgatcattataccggtggtatgaaacagaagtacacggtaaaccaatgtcggaggcagtcggaagattcgaccttctacttgggggagaggacgtactatatcgcggcagtcgaggtcgaatgggattactcgccccaacgggagtgggaaaaggaactgcaccatctccaagagcagaatgtcagcaatgcgttccttgacaaaggagagttttacatcggatcgaagtataagaaggtcgtatatcgccaatacacggattccacgttccgggtgccggtcgaaaggaaggcagaggaggagcaccttggaatcctcggaccgcagttgcacgcggatgtgggtgacaaggtgaagattatcttcaagaatatggccactcggccctattccattcacgcccacggtgtgcagacagagagctcgacagtcacgccaacacttcccggagagactcttacgtatgtctggaaaattccagaacgcagcggagcaggaacggaggactcagcctgcatcccctgggcctactactcaacggtagaccaagtaaaggacttgtacagcgggctcatcggtcccttgattgtctgtagacgaccgtacttgaaagtctttaacccccgacgcaaacttgaatttgctcttctctttcttgtgttcgacgagaacgagagctggtatttggacgacaacattaagacatacagcgaccaccccgagaaggtcaataaggacgacgaagagtttatcgaatcaaacaaaatgcacgcgatcaatggtcgcatgtttgggaatcttcaaggtcttacaatgcacgtgggcgatgaggtgaactggtatctcatgggaatgggaaacgagatcgacctccacactgtacactttcatggacactcatttcagtataagcaccggggagtctattcatcggatgtattcgacatctttcccgggacgtatcagacgctggaaatgttcccgcggacgccgggaatctggctccttcactgccatgtaacggaccacatccatgcagggatggaaacaacatacactgtactgcagaatgaggatactaagagcggttaatgagctgccttctgcggggcttgccttctggccatgcccttcttctctcccttgcacctgtacctcttggtctttgaataaagcctgagtaggaag

SEQ ID NO: 1557 - DNA, 3198 bp, Artificial Sequence
  derived and/or modified sequence
atgaagatcctgatcctgggcatcttcctgttcctgtgcagcacccccgcctgggccaaggagaagcactactacatcggcatcatcgagaccacctgggactacgccagcgaccacggcgagaagaagctgatcagcgtggacaccgagcacagcaacatctacctgcagaacggccccgacagaatcggcagactgtacaagaaggccctgtacctgcagtacaccgacgagaccttcagaaccaccatcgagaagcccgtgtggctgggcttcctgggccccatcatcaaggccgagaccggcgacaaggtgtacgtgcacctgaagaacctggccagcagaccctacaccttccacagccacggcatcacctactacaaggagcacgagggcgccatctaccccgacaacaccaccgacttccagagagccgacgacaaggtgtaccccggcgagcagtacacctacatgctgctggccaccgaggagcagagccccggcgagggcgacggcaactgcgtgaccagaatctaccacagccacatcgacgcccccaaggacatcgccagcggcctgatcggccccctgatcatctgcaagaaggacagcctggacaaggagaaggagaagcacatcgacagagagttcgtggtgatgttcagcgtggtggacgagaacttcagctggtacctggaggacaacatcaagacctactgcagcgagcccgagaaggtggacaaggacaacgaggacttccaggagagcaacagaatgtacagcgtgaacggctacaccttcggcagcctgcccggcctgagcatgtgcgccgaggacagagtgaagtggtacctgttcggcatgggcaacgaggtggacgtgcacgccgccttcttccacggccaggccctgaccaacaagaactacagaatcgacaccatcaacctgttccccgccaccctgttcgacgcctacatggtggcccagaaccccggcgagtggatgctgagctgccagaacctgaaccacctgaaggccggcctgcaggccttcttccaggtgcaggagtgcaacaagagcagcagcaaggacaacatcagaggcaagcacgtgagacactactacatcgccgccgaggagatcatctggaactacgcccccagcggcatcgacatcttcaccaaggagaacctgaccgcccccggcagcgacagcgccgtgttcttcgagcagggcaccaccagaatcggcggcagctacaagaagctggtgtacagagagtacaccgacgccagcttcaccaacagaaaggagagaggccccgaggaggagcacctgggcatcctgggccccgtgatctgggccgaggtgggcgacaccatcagagtgaccttccacaacaagggcgcctaccccctgagcatcgagcccatcggcgtgagattcaacaagaacaacgagggcacctactacagccccaactacaacccccagagcagaagcgtgccccccagcgccagccacgtggcccccaccgagaccttcacctacgagtggaccgtgcccaaggaggtgggccccaccaacgccgaccccgtgtgcctggccaagatgtactacagcgccgtggagcccaccaaggacatcttcaccggcctgatcggccccatgaagatctgcaagaagggcagcctgcacgccaacggcagacagaaggacgtggacaaggagttctacctgttccccaccgtgttcgacgagaacgagagcctgctgctggaggacaacatcagaatgttcaccaccgcccccgaccaggtggacaaggaggacgaggacttccaggagagcaacaagatgcacagcatgaacggcttcatgtacggcaaccagcccggcctgaccatgtgcaagggcgacagcgtggtgtggtacctgttcagcgccggcaacgaggccgacgtgcacggcatctacttcagcggcaacacctacctgtggagaggcgagagaagagacaccgccaacctgttcccccagaccagcctgaccctgcacatgtggcccgacaccgagggcaccttcaacgtggagtgcctgaccaccgaccactacaccggcggcatgaagcagaagtacaccgtgaaccagtgcagaagacagagcgaggacagcaccttctacctgggcgagagaacctactacatcgccgccgtggaggtggagtgggactacagcccccagagagagtgggagaaggagctgcaccacctgcaggagcagaacgtgagcaacgccttcctggacaagggcgagttctacatcggcagcaagtacaagaaggtggtgtacagacagtacaccgacagcaccttcagagtgcccgtggagagaaaggccgaggaggagcacctgggcatcctgggcccccagctgcacgccgacgtgggcgacaaggtgaagatcatcttcaagaacatggccaccagaccctacagcatccacgcccacggcgtgcagaccgagagcagcaccgtgacccccaccctgcccggcgagaccctgacctacgtgtggaagatccccgagagaagcggcgccggcaccgaggacagcgcctgcatcccctgggcctactacagcaccgtggaccaggtgaaggacctgtacagcggcctgatcggccccctgatcgtgtgcagaagaccctacctgaaggtgttcaaccccagaagaaagctggagttcgccctgctgttcctggtgttcgacgagaacgagagctggtacctggacgacaacatcaagacctacagcgaccaccccgagaaggtgaacaaggacgacgaggagttcatcgagagcaacaagatgcacgccatcaacggcagaatgttcggcaacctgcagggcctgaccatgcacgtgggcgacgaggtgaactggtacctgatgggcatgggcaacgagatcgacctgcacaccgtgcacttccacggccacagcttccagtacaagcacagaggcgtgtacagcagcgacgtgttcgacatcttccccggcacctaccagaccctggagatgttccccagaacccccggcatctggctgctgcactgccacgtgaccgaccacatccacgccggcatggagaccacctacaccgtgctgcagaacgaggacaccaagagcggctag

SEQ ID NO: 1558 - DNA, 3198 bp, Artificial Sequence
  derived and/or modified sequence
atgaaaatccttatcctcggaatcttccttttcctgtgtagcacccctgcttgggctaaggagaagcactactacatcgggatcatcgagactacctgggactacgcttctgaccacggtgagaaaaaacttattagtgtggacactgaacattctaacatttacctgcagaatggaccagacagaatcgggcggctctacaagaaagcattgtatttgcagtatacagatgaaacgttcaggacaacgatcgagaagccggtttggctgggcttcctgggccctatcataaaagccgaaaccggggataaagtatacgttcatctgaagaatctggccagtagaccgtacactttccacagccacggcataacctattataaggaacatgagggggccatctatccagacaacaccactgattttcagcgcgcagacgacaaggtgtatcctggcgaacaatacacatacatgctgctggcaaccgaggaacagtctccaggggaaggagatggaaactgtgttacacggatttatcactcacacatcgacgcccctaaggatatagccagtgggcttatcggaccccttatcatatgtaagaaagattcactggataaggaaaaggagaagcatatcgacagggagtttgtcgtaatgttcagcgtggttgatgaaaatttcagctggtacctagaggataacataaagacctattgtagcgagcccgaaaaggtcgacaaagacaatgaggatttccaagaaagtaacagaatgtactctgtcaatggatacacattcgggtccctccccggactgagcatgtgcgcagaggatagggtgaaatggtacctgtttggtatgggcaacgaggtagacgtacacgccgccttttttcacggtcaggctctgaccaataagaactacagaatcgatacaatcaacctctttcctgcaacactctttgacgcctacatggtggcccagaatcctggggaatggatgctgagttgccagaatttaaaccatctcaaggccggattacaggcgttttttcaggtacaggaatgcaataaaagcagcagtaaagacaatatacgcggcaagcacgttagacactattatattgccgcggaagagatcatctggaactacgccccgtccgggattgatatttttactaaggaaaaccttacggcaccggggtccgattccgcagtattttttgagcagggcaccacccggatcggcggcagctacaagaagttagtttatagagagtatactgatgcctctttcaccaatcgtaaggagcgcggccccgaagaggaacatcttgggatactgggtcccgttatctgggcagaggtgggcgataccattcgagtaaccttccataacaagggtgcgtaccctctgtcaattgagcctattggagtaaggttcaataagaacaacgaaggcacatattattctccaaactataatcctcaatcaaggagcgtgcccccatcggctagccatgtcgcccctacagagacattcacttacgagtggacagttcccaaggaagtggggcccacaaacgccgaccccgtgtgtctggccaaaatgtactattcagcagtcgagcccaccaaagacatttttactgggctaatagggcctatgaagatctgtaagaagggatccctccatgctaacggaaggcagaaagatgtcgacaaggagttctatctgttccccactgtgtttgacgaaaatgagtcactgctcctggaagataatatccgtatgttcactactgctcccgatcaggttgacaaagaagacgaagacttccaggagtctaataagatgcactctatgaatgggttcatgtatgggaatcagccagggctgactatgtgcaaaggagattctgtcgtctggtacttatttagcgccgggaatgaagcagatgtacatggcatctacttttcggggaacacctacctctggcgcggagaaaggcgtgatactgcgaatctgttcccacagacatctcttacgttgcacatgtggcccgacacagaagggacatttaatgtggagtgtctgacgacagaccactacaccggcggcatgaaacaaaagtacactgtgaaccagtgccggagacagtcggaggactctactttttatctgggcgagagaacctactacattgctgccgtggaggtcgaatgggattattctccccagcgggagtgggaaaaggagctgcatcacctgcaagagcagaatgtgtctaacgctttcctcgacaagggggagttctatatcgggagcaaatataaaaaggtggtgtataggcagtatactgacagcacattccgtgtcccggtggaacgaaaggcggaagaggagcacctaggtattcttgggccacaactccatgctgacgtgggagacaaggtgaagattattttcaaaaacatggctacaaggccctatagtatccacgcacacggtgttcagaccgaaagctcgacagtgacacctacccttccaggtgagacactgacatacgtgtggaaaattccagagcgctccggggccggaacagaggattccgcttgcataccctgggcatactatagcaccgtggaccaggtgaaagacctatattcagggctaattggacctcttatcgtctgtcggcggccttacctgaaggtgttcaatccacggaggaaactggagttcgcgcttctgttccttgtgttcgacgagaacgaatcgtggtatctggacgataacatcaagacatacagcgaccatccagagaaagtaaacaaggacgacgaagagttcatcgaaagcaacaagatgcacgcaattaatgggcgtatgttcgggaacctccagggtctgaccatgcacgtgggcgatgaagtcaactggtaccttatgggcatggggaacgagatagacttgcataccgtgcactttcacgggcactccttccagtacaaacaccgcggcgtgtatagcagtgacgtctttgatattttcccagggacataccagactttggagatgttcccgcggacacccggaatctggcttctacactgtcatgtgaccgatcatattcacgcggggatggagaccacctacactgtgcttcagaatgaggatacaaagtcggggtag

SEQ ID NO: 1559 - DNA, 4676 bp, Artificial Sequence
  derived and/or modified sequence
agagttatgcacaccctaatgcctccaacaataactgttgactttttattttcagtcagagaagcctggcaaccaagaactgtttttttggtggtttacgagaacttaactgaattggaaaatatttgctttaatgaaacaatttactcttgtgcaacactaaattgtgtcaatcaagcaaataaggaagaaagtcttatttataaaattgcctgctcctgattttacttcatttcttctcaggctccaagaaggggaaaaaaatgaagattttgatacttggtatttttctgtttttatgtagtaccccagcctgggcgaaagaaaagcattattacattggaattattgaaacgacttgggattatgcctctgaccatggggaaaagaaacttatttctgttgacacggaacattccaatatctatcttcaaaatggcccagatagaattgggagactatataagaaggccctttatcttcagtacacagatgaaacctttaggacaactatagaaaaaccggtctggcttgggtttttaggccctattatcaaagctgaaactggagataaagtttatgtacacttaaaaaaccttgcctctaggccctacacctttcattcacatggaataacttactataaggaacatgagggggccatctaccctgataacaccacagattttcaaagagcagatgacaaagtatatccaggagagcagtatacatacatgttgcttgccactgaagaacaaagtcctggggaaggagatggcaattgtgtgactaggatttaccattcccacattgatgctccaaaagatattgcctcaggactcatcggacctttaataatctgtaaaaaagattctctagataaagaaaaagaaaaacatattgaccgagaatttgtggtgatgttttctgtggtggatgaaaatttcagctggtacctagaagacaacattaaaacctactgctcagaaccagagaaagttgacaaagacaacgaagacttccaggagagtaacagaatgtattctgtgaatggatacacttttggaagtctcccaggactctccatgtgtgctgaagacagagtaaaatggtacctttttggtatgggtaatgaagttgatgtgcacgcagctttctttcacgggcaagcactgactaacaagaactaccgtattgacacaatcaacctctttcctgctaccctgtttgatgcttatatggtggcccagaaccctggagaatggatgctcagctgtcagaatctaaaccatctgaaagccggtttgcaagcctttttccaggtccaggagtgtaacaagtcttcatcaaaggataatatccgtgggaagcatgttagacactactacattgccgctgaggaaatcatctggaactatgctccctctggtatagacatcttcactaaagaaaacttaacagcacctggaagtgactcagcggtgttttttgaacaaggtaccacaagaattggaggctcttataaaaagctggtttatcgtgagtacacagatgcctccttcacaaatcgaaaggagagaggccctgaagaagagcatcttggcatcctgggtcctgtcatttgggcagaggtgggagacaccatcagagtaaccttccataacaaaggagcatatcccctcagtattgagccgattggggtgagattcaataagaacaacgagggcacatactattccccaaattacaacccccagagcagaagtgtgcctccttcagcctcccatgtggcacccacagaaacattcacctatgaatggactgtccccaaagaagtaggacccactaatgcagatcctgtgtgtctagctaagatgtattattctgctgtggaacccactaaagatatattcactgggcttattgggccaatgaaaatatgcaagaaaggaagtttacatgcaaatgggagacagaaagatgtagacaaggaattctatttgtttcctacagtatttgatgagaatgagagtttactcctggaagataatattagaatgtttacaactgcacctgatcaggtggataaggaagatgaagactttcaggaatctaataaaatgcactccatgaatggattcatgtatgggaatcagccgggtctcactatgtgcaaaggagattcggtcgtgtggtacttattcagcgccggaaatgaggccgatgtacatggaatatacttttcaggaaacacatatctgtggagaggagaacggagagacacagcaaacctcttccctcaaacaagtcttacgctccacatgtggcctgacacagaggggacttttaatgttgaatgccttacaactgatcattacacaggcggcatgaagcaaaaatatactgtgaaccaatgcaggcggcagtctgaggattccaccttctacctgggagagaggacatactatatcgcagcagtggaggtggaatgggattattccccacaaagggagtgggaaaaggagctgcatcatttacaagagcagaatgtttcaaatgcatttttagataagggagagttttacataggctcaaagtacaagaaagttgtgtatcggcagtatactgatagcacattccgtgttccagtggagagaaaagctgaagaagaacatctgggaattctaggtccacaacttcatgcagatgttggagacaaagtcaaaattatctttaaaaacatggccacaaggccctactcaatacatgcccatggggtacaaacagagagttctacagttactccaacattaccaggtgaaactctcacttacgtatggaaaatcccagaaagatctggagctggaacagaggattctgcttgtattccatgggcttattattcaactgtggatcaagttaaggacctctacagtggattaattggccccctgattgtttgtcgaagaccttacttgaaagtattcaatcccagaaggaaactggaatttgcccttctgtttctagtttttgatgagaatgaatcttggtacttagatgacaacatcaaaacatactctgatcaccccgagaaagtaaacaaagatgatgaggaattcatagaaagcaataaaatgcatgctattaatggaagaatgtttggaaacctacaaggcctcacaatgcacgtgggagatgaagtcaactggtatctgatgggaatgggcaatgaaatagacttacacactgtacattttcacggccatagcttccaatacaagcacaggggagtttatagttctgatgtctttgacattttccctggaacataccaaaccctagaaatgtttccaagaacacctggaatttggttactccactgccatgtgaccgaccacattcatgctggaatggaaaccacttacaccgttctacaaaatgaagacaccaaatctggctgaatgaaataaattggtgataagtggaaaaaagagaaaaaccaatgattcataacaatgtatgtgaaagtgtaaaatagaatgttactttggaatgactataaacattaaaagaagactggaagcatacaactttgtacatttgtgggggaaaactattaattttttgcaaatggaaagatcaacagactatataatgatacatgactgacacttgtacactaggtaataaaactgattcatacagtctaatgatatcaccgctgttagggttttataaaactgcatttaaaaaaagatctatgaccagatattctcctgggtgctcctcaaaggaacactattaaggttcattgaaatgttttcaatcattgccttcccattgatccttctaacatgctgttgacatcacacctaatattcagagggaatgggcaaggtatgagggaaggaaataaaaaataaaataaataaaatagaatgacacaaatttgagttttgtgaacccctgaacagatggtcttaaggacgttatctggaactggagaaaagcagagttgagagacaattctatagattaaatcctggtaaggacaaacattgccattagaagaaaagcttcaaaatagacctgtggcagatgtcacatgagtagaatttctgcccagccttaactgcattcagaggataatatcaatgaactaaacttgaactaaaaattttttaaacaaaaagttataaatgaagacacatggttgtgaatacaatgatgtatttctttattttcacatacactctagctaaaagagcaagagtacacatcaacaaaaatggaaacaaggctttggctgaaaaaaacatgcatttgacaaatcatgttaatagctagacaagaagaaagttagctttgtaaacttctacttcatttgattcagagaaacagagcatgagttttcttaaaagtaacaagaaaaggaacaaaaaaaatgaggtttgaaatcttttaccatggcaaaacattaacatctttctcaaaaacatagagaaatctggaaaaatcaagaagataaaattctggaccagttagtgacattctttcaagcatacttgtaaaatgtttccttaaagtgttcttgggatgaaaatgattgtcatgtctccaacaacagtgaactgatgttgttccttggaataaaagtcaatccccaccttaaaaaa

SEQ ID NO: 1560 - DNA, 3198 bp, Artificial Sequence
  derived and/or modified sequence
atgaagatcctgatcctgggcatcttcctgttcctgtgcagcaccccagcctgggccaaggagaagcactactacatcggcatcatcgagaccacctgggactatgccagtgaccatggagagaagaagctgatctctgtggacacagagcacagcaacatctacctgcagaatggaccagacagaattggccgcctgtacaagaaggccctgtacctgcagtacacagatgagaccttccgcaccaccatcgagaagcctgtgtggctgggcttcctgggccccatcatcaaggccgagactggagacaaggtgtatgtgcacctgaagaacctggccagccggccctacaccttccacagccacggcatcacctactacaaggagcacgagggcgccatctacccagacaacaccacagacttccagagagcagatgacaaggtgtacccaggagagcagtacacctacatgctgctggccacagaggagcagagccctggagaaggagatggcaactgtgtgacccgcatctaccacagccacattgatgcccccaaggacatcgccagcggcctcatcggccccctcatcatctgcaagaaggacagcctggacaaggagaaggagaagcacatcgaccgggagtttgtggtgatgttttctgtggtggatgagaacttctcctggtacctggaggacaacatcaagacctactgcagcgagcctgagaaggtggacaaggacaatgaagacttccaggagagcaacaggatgtacagcgtgaatggctacaccttcggcagcctgcccggcctgtccatgtgtgccgaggacagagtgaagtggtacctgtttggcatgggaaatgaggtggatgtgcacgccgccttcttccacggccaggccctgaccaacaagaactacagaattgacaccatcaacctcttccctgccaccctgtttgatgcctacatggtggcccagaaccctggagagtggatgctgagctgccagaacctgaaccacctgaaggccggcctgcaggccttcttccaggtgcaggagtgcaacaagagcagcagcaaggacaacatccggggcaagcacgtgcgccactactacatcgctgctgaggagatcatctggaactatgcccccagcggcatcgacatcttcaccaaggagaacctgacagcccctggcagtgacagcgctgtgttctttgagcagggcaccacccgcatcggcggcagctacaagaagctggtgtaccgggagtacacagatgccagcttcaccaacaggaaggagcggggccctgaggaggagcacctgggcatcctgggccctgtgatctgggccgaggtgggggacaccatccgggtgaccttccacaacaagggggcctaccccctgagcattgagcccatcggcgtgcgcttcaacaagaacaatgaaggcacctactacagccccaactacaacccccagagccgctctgtgcccccatctgccagccacgtggcccccacagagaccttcacctatgagtggacagtgcccaaggaggtgggccccaccaatgctgaccctgtgtgcctggccaagatgtactacagcgctgtggagcccaccaaggacatcttcaccggcctcatcggccccatgaagatctgcaagaagggcagcctgcacgccaacggccggcagaaggatgtggacaaggagttctacctgttccccaccgtgtttgatgaaaatgaaagcctgctgctggaggacaacatccgcatgttcaccacagccccagaccaggtggacaaggaggatgaggacttccaggagagcaacaagatgcacagcatgaatggcttcatgtatggcaaccagcccggcctgaccatgtgcaagggggacagcgtggtgtggtacctgttctctgctggaaatgaagcagatgtgcacggcatctacttcagcggcaacacctacctgtggagaggagagcggcgggacacagccaacctcttcccccagaccagcctgaccctgcacatgtggccagacacagagggcaccttcaacgtggagtgcctgaccacagaccactacacaggaggcatgaagcagaagtacacagtgaaccagtgccggcggcagagcgaggacagcaccttctacctgggggagaggacctactacatcgctgctgtggaggtggagtgggactacagcccccagcgggagtgggagaaggagctgcaccacctgcaggagcagaatgtgtccaatgccttcctggacaagggggagttctacatcggcagcaagtacaagaaggtggtgtaccggcagtacacagacagcaccttccgggtgcctgtggagaggaaggccgaggaggagcacctgggcatcctgggcccccagctgcacgcagatgtgggggacaaggtgaagatcatcttcaagaacatggccacccggccctacagcatccacgcccatggagtgcagacagagagcagcacagtgacccccaccctgcctggagagaccctgacctacgtgtggaagatccctgagaggtctggagctggaacagaggacagcgcctgcatcccctgggcctactacagcacagtggaccaggtgaaggacctgtacagcggcctcatcggccccctcatcgtgtgcagaagaccctacctgaaggtgttcaaccccaggaggaagctggagtttgccctgctcttcctggtgtttgatgaaaatgaatcctggtacctggatgacaacatcaagacctacagcgaccaccctgagaaggtgaacaaggatgatgaggagttcatcgagagcaacaagatgcacgccatcaatggccgcatgtttggaaacctgcagggcctgaccatgcacgtgggagatgaggtgaactggtacctgatgggcatgggaaatgaaattgacctgcacacagtgcacttccacggccacagcttccagtacaagcacagaggagtgtacagcagtgatgtgtttgacatcttccctggcacctaccagaccctggagatgttccccaggaccccaggcatctggctgctgcactgccacgtgacagaccacatccacgccggcatggagaccacctacacagtgctgcagaatgaagacaccaagagcggctag

SEQ ID NO: 1561 - DNA, 3198 bp, Artificial Sequence
  derived and/or modified sequence
atgaagatcctgatcctgggcatcttcctgttcctgtgcagcacccccgcatgggccaaagagaaacattattatatcgggattatcgagaccacatgggactatgcttccgatcatggcgagaagaagcttatcagcgttgatactgagcactcaaatatctacctgcagaatggcccagatagaatcgggaggctctacaaaaaggccctatacctgcagtacaccgacgagacctttagaacaactatcgagaagcccgtctggctgggtttcttaggcccaatcatcaaggcggaaaccggagataaagtctacgtgcatctaaaaaatctggccagtagaccctacacgtttcattctcacgggattacgtattataaggagcatgaaggggctatataccctgacaacaccacagatttccaacgcgccgatgacaaagtgtatcccggcgagcagtacacttacatgctgctggccacagaggaacagtcacccggtgaaggcgacgggaactgcgtgactcggatctatcactcccatattgacgcccccaaggatatagcctcaggcctgatcgggccgcttattatttgtaagaaggactcattagacaaggaaaaagagaaacacatagacagggaattcgtggtgatgtttagtgttgtagatgagaatttctcctggtaccttgaagataacatcaaaacatattgttcagagccagaaaaggtagacaaggacaacgaggactttcaagaatccaatagaatgtactctgtgaatggatacacgttcgggagcctgcctggccttagtatgtgtgctgaagatcgggtcaagtggtacctgttcggcatggggaacgaggtggacgttcatgctgcattttttcacggtcaggctctcaccaacaagaattatcgtattgataccattaacctgttccctgcgacactctttgacgcctatatggtggcacagaacccaggggagtggatgctctcttgccagaatctcaaccacttaaaagcaggactgcaagcctttttccaggtccaggagtgtaataaatccagctctaaagataatatccgcggcaaacatgttaggcactattatattgcagctgaagagatcatctggaattatgctccctcagggattgatatctttaccaaggaaaatctgacagcccctggctcagatagtgccgtttttttcgagcagggcacgacccgtatcggggggtcctataagaagctcgtctacagggaatacacagatgcatctttcaccaacagaaaagagcggggacctgaggaggagcatcttgggattctgggtccggtgatatgggcggaagtcggtgacactattcgggtgacgttccacaacaagggagcctatccactttccatcgaacccattggcgtcaggtttaataagaataacgaaggtacgtactactctccaaactacaacccacagagtcggtcggtaccaccttccgccagccatgtggctcccaccgagactttcacttatgagtggacagtccccaaagaggtggggcctaccaacgccgatcctgtctgcctcgcgaagatgtactattctgcagtggaaccaacgaaagacatatttaccggccttattggtcctatgaaaatctgtaagaaaggatctctgcacgccaatgggaggcaaaaggacgtggacaaagagttctatttatttcccacagtcttcgatgaaaatgaatctctgctattagaagataacatacggatgtttaccaccgctccagaccaggttgacaaagaagatgaggatttccaagaaagtaacaagatgcatagcatgaacggtttcatgtacggaaatcagcccgggctgacaatgtgcaagggtgatagcgtggtctggtatttattctctgcaggcaatgaggcagatgtgcacggcatttatttcagcgggaacacatacctctggaggggagagaggcgggatacagctaatctgttccctcagacctcactgacactgcacatgtggcccgataccgaaggtaccttcaacgtcgaatgtttgacaacagatcactatacaggaggcatgaaacaaaagtatacagtcaaccaatgtcgccgtcaaagcgaagatagtacattctatttgggtgaaaggacctattacatcgctgccgtggaagtggagtgggattacagtccgcagagagagtgggaaaaagaactgcatcatttacaggagcaaaacgtatcgaacgccttcctggataagggagagttttatatcgggtctaagtacaaaaaagtggtttatcggcagtataccgatagcaccttccgtgtcccagtggaaaggaaagcggaggaggagcacttaggtatcctcgggccgcagctccatgccgacgtgggcgacaaggttaagatcattttcaaaaatatggcgacccgaccttactctatacacgcccacggcgtccagaccgagtcttcaacagtcactccaaccctcccaggggaaacacttacatacgtgtggaagatcccagagcgctcaggggccggcacagaggattctgcgtgcatcccatgggcttactactccactgtcgaccaggttaaagacttatattctgggctgatcggacctctcatcgtgtgtcgccgcccgtatttgaaagtgttcaatcccaggcgcaaactggagtttgccctcctttttctggtgtttgatgaaaacgagtcctggtacctggatgataatatcaagacatactccgatcatccagaaaaggttaataaagatgatgaagagtttattgagtcaaataagatgcacgccatcaatggtcgaatgtttggcaacctgcaaggattgaccatgcacgtcggagatgaggtgaactggtatctgatggggatgggaaatgaaatcgacctgcacacggttcacttccatggtcactctttccagtacaaacaccgcggcgtatattctagtgatgtgtttgatatatttcccggtacctatcagacgctggaaatgttcccacggacaccaggtatctggctgcttcactgccacgtgacagaccatatccatgctggaatggaaacaacttacacggtgctgcagaatgaggacactaaaagtggttag

SEQ ID NO: 1562 - DNA, 3198 bp, Artificial Sequence
  derived and/or modified sequence
atgaaaattctcattctcggcatcttcctttttctgtgtagtactcccgcttgggctaaggaaaagcactactacatagggataatcgaaacaacctgggattacgcttccgaccacggagagaaaaaactgatctctgtggataccgagcattccaacatttatctgcagaatggcccagaccgcattggcaggctgtacaagaaagccctgtacttacaatacactgacgagacgttccgtacaaccatcgagaagccagtgtggctggggtttctggggccaatcatcaaggcagagacaggtgacaaagtgtacgtgcacctgaaaaatctcgcgagtcgcccatacacatttcattcacacggaattacctactacaaggaacacgagggggctatttaccccgacaacaccaccgacttccagagagccgacgacaaagtgtaccctggggagcagtatacctatatgctgctggccaccgaggaacagtctccaggtgaaggggacggcaactgcgtcaccaggatctaccactcccacatcgatgcccctaaagatatagcaagtggcttgattggaccattgatcatctgtaaaaaagattctctcgacaaggagaaggagaagcatattgacagggaattcgtggtgatgttcagcgtcgtcgatgagaacttcagctggtacttagaagataatatcaaaacctattgctccgaaccggagaaggtcgataaggacaatgaggattttcaggagtccaacaggatgtactccgttaacgggtataccttcggcagccttccagggctgagcatgtgcgccgaggatcgggtgaagtggtacctgttcgggatggggaatgaggtagacgttcacgctgccttttttcacgggcaggctctcacaaataagaactataggatcgatacaattaatttgttccctgccacactgtttgacgcctatatggttgcccagaaccctggggaatggatgctttcttgtcagaatctgaaccatctcaaggcaggcctgcaggctttttttcaggttcaagagtgcaacaaaagttcttctaaagacaatatccgtggcaaacatgtgagacattactacattgccgcagaagagattatatggaattacgccccatccgggatcgacattttcactaaggaaaacctgactgcaccagggtccgacagtgctgtgtttttcgaacaagggacaactaggatcggcggttcttacaagaaattggtttatagagagtacacggatgcctcctttaccaatagaaaagaacgtggtccagaggaggagcacctgggaattctgggtcccgtgatctgggcggaagttggcgacacgattagagtcacattccataataagggcgcttaccccctttccatcgaaccaatcggcgtcagattcaacaagaacaatgaaggcacctattatagccccaattataatccacagtccaggtctgttccaccatcagcttcccatgtggccccaaccgaaacgtttacctacgaatggacagtgccaaaagaagtcggtcccaccaacgcggatccagtctgtttggccaagatgtactactcagcagtggagcccactaaagacatctttaccggcctcattggtccaatgaaaatctgtaagaagggcagtctgcatgcaaacggcagacagaaggacgtggataaggagttctatctgtttccaacagtgtttgatgaaaatgagtcactgttgctggaagacaatattcggatgtttacaactgcccctgaccaagtggataaagaggatgaggactttcaggagagcaacaagatgcatagcatgaacggcttcatgtacgggaatcaacctggactcaccatgtgcaagggtgattccgtagtctggtatctgtttagtgcaggcaacgaggccgacgtgcatgggatttacttttcaggcaatacatacctgtggagaggcgaacgcagagacactgcgaatctcttccctcaaaccagcctgacgctccacatgtggcccgacacagaaggcacatttaacgttgaatgtcttacaactgaccattacaccggcggaatgaagcagaagtacactgttaaccagtgcaggcgacaaagtgaagattccaccttctacctgggggaacgtacttattatattgccgcagtggaggttgagtgggattacagtccacagcgcgagtgggagaaagagttgcaccacttacaggaacaaaatgtgagtaatgcattcttggataaaggggagttttacatcggatctaagtacaagaaagtcgtctaccgccagtataccgactctacttttagagtcccagtggaaagaaaagccgaagaggaacacctcggcatcctagggcctcagctgcacgccgatgtgggcgacaaggtgaagattatatttaaaaacatggctactcgcccttattctattcacgcacacggtgtacagacggaatctagcacagtgacaccaactcttccgggagaaaccctgacttacgtctggaagatacccgaacgatcaggggctggcaccgaagacagtgcatgcataccatgggcttactacagtacagtggatcaggtgaaggacctctattcgggcttgatcggccctttgatagtctgtcgcaggccttatctcaaagtattcaacccaagaaggaaactggaatttgctctgttattcctcgtgttcgatgagaatgaatcctggtaccttgacgacaatattaagacatattcagatcatccagaaaaagtcaataaagacgatgaagagttcattgagtctaataaaatgcacgcaattaatggccgaatgttcgggaaccttcaggggctgactatgcacgttggcgatgaggttaattggtacttgatgggtatgggcaatgagatcgacctccatacggttcattttcatggacactccttccagtacaagcaccgcggagtttattcatcagatgtgttcgacatctttccaggcacctaccagaccttggagatgttccccagaacgcctggtatttggctgctgcattgccacgtgactgatcacatccatgccggtatggagaccacatataccgtgctccagaatgaggacaccaagagcggatag

SEQ ID NO: 1563 - DNA, 3198 bp, Artificial Sequence
  derived and/or modified sequence
atgaagatcctcattctgggaattttcttattcctctgctcgacccccgcctgggccaaagaaaaacactattatattggaataatcgagacaacctgggattatgcctcagaccacggagagaaaaagctgataagcgttgatacagaacattcaaacatttacctgcagaatgggcccgataggattggccggctgtacaaaaaagcactgtatctgcagtatacagacgaaaccttccggactaccatcgagaagcctgtatggctcggctttctgggtcccataatcaaagccgaaactggagataaagtgtacgtacatctgaaaaacttggcttcacgtccttacacctttcactctcacggaataacctattataaagagcacgagggcgcaatatatccagacaacacgaccgacttccaacgtgctgacgataaggtatatccaggtgaacaatacacctacatgctgctggccacagaggaacaatcaccaggcgagggtgacggaaattgtgttactaggatctaccactcccatatcgatgctccaaaggatatcgcctctggtctgatcggccccttaatcatctgcaagaaggactcgctggataaggagaaagagaaacacatcgacagggagttcgttgtcatgttttcagtggtcgatgaaaactttagctggtacctcgaagataatatcaaaacctactgtagcgaaccagagaaggtggataaagacaacgaagactttcaggagtccaatcggatgtatagcgtgaatgggtatacctttggaagcctccccggactgagtatgtgcgctgaagatcgggtgaagtggtatctctttggaatgggcaacgaagtcgacgtacacgccgccttcttccatgggcaagctctaactaacaagaattacagaatcgatactatcaaccttttcccagcaaccctattcgatgcctacatggtggcacagaatccaggcgagtggatgctatcatgtcagaaccttaatcatctcaaagctgggctgcaggcctttttccaggtgcaggagtgcaacaaatcaagctctaaagataacatcagagggaagcacgttcggcattattatatcgcagctgaggaaatcatatggaattatgccccaagcggcatagacatttttacaaaggagaacttgaccgctcccggctcagattccgccgtgttcttcgaacaggggacaactaggatcgggggatcctataagaaactggtgtatcgagaatataccgatgcatcgttcacaaatagaaaggagagagggccagaagaggaacatctgggaatacttgggcccgtgatttgggccgaggtaggcgataccattagggtgaccttccacaacaagggagcgtaccctctttccatagaacctatcggagtgagatttaataaaaataacgagggcacctactattccccaaactataacccacaaagtcggagtgtgccaccttccgcctcccatgtggcccctacagaaaccttcacatatgagtggacggtgccaaaagaagtcggaccaactaacgcagatcccgtttgtctggccaaaatgtattactctgccgtagagcccaccaaggatatatttactggactgatcgggccgatgaagatctgtaagaaaggttcactacatgccaatggtcggcagaaagacgtggacaaggaattctacctgttcccaacagtttttgatgagaacgagagccttctgttagaggacaatatcaggatgtttaccacggctcccgatcaggtagacaaggaggacgaagactttcaggagtccaataaaatgcattcgatgaacggattcatgtacggcaaccagccagggctcactatgtgtaaaggagactccgtagtctggtatctgttttcagctggaaacgaagccgacgtgcatgggatatactttagtggcaacacttatttatggcgcggagagcggagggacactgcgaacctatttccccagacatccctgaccctccatatgtggcctgacacagaagggactttcaacgtggagtgcctgacaacagatcactatactggcggaatgaaacagaagtacaccgtaaaccagtgtcgacgacagtccgaagattctacattctacttgggggagaggacttactacatcgctgcagtcgaagtagaatgggattactcgccccagcgagaatgggagaaggagctacaccacctacaagaacagaacgtttccaatgccttcctagacaaaggggaattctacattggatcaaagtataagaaggtggtgtaccggcagtacaccgactccacattccgggtgcctgtggagcgaaaagcagaggaggaacacctgggcattttgggacctcagcttcacgcagacgtgggagacaaagtgaaaattatttttaaaaatatggcgacaagaccctactccattcatgcacacggagtccagaccgagtctagcacagttacgcctacacttccaggcgagaccctgacgtacgtgtggaagatccccgagagaagcggggccggaaccgaagattctgcttgcatcccctgggcttattactccactgtcgaccaggtgaaagatctatactccggactcatcggcccattaatagtctgccggagaccctatcttaaagtgttcaatccccgtcgcaagcttgaattcgcactgctgttcttggtgtttgatgagaatgagagctggtacctggacgataatattaaaacctactctgaccacccagagaaagtgaacaaagacgatgaggaattcatagaatccaataaaatgcacgccataaatggcaggatgttcggcaatcttcagggactgactatgcatgtgggcgacgaagttaactggtatctgatgggcatgggcaatgagattgatttgcacacggtccactttcatggccattcgttccagtacaaacaccggggcgtatatagcagcgatgtgtttgacatatttcccgggacctatcagactctcgaaatgttccctcgcacgcctggcatatggctacttcactgccatgtcactgaccacattcacgctggaatggaaaccacatacacagttctccagaacgaggatacgaaatccggctag

SEQ ID NO: 1564 - DNA, 3198 bp, Artificial Sequence
  derived and/or modified sequence
atgaaaatcttgatcctgggtatattcctatttttatgcagtacccccgcatgggctaaagaaaagcactattatattggaatcatcgagacaacgtgggactacgccagcgaccatggagagaaaaaactgatcagcgtggataccgaacactcaaacatttacctgcagaatggtcctgatcgcatcggccgactgtataaaaaagcactctacctccagtacactgacgaaaccttcaggacgacgattgaaaaacccgtgtggcttggcttccttggacccatcattaaagcagaaaccggagacaaagtctacgtccacttgaagaatctcgctagccgcccatacaccttccattcccacggcatcacatattacaaggagcacgagggcgcaatatacccagacaacacaactgatttccagagggcagatgataaagtgtacccaggcgaacaatatacctacatgctcttggccactgaggagcaatcccctggtgagggtgatggaaactgcgttacacggatttaccattcccacattgatgcacccaaggacattgcttccgggcttattggaccactgatcatttgcaagaaggactcactcgataaagaaaaagaaaaacatatagatagggaattcgtggtaatgttttcggtcgtggacgaaaatttctcctggtacttggaggacaatattaagacttactgctcggaacccgagaaagttgacaaagacaacgaagattttcaggagagtaacagaatgtattccgtgaatggctacactttcggcagccttccaggcttaagtatgtgcgccgaagatcgggtaaagtggtatctatttgggatggggaacgaggtcgatgtgcacgcagctttcttccacggccaggccctgaccaataaaaattatagaatcgacactatcaatctcttccctgcaaccctcttcgatgcctacatggtcgcccaaaatccaggggagtggatgcttagctgccaaaatttaaatcatcttaaggccggcctccaggcttttttccaagtgcaagaatgcaacaagagctcgtctaaagataacatcagaggtaagcatgttcgccattactatatcgccgcagaagaaattatttggaactatgcgccttcgggtatcgatatcttcacaaaagagaacttgactgctcctgggagcgactccgccgtgttttttgagcaaggtactacgagaatcggcggctcatacaaaaaattagtttaccgggagtacacagatgcaagttttacgaatcgaaaggaaaggggtccagaggaggaacatctgggtatccttggacctgttatttgggcggaagttggagatacaattagagtaacgttccacaataaaggggcgtaccctctcagcattgagccaatcggagtgcgattcaacaagaataatgaaggcacatactactcacccaattacaacccgcagagtcgttccgttcccccatccgcttcacacgtcgctccaactgaaacttttacttatgagtggactgtacccaaagaagtaggacccaccaacgccgatcctgtgtgcttggccaaaatgtattattcagctgtggagccaaccaaagacatctttacagggttgatcggaccaatgaagatctgtaaaaaagggagccttcacgctaatggccgccagaaggacgtggataaagagttctatctgtttccaactgtatttgatgaaaatgagtctttgttgctggaggacaacatcagaatgtttaccacagcccctgatcaggtggacaaggaggatgaagattttcaggaatcaaataaaatgcattccatgaatggatttatgtatggaaatcaaccaggtttgactatgtgtaaaggagattcagtagtctggtacttgtttagtgctggtaatgaagccgatgtccacggaatatatttcagtgggaatacttatttatggcggggggaaaggcgagacactgctaacttatttccacagacctcactaactctgcacatgtggccagatacagaaggcactttcaatgttgagtgtcttacaaccgatcactatacaggcggaatgaaacaaaagtacaccgtaaatcaatgtcgacgccagtcagaagactctacgttttatttgggggagcgcacctactacatcgcggccgtagaggtggaatgggattacagcccacagcgggagtgggaaaaagaactacatcatctccaagagcagaatgtgtcaaacgccttcctggacaaaggggaattttacatagggagcaaatacaaaaaagtcgtctatcgtcagtacacggattcaacctttcgcgtgcccgtagagagaaaagccgaggaggagcacctggggatcctcggtccacaacttcacgccgacgtgggtgacaaagtaaagataattttcaaaaacatggctacacggccttatagcattcatgctcacggagtccagacagagtcaagcacagttacccctacactccctggtgaaacgctcacatacgtatggaaaatccccgaaagatccggcgccggtactgaagacagtgcctgcatcccttgggcatattattccaccgtcgatcaggtgaaagatctatattcaggtctcatcgggccactcatcgtttgcagacggccttatttgaaggtttttaatcctagaagaaaactcgagtttgcactattgttccttgtgttcgatgaaaatgaaagttggtatttagatgataatatcaaaacatactcggatcaccccgaaaaggtaaataaagatgatgaggagttcatcgagagcaacaaaatgcatgcaattaatggccggatgttcgggaacctccagggattgactatgcatgttggggatgaggtcaactggtacttaatgggcatgggaaacgagatcgatctgcacacagtgcattttcacggacattccttccaatacaaacaccgaggcgtctatagctccgacgtatttgatattttccctggcacataccaaactctagagatgtttcccagaacaccaggtatctggcttcttcattgtcatgtgacagaccatatacacgcgggaatggagactacttatacagtcctgcagaacgaggatacaaaaagcgggtag

SEQ ID NO: 1565 - DNA, 3195 bp, Artificial Sequence
  derived and/or modified sequence
atgaaaattcttatccttggtatctttcttttcctgtgctcaacaccagcctgggctaaggaaaagcactactatatcggaatcatcgaaactacttgggactacgcctctgatcatggcgagaaaaagctgatctcagttgacactgagcattccaacatttacctgcagaatggcccagataggattggaagattgtataagaaagctctctacctgcagtatactgacgagacctttagaaccactattgagaagccagtgtggctgggctttctgggcccaattatcaaggctgagaccggcgataaagtgtacgtgcatcttaaaaacctggcgtctagaccatataccttccactctcacggaatcacgtactataaggagcatgaaggcgcaatatatccggataataccactgactttcaaagagctgatgataaggtgtatccgggtgaacagtatacatacatgctgctcgctaccgaagaacagtcaccgggtgaaggcgacggaaattgtgtcaccagaatctatcattcccacattgacgcccctaaagacatcgctagcggccttattggccccttgattatttgcaaaaaggactccctggataaggagaaggaaaaacacatcgaccgcgaattcgtggtgatgttctctgtcgtcgatgagaatttctcatggtatttggaggataacataaagacgtactgctccgagcctgaaaaggtagataaggacaacgaggacttccaggagtctaaccgcatgtacagcgtgaatggttacaccttcggctccctgccaggtctttctatgtgtgcagaagatagagtgaagtggtaccttttcggcatgggaaacgaggtggacgtgcacgccgccttctttcatggacaggccctcacaaacaagaattaccgcattgacaccattaacctgttccctgctacgctgttcgatgcatacatggttgctcagaacccaggcgagtggatgctctcctgtcagaatctgaaccaccttaaagcaggacttcaagccttcttccaggttcaagagtgtaataagagctcctctaaggataatattagaggtaaacatgtgcgccactattacatcgccgcagaggagatcatttggaattacgcgccaagcggaatcgatatctttactaaggagaacctgaccgcacccggctcagattcagccgttttcttcgagcagggtactacgagaataggtggatcatataaaaagctcgtgtacagagagtataccgacgccagttttaccaaccgcaaagagcgcggtccagaagaggagcatctgggtatccttggcccggtgatctgggcagaggtgggagataccatccgcgtgacgttccacaacaagggagcttacccgctctctatcgagcctatcggagttaggttcaacaaaaataacgaaggaacttactatagccccaactacaaccctcagtctagaagtgttcctcccagcgcttctcacgtcgctcctacagaaacatttacttacgagtggaccgttcccaaggaagtgggtcctacgaacgccgatcccgtttgcctggcgaagatgtactacagcgccgtcgaccctaccaaggatatcttcacaggcctgattggtccaatgaagatctgcaagaaaggtagcttgcacgccaacggcagacagaaagatgtggacaaagaattctatctcttccccactgtttttgatgagaatgaatctctgctcctggaagacaatataagaatgtttaccacagctccagaccaggtcgataaggaggacgaggacttccaggagtcaaataaaatgcactcaatgaacggcttcatgtacggtaaccaacccggcctgactatgtgtaagggcgattcagtggtgtggtacttgttctcagcaggtaacgaggcagacgttcatggcatttacttttctggcaatacctacctttggcgcggcgaaaggcgcgacacagctaacttgttccctcaaactagcctgacgctgcatatgtggcccgacaccgagggtaccttcaacgtggaatgtctgaccacagatcactatacgggaggaatgaagcagaaatacactgtgaaccaatgccgccgccaaagtgaagactccactttttatcttggagagaggacatattacatcgccgctgtggaggtagagtgggactactccccacagagagaatgggagaaagagcttcatcacctgcaagagcagaatgtttcaaacgcgttcctggacaagggcgaattttacatcggaagtaagtacaaaaaagtggtctacagacaatatacagactccaccttcagagtgccagtggaacgcaaagctgaggaggaacatttgggtatcctgggacctcaactccacgccgacgttggagacaaggtcaagataatttttaaaaatatggctaccaggccctacagtatccacgcccatggcgtccagacagaatcctctacggtaacaccaacattgccaggcgaaactctgacatacgtctggaagataccagaacgcagtggtgccggtaccgaggacagtgcatgtatcccctgggcatactactctaccgtcgaccaggttaaggacctctatagcggactgatcggcccacttatcgtctgtaggaggccctatctcaaggtattcaaccccagacgcaagctggagttcgccctcctgtttctggtgtttgacgaaaatgaatcctggtacctggacgataatattaaaacatactccgatcaccccgagaaagtcaacaaagatgacgaagagttcatcgaatcaaacaagatgcacgcaattaacggcagaatgtttggtaacttgcagggactgacaatgcacgtgggtgacgaggtgaattggtatctcatgggaatgggtaacgaaattgatctgcatacagtccacttccatggccacagtttccagtataagcaccgcggagtatactcaagtgatgtttttgatatcttcccaggcacataccagactctggagatgttcccaagaacaccaggaatctggctgctccactgccatgtgaccgaccatatacacgctggcatggagaccacctacaccgtcttgcagaatgaggatacaaaatctggt

SEQ ID NO: 1566 - DNA, 3195 bp, Artificial Sequence
  derived and/or modified sequence
atgaagatcctcatcctcggcatcttcctgttcctttgctcgactcctgcatgggccaaggagaaacactactacatcggaatcatcgagactacgtgggactacgccagcgaccacggagaaaagaagctgatctcggtggatactgagcactctaacatctaccttcaaaatggaccggaccgcatcggcagattgtataagaaggccctgtacttgcaatacactgacgaaaccttcagaaccaccatcgaaaagccagtttggctggggttcttgggacccattatcaaagcagagacgggcgataaggtctacgtccatcttaagaacctggcttcgcgcccatacacgttccattcccatggaatcacctactataaagagcacgaaggagctatctacccggacaataccactgacttccaacgggctgacgacaaagtgtacccgggtgaacaatacacctacatgttgctcgctactgaggagcagagccctggggaaggcgacggaaactgcgtgaccaggatttaccattcccacatagacgcccctaaggacattgcctctgggctcatcggaccgctcattatctgcaaaaaagactcgctcgataaagagaaggaaaagcacatcgaccgggaatttgtggtgatgttttcagtggtggacgaaaacttcagctggtacctggaggacaacatcaagacttactgctcagaaccagaaaaagtcgacaaggacaacgaggacttccaggaatctaaccgcatgtactcagtcaatggatacacctttgggagtctgcctggcctgtcgatgtgcgcggaggatagggtgaagtggtacctgttcggaatggggaacgaggtggatgtgcacgcggccttcttccacggacaggctttgaccaataagaactaccgcatcgacaccatcaacctgttcccggccactctgtttgatgcctacatggtggcacagaatcctggtgaatggatgctcagctgtcagaacctgaatcatctcaaggccgggcttcaagcattcttccaggtgcaggaatgcaataagtcctcctctaaagacaatatcaggggcaagcacgtgcgccattactacatagccgctgaagaaatcatctggaactacgcgccttcaggaatcgacatctttaccaaggagaacctgacggccccggggtcggactccgccgtgttcttcgaacaggggactacccgcatcggaggaagctacaagaagctggtgtatcgcgaatacaccgacgcatcattcaccaaccgcaaagaacgggggccagaggaagagcatctgggcatcctgggtccggtgatctgggctgaagtgggcgacacgatccgcgtcacgttccacaataagggggcatacccactcagcattgagcctatcggcgtgcgcttcaataagaataacgaagggacgtattactcgccgaactacaatccacaaagccggtccgtgcccccttccgcgtcacacgtggcccctactgagacgtttacttacgaatggaccgtccccaaggaagtcggtccgaccaatgccgatccagtgtgcctggccaagatgtattactcggcggtggatccgaccaaggatatcttcactggactcattggaccgatgaagatttgtaagaagggctccctgcacgcaaacggacggcagaaggatgtcgataaggaattctatctgttcccgacggtgtttgacgagaatgaatcgcttctgctggaggacaatattcggatgtttactaccgcgccagaccaagtggacaaggaggatgaagatttccaggaatcgaacaagatgcactcaatgaatggttttatgtacggtaaccaaccgggcctgaccatgtgcaagggcgacagcgtggtttggtatctgttctcggcgggaaacgaggctgacgtgcacggaatttacttctccggaaacacttacctctggcggggagagcggagagatactgcaaacctgttcccccaaacttccttgactctgcatatgtggccggatactgaaggcactttcaacgtcgaatgcctgaccactgatcattacaccggcggaatgaagcagaaatacaccgtgaaccagtgtagacgacagtcggaggactccaccttttacctcggggaacggacctattacatcgctgctgtggaggtcgagtgggactactctccacagcgggagtgggaaaaggagcttcaccacctgcaagagcagaatgtctccaacgcatttctggacaagggagagttctacatcggatcaaagtataagaaggttgtgtatcgccagtacaccgactcaaccttccgcgtgccagtcgaacgcaaggcggaggaagaacatctgggaatcctgggcccacagctgcatgcggacgtgggcgataaagtgaaaatcatctttaagaatatggcaacgcggccgtacagcatccacgctcacggggtgcagaccgaatcaagcacggtgacccccaccctgcctggagaaaccctcacctacgtgtggaagataccggaacgctcgggggccgggaccgaggactcggcatgcatcccatgggcttactattcgacggtggaccaggtgaaagatctgtactccggccttatcggccctctcatcgtttgtcgtcgcccgtatcttaaagtgtttaacccgaggagaaaactggaatttgccctgctgttcctcgtattcgacgagaatgagtcttggtacttggacgacaacatcaaaacgtactcagatcaccccgaaaaggtgaacaaagatgatgaagagtttatcgaatccaacaagatgcatgctatcaatggccggatgttcggcaacctgcagggactgaccatgcacgtcggagacgaggtcaactggtacctcatgggaatgggtaacgaaatcgatctccataccgtgcacttccatggacactctttccagtacaagcacagaggagtgtactcctctgacgtttttgacatcttcccgggaacctaccaaactttggagatgtttccaagaactccgggaatctggctcctgcattgccatgtgactgatcacatccacgcgggcatggagactacttacaccgtcctgcaaaacgaggacactaagtccggc

SEQ ID NO: 1567 - DNA, 3195 bp, Artificial Sequence
  derived and/or modified sequence
atgaaaatactcatcctgggaatctttctgttcttgtgttcaactcccgcatgggcaaaagagaaacattactacatcgggattattgaaaccacctgggactacgcatccgaccatggcgagaagaaactcattagcgtggacaccgaacacagcaatatctacctgcaaaacggtccagatcggatcggacgtttgtacaagaaagctctgtacctgcagtacactgacgaaacttttcgcactactatcgaaaagcctgtatggcttggtttcctcggtccaataatcaaagcagaaaccggagataaggtgtatgttcatctcaagaatcttgcgtcccggccttacacctttcattcacatggtattacctactacaaggaacatgaaggggccatttaccctgataacactaccgactttcagcgggcggacgataaggtctatcccggagaacaatacacttacatgctcctcgcaaccgaagagcaatctccgggagaaggtgacggtaactgtgtgacccggatttaccactcacacatcgacgcacctaaggatatagcctccggtctgataggacctctgatcatatgtaaaaaggactccctggacaaagagaaagagaagcacattgatagggagttcgtcgtgatgttttcggtggttgatgaaaacttcagctggtacctggaagataacatcaaaacttactgctcggagcccgaaaaggttgacaaggataacgaggattttcaggaaagtaaccgtatgtactcggtcaacggctacacctttggtagcctccctggtctgagcatgtgcgcagaagatcgggtcaagtggtacttgtttggaatgggcaacgaagtggacgtccatgccgcctttttccatggtcaagcactgactaacaagaactaccgcattgataccattaacctctttcctgcgactctgtttgatgcatacatggtggcacagaacccaggcgagtggatgctctcgtgccaaaatctgaatcacctgaaagcggggctccaggcatttttccaggtccaagaatgcaacaaatctagctccaaggataacatacgagggaaacacgtccggcattactatattgcagcggaagaaatcatctggaactacgctccctcaggtattgatatcttcaccaaggaaaacctgaccgcaccaggatcggattccgcagtgtttttcgagcagggcactactaggattggcgggtcttataagaaattggtgtacagagagtacactgatgcatcgtttaccaatcggaaggaaaggggaccggaggaagaacaccttggaatattggggcccgtcatctgggctgaggtgggagataccatccgagtcacctttcacaataagggagcatatccactctcaattgaacccattggggtgagatttaacaaaaacaacgagggtacctattactcacctaactacaatccccaatcccgatcggtaccccctagcgcatcgcacgtggcaccaaccgaaacttttacttatgagtggaccgttccaaaagaggtgggacctaccaatgccgacccagtgtgtctcgccaagatgtactactccgccgtggatcccaccaaggatatcttcacgggactgattggtcccatgaagatttgtaaaaagggctcccttcacgcaaatggtagacaaaaggatgtggataaggagttttacctgttcccaaccgtttttgacgagaacgagtccctcctgttggaggataacattcgcatgtttactaccgcacctgaccaggtcgacaaagaggatgaggacttccaagaatcgaataagatgcatagcatgaacggatttatgtatggtaaccaaccaggcctgaccatgtgtaaaggagactcggtggtgtggtacctgttctccgccggaaatgaagccgacgtccatggtatttacttctccggaaacacgtacctttggcgtggtgaacgacgagacactgctaacctgtttccacaaacttcacttacgcttcacatgtggcctgatactgaagggacgtttaacgtggaatgtctgaccaccgatcattacacgggaggcatgaagcaaaagtacacggtgaaccaatgtagacgccagagcgaggatagtaccttttacctgggcgaaaggacttattacattgccgccgtggaagtggaatgggattactcgccgcagagggaatgggagaaggaattgcatcacctgcaggagcagaacgtctcgaatgcattccttgacaagggcgaattctatatcgggagcaagtacaagaaagtcgtttacagacaatacaccgattccacttttcgggtgccagtggagagaaaggcagaagaagaacatttgggaattctgggacctcaacttcatgcagatgtgggagataaggttaagattatctttaagaacatggccactagaccctacagcatccatgcacacggcgtccaaacggaatcatcaactgtcacgccgaccctcccgggggagactctgacttatgtgtggaaaatcccagaacgatcaggagcaggaaccgaagatagtgcatgcattccatgggcctactacagcactgtcgatcaagtgaaggatctttactcgggacttattggacctttgatcgtctgtaggcgtccgtaccttaaagtgttcaatcccagacgtaagctcgagttcgcccttcttttcctcgtgtttgatgagaacgaatcttggtatcttgacgacaatatcaaaacgtactcggatcatcccgaaaaggtgaacaaagatgacgaagagtttattgaatccaataagatgcacgctatcaacggccgaatgttcgggaaccttcagggactgactatgcatgtgggcgatgaggtgaattggtaccttatgggtatgggtaatgaaattgacttgcacaccgtccatttccatggacactccttccagtataagcatagaggagtctactcctcggatgtgtttgacatttttcctggtacctaccagactctcgagatgtttccgcggacgccaggtatttggcttctccattgtcatgttacggatcatatccatgcaggcatggaaaccacctacaccgtgctgcaaaacgaggacaccaagagcgga

SEQ ID NO: 1568 - DNA, 3195 bp, Artificial Sequence
  derived and/or modified sequence
atgaagatcctgatcctgggtatcttcttgttcttgtgcagcaccccggcctgggccaaggagaagcactactatatcggtatcattgagactacgtgggactacgcctcagatcatggggaaaagaagttgatttccgttgataccgaacactctaacatctacctgcagaacgggcccgatcggattggccggctgtacaagaaagctctctacctccaatacacggacgaaaccttccggaccaccatcgagaagcctgtgtggttgggatttctggggccaatcatcaaggctgaaaccggagacaaggtctatgttcacctcaaaaatctggcgtctcggccatacacttttcactcgcacgggattacctactacaaggagcacgaaggcgcaatctacccggataacactactgatttccaaagggcagatgataaagtgtacccgggggaacagtacacctatatgctgctggccactgaagagcagtcccccggtgagggagacggaaactgcgtcacccggatctaccactcacatatcgacgcacctaaggacatcgcgtccggcctcatcgggcctcttatcatttgcaaaaaggacagcctcgacaaagagaaagagaaacatatcgaccgggagtttgtcgtgatgttctccgtggttgacgaaaacttctcgtggtacctggaagataacattaagacctactgctccgagcctgagaaagtggacaaagacaacgaagatttccaagagagcaacaggatgtactcagttaatggatacacgttcggatcgctccctggactgtcgatgtgcgcagaggaccgggtgaagtggtacctcttcgggatgggaaacgaagtggatgtccatgccgcgttctttcatggacaggcgcttaccaataagaactaccggatcgacaccatcaatttgttcccagccactctcttcgacgcatacatggtggctcagaaccctggtgaatggatgcttagctgtcagaacctgaaccatcttaaggccggactccaggccttctttcaggtgcaggaatgcaacaagtcgagctcaaaggacaacatacgcgggaagcacgttcggcactactacatcgccgcagaagagatcatttggaattacgcaccgagcggcatcgacatctttaccaaggaaaatctcactgcgcccgggagcgacagcgccgtattctttgaacagggcaccacgcgcattggaggatcgtacaaaaagctggtgtaccgcgaatacaccgatgcctcgttcactaatagaaaggagcgtggcccggaagaagaacatcttggaatcctgggacctgtgatctgggctgaggtgggagacaccattagggtcactttccataacaaaggagcctacccgctctcaatcgaaccaatcggggtcagattcaataagaataatgaaggcacctactactctcccaattacaacccgcagtcccggtcggtcccgcccagtgcgagccacgtggcacccaccgaaaccttcacttacgaatggactgtgccaaaggaagtcggacccaccaacgcggatccggtgtgtctcgcaaaaatgtattactcagcggtcgacccaactaaggacatcttcaccggccttatcggtcctatgaaaatctgtaagaagggcagcctgcacgcgaatggacgccaaaaggacgtggataaggagttttacctgttccctaccgtgttcgatgagaacgagtccttgctcctggaggacaacatcagaatgttcacgactgctccggaccaggtggacaaggaggatgaggacttccaggagagcaataagatgcattcgatgaacggattcatgtacggaaaccagcctggcctcaccatgtgcaaaggggattcggtggtctggtacctgttctctgcgggcaacgaggccgacgtgcatggaatctacttctccgggaatacctacctgtggcgcggagaaagacgcgataccgcaaatctcttcccgcaaacttccctgactctgcatatgtggccggataccgagggtaccttcaacgtcgaatgcttgactactgatcactacaccggtggaatgaaacagaagtacactgtcaaccaatgccgccgacagtccgaggactccactttttacctgggagagagaacttattacatagccgccgtagaggtcgaatgggattactcaccgcaaagagagtgggaaaaggaactgcaccatttgcaggaacagaacgtgtctaatgccttcctggacaaaggggagttttacatcggatcgaagtataagaaagtggtgtaccggcaatatactgattcgaccttcagagtgccggtggaaagaaaagccgaagaagaacaccttgggattctgggaccgcaactccatgcggacgtgggagacaaagtcaagatcatcttcaagaacatggctactcgcccgtactcaatccatgctcatggtgtccaaactgaatcttcaactgtgaccccaaccctgccaggcgaaacccttacttacgtgtggaaaatcccggagcgatcaggagccggaactgaagatagcgcctgtataccgtgggcatactattcaactgtcgatcaagtgaaggacttgtactcggggctcattgggcctctgatcgtgtgcaggcgcccgtacctcaaagtctttaacccaaggcgcaaactggagttcgccctgctcttcctggtatttgatgaaaacgagtcctggtacctggatgacaacatcaagacctactcggaccaccccgagaaggtgaataaggacgacgaagagtttatcgaatcgaataagatgcacgctatcaacggccggatgttcggaaacctgcagggactcacgatgcacgtaggcgatgaggtgaattggtacctgatgggcatgggtaacgaaattgatctgcacactgtgcacttccacggacatagctttcagtacaaacaccgcggggtctactcctcagacgtgttcgacatcttcccaggtacgtatcaaactttggaaatgtttcctagaacgcctggcatctggctcttgcactgccacgttactgaccatatccacgctggcatggagacgacctacacggtgttgcagaatgaagatactaagtccggg

SEQ ID NO: 1569 - DNA, 3195 bp, Artificial Sequence
  derived and/or modified sequence
atgaaaattctgattctcggaatctttctttttctctgcagcactcctgcatgggcaaaggaaaagcattactacatcgggattatcgaaacgacttgggactacgcatccgatcatggagaaaagaagctgatctcggtcgatacggagcactcgaacatttacctgcaaaatggaccggatcggatcggtcggctgtacaagaaagcactttatctgcagtacaccgatgagacttttagaactaccatagaaaagcctgtgtggctgggatttcttggacctatcattaaggctgagacgggcgacaaggtttatgtgcatcttaagaacctcgccagccgcccatacacctttcactcccacggaattacctactacaaggaacatgaaggggccatctacccggataataccactgactttcaaagggctgacgataaagtgtaccctggagagcagtacacttacatgctgctggccaccgaagaacaatcccctggagaaggcgacggtaactgtgtgaccagaatttaccattcgcacatcgatgccccaaaggacatcgcctcaggactcattggacctctgataatctgcaagaaagactccctggacaaagaaaaagaaaaacatattgatagggaatttgtcgtgatgttttcggtcgtggacgaaaacttctcctggtaccttgaagataacattaagacctattgttccgaacctgaaaaggtcgataaggataacgaagattttcaagaatctaataggatgtacagcgtcaacggatacacctttggctcgctgcccggattgtcaatgtgcgcagaagatcgcgtgaaatggtacctttttggaatgggaaatgaagtcgatgtccacgcagcgttttttcatgggcaggcactcaccaataagaactaccggatcgataccataaacctttttccggcaacgctgttcgacgcctatatggtggcgcaaaatcctggcgagtggatgctgtcatgccagaacttgaatcatctcaaggcaggcctgcaggcgttcttccaggtccaagagtgtaataagtcgtcatcaaaggataacattagaggtaagcatgtgagacactactacatagccgctgaagaaatcatctggaactatgcaccatcaggtatcgatatcttcactaaggaaaacctcaccgcaccagggagcgactctgcagtgtttttcgagcagggaaccaccaggatcggaggatcctacaagaagctggtctaccgggagtacaccgacgccagcttcactaatcgcaaggaacgcggtccagaagaggaacacctgggcatacttggacccgtgatttgggcagaagttggtgatacgatcagagtgacgttccataacaagggagcataccccctgtcgatcgagccaataggggtgcggtttaacaaaaacaacgagggaacttactactctccaaattacaaccctcaatcgagatctgtgcctccttccgcttcccacgtggcacctaccgaaacctttacgtacgaatggaccgtcccgaaggaggtcggaccaaccaatgccgacccagtgtgtttggcaaaaatgtactactccgcagtggatcccacgaaagacattttcactggactgatcgggccaatgaagatatgtaagaagggatccctgcatgcaaatggccggcaaaaggatgtggataaggagttttacttgttcccaactgtgtttgatgagaacgaatcgctgcttctggaggacaacattaggatgttcaccaccgcacctgatcaagtcgataaggaggatgaggactttcaagaaagtaataagatgcactcgatgaatggttttatgtatggtaaccaaccggggctcaccatgtgtaagggcgattccgtggtgtggtaccttttctcggcaggaaatgaggctgatgtccatggaatatacttctccggtaatacgtacctgtggaggggggaaagacgcgatacggccaacctctttcctcaaacttcccttacgcttcatatgtggccggatactgaaggaactttcaatgtggaatgcctgacgaccgatcattacactggcggaatgaagcaaaagtacacggtgaatcagtgtagacgacagagcgaggatagcactttttaccttggtgaaagaacttattacattgcagctgtggaggtcgaatgggattatagcccccaacgtgaatgggaaaaggaactgcaccacctccaagagcaaaatgtctccaacgcctttcttgacaaaggagaattctacattggatccaagtacaaaaaagtcgtgtaccggcaatacactgatagcacctttcgagtgcccgtggaacgaaaagctgaggaggaacatctgggaattcttggcccccagctccatgcggatgtgggtgacaaggtgaagatcattttcaaaaacatggccacccgcccatacagcattcacgcccatggtgtacaaactgagtcctcgaccgtgacccctacccttccgggtgagactctgacttacgtgtggaagatcccagagagatcgggagcagggaccgaagattcggcatgtattccttgggcctactactccactgtggaccaagtcaaggatctttactccggccttatcgggcctctcatcgtgtgtcgacgtccttatcttaaggtgttcaatccaaggagaaagttggaattcgcacttctctttttggtgtttgacgaaaacgaatcttggtatctcgatgacaacattaagacttacagtgatcacccagaaaaggtcaacaaagacgacgaagagtttatagagtcgaacaaaatgcatgcaattaacggcagaatgtttggtaaccttcaaggacttactatgcatgtgggcgatgaagtcaactggtacttgatgggaatgggtaacgagattgatcttcataccgtgcatttccacggacattcctttcagtacaaacatcgcggcgtgtactcaagcgacgtgtttgatatctttccaggtacgtaccaaactctggaaatgttcccaagaacccctggaatttggcttctgcattgtcacgtcaccgaccacattcatgccggaatggaaaccacttacacggtgcttcagaatgaagatacgaagagcggt

SEQ ID NO: 1570 - DNA, 3195 bp, Artificial Sequence
  derived and/or modified sequence
atgaaaattctgattttaggaatttttctttttctgtgctcaacaccagcctgggcgaaggaaaaacattattacatcggcattatcgagacaacctgggactacgcctcagatcacggagagaagaaactgatatccgtcgatacagagcactctaacatctacctacagaacggtccggacaggatcggcaggttgtacaagaaggccctctacttgcaatataccgatgaaacgtttcggaccaccatagaaaaaccggtctggctgggtttcctgggaccaatcataaaggctgaaacaggcgataaggtttacgttcatctgaaaaacctagctagcagaccatataccttccatagccatgggattacatactataaagaacatgaaggcgccatctacccagacaacactaccgacttccagagagctgacgataaagtctaccccggtgagcagtatacttacatgctgttggccactgaggaacagagtcctggcgaaggcgacggcaactgtgttactaggatatatcattctcatattgacgcacccaaagacatcgctagtggactcattggaccactgattatctgcaaaaaagactccctcgataaagagaaagagaagcacatcgatcgggagttcgttgttatgttcagcgtcgtcgatgagaatttctcttggtacctggaagacaatataaagacctactgttcagagcctgaaaaggttgataaggataatgaagacttccaggaaagtaaccgtatgtattctgtcaatggatacacattcggttccctacccggtctctcgatgtgtgccgaagatcgggtcaagtggtacctctttggcatgggcaatgaagtggatgtccacgctgcattctttcacggccaggcattgacgaacaaaaattatcgaatcgataccatcaacttattccctgccacattgttcgatgcgtacatggtcgcccaaaatcctggagaatggatgctgagctgtcagaatctgaaccatctcaaagctggtctgcaagcgttttttcaggtgcaggaatgcaataaatcatcttccaaagataacatccgggggaaacacgtgcggcattactatattgccgcggaggaaatcatctggaattatgctcccagtggaatcgatattttcacgaaggagaacctgaccgcgccgggaagtgattctgccgtgttcttcgagcaagggaccactcgcatcgggggatcttacaaaaagctggtgtatagagagtatacagatgcctcttttacaaaccggaaggaaagggggcccgaggaggagcacctcggcattctgggccccgtaatttgggctgaggtcggggatacaatacgagtgacattccacaataaaggggcctatcctttgtccatcgaaccaatcggtgtgcgcttcaataagaacaacgaggggacttactactctcccaattacaatccccagtccaggagtgttcctccctctgcctcacatgtggcccccaccgagaccttcacttatgaatggaccgtccccaaagaagtgggcccaacgaacgcagatcctgtatgcttggccaaaatgtattattccgctgtcgatccgacaaaggacattttcactggactaatcggacccatgaagatctgcaaaaaggggtcgttgcatgcgaatggccggcagaaggacgtcgataaggagttctacttgttccccaccgtgttcgacgagaatgaatctctgcttcttgaagataacattcgcatgttcacaacggccccagaccaggtggataaggaggatgaagacttccaggagtccaacaagatgcacagtatgaacggatttatgtatggaaatcagcccggcttgactatgtgcaagggtgattccgtcgtatggtatcttttctccgctggaaacgaggcagacgttcacggcatatatttttctggcaatacctatctctggagaggcgagcgcagagatactgctaacctgtttccccagacgtcccttactctgcacatgtggccggatacagagggcaccttcaatgtggaatgccttactacggaccactatacaggcggtatgaaacaaaaatacacggtgaaccagtgtcggcggcagtctgaagattcaaccttttatctcggagaacggacctattacatcgcggcggtcgaggtggagtgggattactcaccacagagggagtgggaaaaagaactccaccacttgcaggaacaaaacgttagcaatgctttcctggataaaggtgaattctacatcggaagtaagtacaagaaggtggtttatcgacaatacacagacagcacattcagagtccccgtggagcgaaaagccgaggaagaacacctggggattcttggcccccagttacatgctgatgtaggtgacaaggtgaaaatcatcttcaaaaatatggctacccgcccatactctattcatgcccacggcgtgcagaccgaatcatccacagtgacccctacactgccgggggagaccctgacatatgtttggaaaatcccagagcgttctggcgcgggcaccgaagactctgcctgtattccttgggcctattactctaccgtggaccaagtgaaagacctttattcaggtctgataggtccacttatcgtatgcagacgaccttatctaaaagtgttcaaccccagacgaaaactggaatttgctttgctgttcctggtgtttgacgaaaatgagagctggtatctggatgacaatattaaaacatactccgaccaccccgagaaggttaacaaggatgatgaggaattcatcgaaagcaacaagatgcatgccattaatggccgcatgtttggcaacctgcagggtttgacgatgcatgttggggacgaggtgaactggtatttaatggggatggggaacgaaatcgacttacacacagtgcattttcatgggcactcattccaatataagcatagaggagtgtattcaagcgatgtttttgacatttttccgggcacatatcaaaccttagagatgttccctcggacacctggaatatggctgttacactgtcatgtcacagaccacatccacgctggaatggaaactacttataccgtgctgcagaatgaggataccaaatctggc

SEQ ID NO: 1571 - DNA, 3195 bp, Artificial Sequence
  derived and/or modified sequence
atgaagatcctgatcctggggatttttcttttcctctgttcgacccctgcatgggcgaaggaaaaacattactatatcggcatcattgagactacctgggattacgcatcggatcacggagagaagaaattgatttccgtggataccgaacattccaatatctacctgcagaatggcccagatcgcattgggagattgtacaaaaaggccttgtaccttcaatatacggacgaaacctttcggacgaccatcgaaaagccagtgtggcttggatttcttggcccaataatcaaagcagaaaccggagataaggtgtacgtgcacctgaagaatcttgcatcgaggccctacactttccactcccacgggattacctactacaaagaacacgaaggagctatctaccctgataataccaccgatttccagcgggccgatgacaaagtctatccaggagaacagtacacctacatgctccttgccaccgaagagcaaagccccggggagggagatggaaattgcgtcactcgtatttaccattcgcatattgacgcacctaaggatatagcatcagggctgattggccctttgattatctgtaagaaggattcgcttgacaaggagaaggaaaagcatattgaccgggaatttgtcgtgatgttttcggtggtggatgaaaacttttcgtggtacctggaggataacattaagacctactgttcagaaccagaaaaggtcgataaggataatgaagatttccaggaaagcaatagaatgtattcggtcaatggttacacttttggctccttgcctggactttcaatgtgtgcagaagatagagtgaagtggtacctgttcggaatgggtaacgaggtggatgtgcatgccgccttttttcacggtcaagctcttacgaataagaattacagaattgatactattaaccttttccccgcaaccctgtttgatgcctatatggtggcccagaatccaggtgaatggatgctgtcgtgtcaaaacctgaatcatctgaaggcaggtctgcaagcgtttttccaagtgcaagagtgcaacaagtcctcatccaaagataacatccgaggtaagcatgtcagacactattacatagcagcagaagagataatctggaactacgctcctagcggcattgacatctttaccaaagagaatctcaccgcacctggatccgattcagcggtgttctttgaacaaggaaccactagaattggaggatcctacaagaaactggtgtacagagagtatactgatgcttcgtttaccaacagaaaggagagaggacctgaagaggaacatctcgggattttgggcccagtgatctgggcagaggtgggcgataccattagagtcacctttcataacaagggtgcttaccctctgtccatcgaacctataggggtcagatttaacaagaataatgaaggaacctactactcacctaattacaacccacaaagccgcagcgtgccaccctccgcgtcgcacgtggctccaaccgagacgtttacctacgaatggaccgtgccaaaggaggtcgggcccactaacgccgacccagtgtgtctcgccaagatgtactacagcgcagtcgacccgaccaaggacatattcaccggtctgattggacccatgaagatatgcaagaagggttcgctgcatgcgaacgggcgccagaaggatgtggataaggaattctacctgttcccaaccgtattcgatgagaatgagtccctccttctggaggacaacatccgtatgtttactaccgcgccagatcaggtcgacaaagaagatgaagattttcaagagtcgaacaagatgcattccatgaatggtttcatgtacgggaaccaacccggtctgaccatgtgtaagggtgattcagtcgtgtggtaccttttctctgcagggaacgaggccgatgtccatgggatttacttttcaggtaacacttatctgtggagaggggagcgcagagacactgctaatctgttccctcaaacttccctgactctgcatatgtggcctgacaccgagggcacttttaacgtggaatgcctgactactgaccattacaccgggggcatgaagcagaagtacactgtgaatcaatgtaggagacagagcgaagatagtacgttctacttgggagaacgaacctactacatcgcagcggtcgaagtcgagtgggattacagccctcaaagagaatgggaaaaggagcttcaccacctccaagaacagaacgtgtccaatgcgttccttgataagggagaattctacataggttccaaatacaaaaaggttgtgtacagacaatacacggatagcacctttcgagtgcctgtcgagcggaaggcggaggaagaacacctgggtattctcggtccccaactgcacgccgatgtcggcgataaagtgaagatcatctttaagaacatggcgaccaggccctacagcatccacgctcacggcgtgcaaaccgaatcctcgaccgtgaccccaactctgccaggagaaaccctgacctacgtgtggaagattcctgaaaggtcgggcgccggtactgaagattccgcatgtattccttgggcctactacagcaccgtcgaccaggtcaaggatttgtactcggggctcattggtcctctgatcgtttgtagacgtccttaccttaaagtgtttaaccctcggcgtaaacttgaatttgcccttctcttcctggtgttcgacgagaatgaatcctggtaccttgacgacaacataaagacgtactcggaccatccagaaaaggttaacaaagatgatgaagagttcatagaatcgaacaaaatgcatgcaattaacggacgcatgttcggtaaccttcagggcctgaccatgcatgtgggcgatgaagtgaactggtacttgatgggaatgggaaacgagatcgatctgcacaccgtgcattttcacgggcactcctttcaatacaaacatcgaggggtgtacagctcggacgtgtttgacatatttccgggtacctaccaaacgcttgagatgttcccacgcacgcccggcatttggctgcttcactgtcatgtcaccgatcatatccacgcaggaatggagactacctacactgtgctgcagaatgaggataccaagagcgga

SEQ ID NO: 1572 - DNA, 3195 bp, Artificial Sequence
  derived and/or modified sequence
atgaagatcctgatcctggggatcttcctctttctttgtagcaccccagcatgggccaaggaaaagcattactacattggtatcatcgaaacaacgtgggactatgccagcgaccatggcgaaaagaagctgatttctgtggacacagagcattcaaatatctacctccagaacggccccgatagaatcggcagactttacaaaaaagccctgtatctgcagtatactgatgaaactttccgcacgactatagagaagcccgtgtggctcgggttcctgggtcccattattaaagccgaaacgggcgacaaggtgtacgtccacctcaagaatttggccagcagaccctatacgtttcactcacacggcattacatactacaaagagcatgaaggcgcaatttatccagataacacgacagactttcagcgggcggatgacaaggtttaccccggtgaacagtatacatatatgctgcttgcaactgaggaacagtcccccggggaaggggatggcaactgtgtgacaaggatctaccacagccacatcgatgcacccaaggatatagcctctggattgatagggcccctgatcatatgtaagaaggattctttggacaaagagaaagagaagcacatcgatcgagagttcgtcgtgatgttctcagtggtggacgaaaatttctcctggtatctggaggataatattaaaacatactgcagtgagcccgagaaggtggacaaagataatgaggatttccaggaatctaatcggatgtactccgttaacggatataccttcggctccctgcctggcctctcaatgtgcgccgaggacagggtcaaatggtatttgttcggaatggggaatgaggtagatgtgcatgccgcctttttccatgggcaggcactgacaaataaaaactaccgaatagacaccattaatctcttccctgccactttgttcgatgcatacatggtagcacagaaccccggagagtggatgctgtcttgccagaacctgaaccatttgaaggccggtcttcaggctttttttcaagtgcaagaatgtaataaaagtagtagcaaagataacatcagggggaagcacgtgcgccactattacatagccgccgaggagatcatatggaactacgctccatctggtatcgacatcttcacgaaagaaaacctgacagccccagggtctgatagcgccgtgttttttgaacagggcacaacacgcatcggaggcagctacaagaaactcgtgtatagagagtacacagatgctagcttcaccaatagaaaggaacgggggccagaggaggagcatctgggaattctgggtccagtgatctgggcggaggtgggcgacactatccgcgtgacgtttcataacaagggagcctatcctctgtctatcgagcccataggcgttcggttcaacaaaaacaacgagggcacttactactccccaaattacaatcctcaatcaagaagcgtgccgccatctgcctctcacgttgcacccactgaaactttcacttatgagtggaccgtacctaaagaggtaggccccacgaatgcagatcccgtgtgcctggcgaagatgtactattcagccgtggatcccactaaggatattttcactggactgatcggcccaatgaagatctgtaaaaaaggttcccttcatgcgaacggaagacagaaggatgtggacaaggagttctacctttttcctaccgtgttcgatgaaaacgagtctctgcttcttgaggataacattagaatgttcactaccgcccctgaccaggtggataaagaggatgaggatttccaggaatcaaataaaatgcattccatgaatggtttcatgtacgggaatcaaccaggattgaccatgtgcaaaggagactctgtcgtttggtacctctttagtgccggcaacgaagccgacgttcatggcatttactttagcggcaatacatatctctggcggggcgagagaagggacaccgctaacctctttcctcagacttccctgacacttcacatgtggccagatacagaggggacattcaatgtcgagtgcctgacgacagaccattacaccggggggatgaagcagaagtataccgtgaaccagtgccggcgacagtctgaggattctaccttctacctcggtgagaggacatactatatcgccgccgtggaagtggagtgggattatagcccgcagagggagtgggagaaggagctccaccacctgcaagaacaaaatgtcagtaatgccttcctggacaaaggcgagttctacattggtagtaaatataagaaggtggtgtatagacagtacaccgactccacattccgagtacctgttgaacgcaaagctgaggaagagcatctgggcattctgggcccacagctccacgctgatgtgggagacaaggtgaagatcatcttcaagaacatggctacaagaccctattcaatccatgcccacggggtgcaaaccgaaagctccaccgtgacgcccacactgcccggcgagaccctcacatatgtgtggaaaattcccgaacgatcaggtgccgggactgaggacagcgcttgtattccgtgggcttattactccaccgttgatcaagtcaaggacctgtacagcggtctcataggccctctcatcgtgtgtaggcgcccttatctcaaggtgtttaacccgagacgaaagctcgaatttgcactcctgtttttggtgttcgatgaaaacgagtcttggtacctcgacgataatatcaagacgtattccgaccacccggaaaaggtgaacaaggacgatgaggaattcatcgagtctaataagatgcacgcaataaatggcaggatgtttgggaatctgcagggattgacaatgcacgtgggcgatgaggtaaactggtaccttatgggaatgggaaatgagatagatctccacaccgtgcactttcacggccactccttccaatacaagcaccgaggcgtgtattctagcgatgtgttcgacattttccccggcacttatcagacattggagatgttccctaggactccgggaatttggctgctccattgccacgtaacagaccatatccacgcaggtatggaaacaacctatactgttttgcaaaacgaggatacaaaaagcggg

SEQ ID NO: 1573 - DNA, 3195 bp, Artificial Sequence
  derived and/or modified sequence
atgaaaatcttaattctgggcatttttctgttcctctgcagcactccggcatgggccaaggaaaaacattattacatcggtatcatcgaaactacctgggactatgccagtgaccacggggagaaaaaactcattagtgtggacaccgagcatagtaacatctaccttcagaacggacccgacagaatcgggaggctctataagaaagccctctatttgcaatacactgacgaaaccttccgaacaactatcgagaagcctgtgtggttgggttttctgggacctattatcaaggctgagacaggagataaagtttacgtgcatcttaaaaatcttgcaagtcggccttatacatttcacagtcatggcattacttactacaaggagcatgaaggagcaatctacccagacaacaccaccgatttccagcgggctgacgacaaggtgtatccaggcgaacaatatacttatatgctgctggccactgaggagcagagccctggcgagggagacggtaactgcgtgactaggatttatcacagccatatagatgctcctaaggatatcgccagcgggttgattggccccttgataatctgcaaaaaggactcgctggacaaggagaaggagaagcacattgatcgtgaatttgttgtcatgttcagtgtagttgatgaaaacttttcatggtatttggaggacaacatcaagacctactgctctgaaccagagaaagtggataaggacaacgaggacttccaagagtctaatcgcatgtactctgtgaatggttacactttcggttccctgcccgggttatctatgtgtgcggaggaccgggtgaaatggtacctgtttgggatggggaatgaagtcgacgttcacgcggccttctttcacggtcaggcattaaccaacaaaaactatagaatcgataccataaaccttttccccgctacgctttttgacgcgtacatggtagcccagaatcccggcgaatggatgcttagctgtcagaaccttaatcatctgaaagccggactccaggcttttttccaagtgcaggagtgtaacaagagctcttcaaaagacaacatccggggaaaacacgtgcggcattactatatagccgcagaagaaatcatttggaattatgctccaagcggtatagacatttttaccaaggagaatctgacagccccagggtcagactctgctgtttttttcgagcaggggactaccaggattggcggctcttacaaaaagcttgtgtaccgcgagtataccgatgcaagcttcacaaaccgcaaagaacgagggcctgaggaggagcatctgggtattttgggtcccgtgatctgggccgaagtgggggacacaatcagagtaacctttcataacaagggagcctacccgctgagtatagagccaattggagttcggttcaataagaacaatgagggtacttactactcgcccaattataatccccagtcaaggagtgttcccccatccgcatcacatgttgcacccacggaaacttttacctacgaatggactgtgcctaaagaggtgggcccaaccaatgcagaccccgtctgtttggcaaagatgtattattcagccgtggaccctacgaaggatatctttacagggctgatcggacctatgaaaatatgcaaaaaggggtcccttcatgcaaatgggcggcagaaagacgtggacaaagaattctatctattcccaaccgtttttgatgaaaacgaatccttgctcctagaggacaacattcggatgttcaccacggcgcctgaccaagtggataaggaagacgaagacttccaggagtccaacaagatgcactcaatgaacggttttatgtacggcaatcaaccagggctgacaatgtgtaagggtgattccgtggtctggtacctcttctctgcggggaatgaggcagatgtccacggcatctatttcagcgggaacacttatttatggagaggggagcgcagagacacagccaatctgtttcctcagacttcactgacccttcacatgtggcccgatactgaaggcaccttcaatgtcgagtgtctcactaccgaccactataccggaggcatgaagcaaaaatatacagtaaaccaatgcaggcgacagagcgaagattctacgttctacctgggggagagaacctactatattgctgctgtcgaggtggagtgggattactcccctcagagagagtgggaaaaagagctgcaccatctccaagaacagaatgtaagcaatgccttcttggataaaggggaattctacatcgggtcaaaatataagaaagtggtataccggcagtacaccgattccacgtttcgcgtcccggtggagaggaaagcagaggaggagcacctgggcatcttgggcccccagctacacgctgatgtcggagacaaagtcaaaataatattcaaaaacatggctacgcggccgtattccattcacgcgcacggggttcagacagagtcaagcacggtgacacccacactgcctggagagaccctcacatacgtgtggaaaattcctgagcgaagtggggccggcactgaggatagcgcttgcattccttgggcttactattccacagtggatcaagtgaaggatctgtactccggattaataggcccattgattgtgtgtcgccgcccgtacctaaaggtgtttaatccgagacggaagctggagttcgcattgctgtttctggtattcgacgagaacgagtcctggtatctggacgataacatcaaaacctattccgaccatcctgagaaagtgaacaaggatgacgaagaattcatagaaagcaacaagatgcacgccataaatggacgtatgttcggaaatctgcagggcctgacaatgcacgtgggggacgaggttaattggtatttaatgggtatgggcaatgagatcgatttgcacactgtgcactttcatggccactccttccaatataagcaccggggcgtctatagctccgatgttttcgatatcttccctggcacatatcagacactcgaaatgtttcccaggacaccaggtatctggctgcttcactgccatgtcacagatcacatccacgctggcatggaaactacatatacagtgcttcagaatgaagacactaagtccgga

SEQ ID NO: 1574 - DNA, 3195 bp, Artificial Sequence
  derived and/or modified sequence
atgaaaatcttaattttgggcatctttctatttctttgcagtacaccagcctgggctaaggagaagcattattacatcggtatcattgagactacttgggactacgccagcgatcatggggaaaagaagcttatctctgtagatacggagcactccaatatctacctgcagaacggtccggaccgcataggcagactctataagaaagccctgtacctgcagtacaccgatgagacattcaggacaacgatagaaaaaccagtatggttgggattcctgggtcccataataaaggctgaaaccggcgataaggtgtatgtgcatttgaagaatctagcttcacgcccctatacctttcactcccacggcatcacttactacaaagagcacgagggggctatctatcctgataacactacagacttccagagggcagatgataaggtctaccctggcgaacagtacacctacatgctactagcgactgaagagcagagcccaggcgaaggagacggaaattgtgtcacccgaatctaccattcccatatcgacgcccctaaggacatcgcctctggcctgatcggtcctctgatcatatgtaagaaagactctttggacaaggagaaggagaaacacatagatagggaattcgttgttatgtttagtgtcgtcgacgaaaatttctcctggtacctggaagataatataaaaacatactgttctgagcccgagaaggtggacaaagacaacgaggattttcaagagtcaaatagaatgtactcggtcaatggatacacattcggttccttgcctggactgagcatgtgtgccgaagaccgcgtgaaatggtatttgtttgggatggggaatgaggtagatgtgcacgccgccttctttcacgggcaggcactcactaataaaaattaccgtatcgacacaattaacttgttcccagccactctctttgatgcgtatatggtcgcccagaaccccggagaatggatgctttcttgtcagaatctgaaccaccttaaggcagggctgcaggccttctttcaggttcaggagtgtaataaatcatcaagcaaggataacattaggggtaagcacgtgcggcactactacatcgcagccgaagagattatctggaattatgcaccgagcggcatcgacatattcactaaggaaaatttgacagctcctggctccgacagcgctgtatttttcgagcaaggcacaacacggatcggcggttcatataagaagctggtgtatagggagtacacagacgcgtctttcacaaatcgcaaggagaggggacctgaggaagaacatctgggaatactgggacccgtgatatgggctgaggtcggggacaccattagagtaactttccacaacaagggggcctacccactgtcaatcgagcctatcggcgtccgctttaacaaaaacaatgagggcacatattacagccccaactacaatccccaatcacgcagcgtcccccctagcgcgagtcacgtggccccgacagaaacctttacttacgagtggacggtgcctaaagaggtcggacccaccaatgcagaccccgtctgtctggccaaaatgtattacagcgcagtggatccaacaaaagacatctttacaggtctcatagggcccatgaagatttgtaaaaagggatccctacatgccaatgggagacagaaagatgttgacaaggaattctatctgttcccaaccgtcttcgacgagaacgagagccttctgctcgaagacaatatcaggatgtttacaaccgccccagaccaggtggataaggaggatgaggatttccaggagtcaaacaaaatgcattcgatgaatgggttcatgtacgggaatcaacccggactgacaatgtgtaaaggggatagcgttgtatggtaccttttctctgcaggaaacgaggctgacgtccatggaatctacttctcagggaacacttatctgtggcggggcgagcgccgcgacaccgctaacctgttcccgcagacatccttgactttgcacatgtggccggacaccgagggtacatttaatgtcgagtgcctgactaccgaccactatacagggggaatgaaacaaaagtacacagtgaaccagtgtcgcaggcaatctgaagattccaccttctatcttggtgagcgcacatactatattgccgccgtagaagtggagtgggactattcccctcaacgtgaatgggagaaggagcttcaccatctgcaggaacagaatgtctcaaatgccttcctagacaaaggggaattctatatcggcagcaaatacaagaaggtggtgtaccgccagtacactgattctaccttccgcgttccagttgaacggaaagcagaagaggagcacctaggtatactaggaccccagctccacgccgacgtgggtgataaggtaaaaataatattcaaaaatatggcaacccggccatactcaattcacgcccacggagtccaaaccgaaagctctaccgtgacccccaccctccctggggagactctaacatacgtctggaagatcccggagaggagcggggcaggaacagaggactccgcatgtataccatgggcttattacagtaccgtagatcaagtaaaggacttatattcagggctcatcggccctctcattgtgtgtcgtcgcccatatctgaaggtgtttaacccaaggcgcaaattggagttcgctctgctatttctggtcttcgacgagaacgagtcctggtacttggacgacaacatcaagacctatagtgaccacccagaaaaggtgaataaggacgacgaagaattcatcgaatccaacaaaatgcacgcgattaatggtagaatgttcggtaatttgcaggggctaactatgcacgtaggggacgaagtcaactggtaccttatgggtatgggaaatgagatcgatttgcatacagtgcatttccacggtcattcctttcaatataaacaccgtggcgtctactcttctgacgtcttcgacattttccccgggacatatcagactctcgagatgttccccagaacccccggcatttggctgctccactgccacgttacagaccacatccatgccggaatggaaactacctacactgtccttcagaacgaagatactaagagtggc

SEQ ID NO: 1575 - DNA, 3195 bp, Artificial Sequence
  derived and/or modified sequence
atgaaaattctcatactgggaatttttctattcctatgtagcacaccagcttgggccaaggaaaaacattattacatcgggattatcgaaactacttgggactacgccagcgaccacggggagaaaaaactgattagcgtagataccgagcactcaaacatttacctgcagaacggaccggaccggatcggccgcctgtataaaaaagctctctacctgcaatacacagacgaaacctttagaacaacaatcgaaaagcctgtgtggctcgggttcttaggcccaatcatcaaggcagagactggcgataaggtctatgtccatctgaaaaaccttgcgtccagaccatataccttccattcacatggaatcacttactataaggaacacgagggagctatctatccggataacaccaccgattttcagcgggcagacgacaaagtgtatcccggagaacagtacacatacatgctactggccaccgaggaacagagtcctggtgagggggacggcaactgtgtcactcgcatttaccattcccacattgacgctcctaaagacatcgcaagcggtctgatcggtccactcatcatctgcaagaaagatagtctggacaaggagaaggagaagcacatcgacagggagttcgtggtgatgtttagcgtggtggatgaaaatttctcttggtacctggaagacaacattaagacatactgtagtgagcccgagaaagtagataaagacaacgaggatttccaggagtctaatcgaatgtactccgtcaatgggtatactttcggctctctgccaggattgagcatgtgcgctgaggaccgcgtgaagtggtatctgttcggaatggggaatgaggttgatgtccacgctgccttctttcatggtcaggcgctgacgaataagaattaccggattgacactattaatctgtttccagcgacactcttcgatgcgtacatggtagcccagaatcccggcgagtggatgttatcttgtcaaaacttgaatcacttgaaggccggcttgcaggctttctttcaagtgcaagagtgtaacaagtcgagtagtaaggacaacatcaggggcaagcatgtgcgtcattattacatcgccgccgaggagattatatggaattacgcccctagcggcattgacatttttacaaaagaaaacctaacagctccaggcagcgattctgccgtgttttttgaacagggcaccacgcggataggggggagctacaaaaagctagtgtacagagagtacaccgatgcatctttcactaaccggaaagagcgtggccctgaggaagagcatcttggcatcctggggccagtgatttgggctgaagtgggggatacgatcagggtgacatttcataataagggcgcctacccactgtctatcgagcccattggagtccggtttaacaagaataatgagggaacttactacagtccaaattacaaccctcagtcaagaagtgtgccccctagcgcaagtcatgtggcacctacagaaacatttacctacgagtggactgtgccaaaggaggtcggcccgaccaacgccgatccagtgtgtctcgcgaaaatgtactacagtgctgtggatcctacaaaagacatcttcacggggctaattggccccatgaagatctgtaaaaaaggttccctgcacgctaacggccggcagaaagatgttgataaggagttctacctgttccctacggttttcgatgaaaacgagagcctgcttctcgaagacaatattcgtatgttcacaactgctcctgatcaggtggataaggaggacgaggattttcaggaatccaacaaaatgcactccatgaacgggtttatgtacggcaatcagccggggctgacaatgtgtaagggcgacagtgtcgtgtggtacctgttctctgctggtaatgaggctgatgtgcacggcatttacttttccggcaatacttacctgtggcgaggagagcggcgcgacacagctaacctgttccctcagaccagcttaacactacatatgtggcccgatacagagggcacttttaacgtggaatgtctgacgacggatcactacacgggcggcatgaagcagaagtatacagtgaaccaatgccgaaggcagagcgaagactcaactttttacctgggcgagcgtacgtattacatcgctgctgtagaggtggaatgggactactccccccagagagagtgggagaaggagctccatcatcttcaggagcagaacgtttcaaacgcttttctggataaaggagaattttatatagggtcaaagtacaaaaaagtcgtctaccggcagtacacagatagcacattccgggtgcccgtcgagcgaaaggctgaagaggagcacttagggatcctaggcccacagctgcacgccgatgttggagacaaggtcaaaatcatcttcaagaacatggctacccggccatacagtattcacgcacatggagtccagaccgagagtagcacagtgacccctaccctcccaggcgaaactttgacatacgtgtggaagatccccgaaaggtccggggcgggcaccgaggattcagcgtgtatcccctgggcctactactctactgtcgaccaggtcaaagacctctattctggacttattggccccttaatcgtttgtagacgcccctacctaaaggttttcaaccctcgcaggaagctcgagttcgccttgctattcttggtgttcgacgagaacgaatcttggtacctcgatgacaatatcaaaacttattctgatcaccccgagaaggtgaataaggacgacgaagaattcattgagtctaataaaatgcacgccatcaatgggcggatgttcgggaaccttcaaggcctgacaatgcatgtcggagatgaggtaaattggtaccttatgggaatgggtaatgaaatcgacctgcacacagtacatttccacgggcactcatttcagtacaagcatcggggggtgtactcaagcgacgttttcgacattttcccagggacataccaaactcttgaaatgttcccgcgcaccccagggatctggctgctgcattgccacgtgaccgatcacatccatgctggtatggaaacgacatatacagtgttacagaacgaggatactaagagcggg

SEQ ID NO: 1576 - DNA, 3195 bp, Artificial Sequence
  derived and/or modified sequence
atgaaaatccttatcttgggaatcttcctcttcctctgcagcacccccgcatgggcaaaggagaagcactattacatcggaattatcgaaaccacctgggactacgcgtccgatcatggcgaaaagaagctcatttccgtcgatactgagcactcgaatatctacctgcagaacggcccggatcgcatcggacggctgtataagaaagctctgtacctccagtacactgatgaaacctttcggaccactattgaaaagccggtgtggctgggattcctgggaccgatcatcaaggcggaaaccggcgataaggtctacgtgcacctcaaaaacctggcgtcccgcccgtacactttccactcacacggtatcacctactataaggaacatgagggagcaatctacccggacaacaccactgatttccagcgggctgatgacaaggtgtaccctggtgagcagtacacttacatgttgctggcgactgaagaacagtcgccaggagaaggcgacggcaattgcgtgacccggatttaccactcgcatatcgatgctcctaaagacatcgcatccggcctgatcggccccctgattatctgcaaaaaggattcactggacaaggaaaaagagaaacatattgacagagaattcgtcgtgatgttttccgtagtggacgaaaacttttcgtggtacctggaggacaatatcaagacttattgctcagaacctgagaaggttgacaaagacaatgaagatttccaggagagcaaccgcatgtactctgttaatggttataccttcggcagcctcccaggtttgtcgatgtgcgccgaagatcgcgtgaagtggtacctcttcggcatgggcaacgaagtggatgtccacgccgccttctttcacggacaagcgctcacgaataagaattaccgcatcgacaccatcaatctcttcccagccactctgttcgatgcatacatggtggcccaaaatcctggagaatggatgttgtcctgccagaacctgaaccacttgaaggccggtctgcaagccttttttcaagtgcaagagtgcaacaaatcaagcagcaaggacaacatcagagggaaacatgtcagacactactacatcgccgcagaggagatcatctggaactacgccccgtcaggtatcgacatctttaccaaggagaaccttactgcgccgggatcggactccgctgtgttctttgagcagggaaccactaggatcggcggaagctacaagaagctggtctaccgggaatatactgacgcgagctttaccaatcggaaggaacggggaccggaggaggagcatctgggaattctgggaccggtcatttgggcagaagtgggcgacactattagagtgacctttcacaacaagggcgcctaccctctgtcgatcgagccgatcggcgtcaggttcaacaagaataacgaaggaacctactactccccgaactacaatccgcagagccggtccgtgcctccgtcagcctcgcatgtggccccgaccgaaacgtttacttacgaatggaccgtcccaaaggaggtcggaccaaccaacgccgacccggtgtgcctggcgaagatgtactactcagcggtggatcctaccaaggatatcttcactggattgattggcccaatgaagatctgcaagaaaggttccctccatgccaacggacgccagaaggacgtcgacaaggaattctacctctttccgactgtgttcgacgaaaacgaatccctgctgctggaggataacatccgcatgttcactaccgcgccagatcaggtggataaggaggacgaggacttccaggaaagcaacaagatgcactcaatgaatggcttcatgtacggaaatcaacctggcctgaccatgtgcaaaggcgactccgtggtgtggtacctgttcagcgctggcaatgaggccgatgtgcacggtatttacttctcaggtaacacctacttgtggcgcggcgagcgccgcgatactgccaatctgttcccacagacctcgctgactctccatatgtggccggataccgagggaactttcaatgtggaatgcctgactactgaccattacactgggggcatgaaacagaagtacacggtgaaccagtgtagacgccagtccgaagatagcacgttttacctgggagaacgaacctattacatcgctgccgtggaagtggagtgggactactcccctcaacgggagtgggaaaaggaactccatcacctgcaagagcagaacgtcagcaacgcattcctcgacaaaggcgagttttacattggatccaagtacaaaaaggtggtgtaccgccaatacaccgactccacttttcgcgttcctgtggagaggaaggcggaggaggaacacctgggaatcctgggaccacaattgcacgctgacgtcggagataaggtgaagataatcttcaagaacatggcgactcggccgtactcgatccacgcccacggcgtccagactgagagcagcaccgttactccgactctccctggagagactctcacttacgtgtggaagatcccggaacgcagcggagccggaaccgaagatagcgcgtgcatcccatgggcttactactcaaccgtggatcaggtcaaggacctgtactccggactcatcggaccgctgatcgtgtgccgcaggccttacttgaaagtgttcaacccaagacggaagctggaattcgcgttgctgttcctggtgtttgacgaaaacgagagctggtacctcgatgataacatcaaaacctacagcgaccatccagagaaagttaacaaggacgacgaggaattcatcgagtcaaacaagatgcatgccatcaacgggcgcatgttcggcaatctgcaaggactgaccatgcatgtgggagatgaagtcaattggtacctgatgggaatgggcaatgagatcgacctccacaccgtgcattttcacgggcacagctttcaatacaaacatcggggagtctactcatcggacgtgttcgacattttccctggaacctaccagactttggagatgttcccgagaacgcccggtatctggctccttcattgtcatgtcactgaccatatccatgctggcatggagactacttacactgtgctgcagaacgaggacaccaagtcaggg

SEQ ID NO: 1577 - DNA, 3195 bp, Artificial Sequence
  derived and/or modified sequence
atgaagatattaatcctcggtatttttctcttcctgtgttctacccctgcatgggcaaaggagaagcattactatataggcatcatcgaaaccacttgggattatgccagcgaccacggggagaagaaactgataagtgtggatacagagcactctaatatctatctgcagaatggacccgatcggatagggcgcctgtacaaaaaagccctgtacctgcagtataccgatgagacctttcggaccacaattgaaaagccagtctggctgggattcctaggccccataatcaaggccgaaacaggcgataaggtttacgtgcaccttaagaacttggcctcacggccctacacattccacagtcatggcattacctactataaggagcatgaaggcgccatatacccggataacacgacagactttcagagagcagacgacaaagtctaccccggggagcagtacacgtacatgctcctggctacagaagagcagtctccaggagagggcgacggaaactgcgtgacccgcatctatcactcacatatcgacgctccaaaggatattgcttcaggactcataggccccttgattatatgtaagaaagattcccttgataaggaaaaggagaaacacatcgatcgtgaattcgtcgtcatgtttagtgttgtcgatgagaacttttcctggtatctagaagataatatcaagacatactgctctgagcctgagaaagtggataaggataatgaagatttccaggagagcaataggatgtatagcgttaacggatatacgtttgggagcctccccggcctgtctatgtgcgcagaagatagggtcaaatggtacctgttcggaatgggaaacgaggtggacgtccacgcagcattttttcatgggcaagccctgactaacaagaattatcggatagacaccatcaacctttttccggcaaccctcttcgacgcgtacatggtcgctcaaaaccctggggaatggatgctgtcatgccaaaacctcaaccacctaaaagcagggctgcaagctttttttcaggtccaagagtgtaacaagagttcgtctaaggacaacatcagaggcaagcatgtgcgccattactacatcgccgccgaagagattatttggaactacgccccttcagggatcgatatttttactaaagagaatctcactgctcccgggtccgatagtgcagtgttcttcgaacagggcaccactagaatcggcgggagctataagaagctggtgtaccgggagtacactgacgccagtttcacaaaccgcaaagaacgtggacctgaagaagaacatcttggcattctgggacctgtaatctgggccgaggtcggcgacacaatcagggtgacatttcacaataagggtgcctacccactttccatcgaaccaataggggtccgttttaataagaataacgagggaacatactattccccaaattacaatccgcagagtaggagcgtacccccaagcgccagccacgtggcgcccacggagacattcacttacgagtggactgtgccaaaggaggtcggaccaacgaatgctgacccggtatgtctagcgaagatgtactattcagccgtagaccctactaaggatatctttactggactgataggaccaatgaaaatctgtaagaaaggctccttgcatgccaatgggagacagaaagatgtggacaaagagttctacttgtttcctacagtgtttgatgaaaatgagtcccttctcctggaggacaatatccgaatgtttacgacggctccagatcaggtggataaagaggacgaagactttcaggagagcaacaaaatgcattctatgaatgggttcatgtatgggaaccaacccgggctcactatgtgcaagggcgactcagtcgtgtggtatcttttctctgctggcaacgaggcagatgtgcacggtatttacttctcaggtaatacttacctatggcgtggagaaaggcgggataccgccaacctgttcccacagacatccctgactctgcacatgtggccagacacagagggaacattcaatgtggagtgtcttactaccgaccattacacggggggaatgaagcagaagtacaccgtcaatcagtgtagaaggcaatccgaagactcaacattctacctcggggaacgcacatactatattgcagcggtggaggttgagtgggactattcaccacagcgggagtgggagaaggagctgcatcacctgcaggagcagaacgtgtcaaatgcctttttagacaagggagagttctatatagggtcaaagtacaagaaagtcgtctatagacagtataccgatagtacctttcgcgtgcccgtcgaacgaaaagcagaggaggagcacctcggaatcctgggcccacaattgcacgccgacgtcggagacaaggtgaagataatcttcaagaacatggccacaaggccatatagcatccatgcccacggagtgcagactgagtctagcaccgttacacctacactccccggagagaccctcacctacgtgtggaaaattccagagcggagtggtgcagggacggaagactccgcctgcatcccatgggcgtactacagcaccgtggaccaggttaaggacctgtatagtggcctcattggaccactgattgtgtgcaggaggccctacttgaaggtgtttaacccaaggaggaaactcgagtttgccctgttgtttttagtttttgatgaaaacgagtcatggtatctcgacgataatataaaaacatacagcgaccacccagagaaggtaaacaaggacgacgaagagttcatagagtctaacaaaatgcatgccattaatgggcgcatgttcgggaacttgcaaggactgaccatgcatgtcggagacgaggtgaactggtatctgatgggaatggggaacgagatagacctgcacaccgttcacttccatgggcactcctttcagtataagcaccgcggcgtttacagcagtgacgtgttcgacatctttcccggtacctatcagaccctggaaatgttccctcggactcctggtatctggttactacactgccatgtgactgatcacatccatgcaggcatggagactacatacacggtgttgcagaacgaagacaccaagagcgga

SEQ ID NO: 1578 - DNA, 3195 bp, Artificial Sequence
  derived and/or modified sequence
atgaagatcctcattcttggcattttcttgtttttgtgtagtacgccggcatgggcgaaggaaaaacactactatattggcatcattgagactacatgggattacgcctctgatcatggcgaaaagaaacttatctctgttgacacggagcattctaatatctaccttcagaatgggcccgaccgtatcggaagactttataaaaaagctttatatttgcagtatactgatgagacatttaggacaacaatcgagaagccagtctggcttggctttttgggacccatcataaaagctgagaccggtgacaaggtctatgtgcacctaaaaaacttggcatcgcgaccctatacgttccactcccacggcatcacatactacaaggagcatgaaggagctatttatccagataacactacagattttcagcgggcagatgacaaggtataccccggcgaacaatacacgtacatgttgcttgcgaccgaagaacagtcccccggagaaggggatggcaattgtgtgacacgtatttatcacagtcatatagatgcccctaaagatatcgcaagcggtcttattggacccctcatcatttgcaagaaggattccctagacaaggagaaggagaaacatatcgatagagagttcgtcgttatgttttccgtggttgatgaaaatttctcttggtatctcgaagataatatcaaaacctactgcagtgaacccgaaaaagtggacaaggataacgaagatttccaagaatcaaaccgtatgtattccgtcaacggctatacttttggttctcttccaggcctatcaatgtgcgcggaagaccgtgttaaatggtacctttttggaatggggaatgaagttgacgttcacgccgcattcttccatggtcaagcgctgacaaacaagaattatcggatcgatacaattaacctattccctgctacactcttcgatgcttacatggtcgcacagaatccgggggagtggatgctctcctgtcagaatttaaaccacctgaaggcaggcctccaagcttttttccaagtacaggaatgtaataaaagcagctccaaggataacatccgtggtaagcacgttcggcattactacattgcggcagaagaaatcatttggaactacgcgccatctggcattgatatcttcactaaagagaatctaactgctccgggttccgatagtgcagttttcttcgagcaaggaaccacacgaattggaggctcttataaaaagctcgtgtatcgagagtatactgacgcttcgtttacgaatcggaaggagcgcggccctgaagaagagcatctaggtatactaggcccagtgatctgggccgaggtaggggacaccatccgcgtgacctttcataataaaggcgcttaccccttatcgattgagcctatcggtgtgcgcttcaacaagaacaacgagggaacgtactatagccctaactataatcctcaatcgcggtccgtccccccgtcggcatcgcatgttgcaccaaccgaaaccttcacgtacgaatggaccgtccccaaagaggtcggcccaacaaatgcagatccagtttgtttggccaagatgtactacagcgccgtggatccaaccaaggatatattcacgggactcataggacctatgaaaatatgtaagaaaggatcgctccacgcaaacggacgccaaaaagatgtggacaaggagttttatttgtttccaaccgtcttcgatgaaaacgagagcttgttgctggaggataacattcgtatgtttaccaccgcaccggaccaagtagataaggaggatgaagacttccaagagtccaacaagatgcatagcatgaacggtttcatgtatggaaatcaaccaggcttgactatgtgcaaaggtgactcggtggtctggtatctctttagtgccggtaatgaagctgatgtccatgggatatacttttctggcaacacatacttgtggcgcggagagagacgcgacaccgccaacctgttcccccagacatctctgacccttcatatgtggcccgacaccgaaggcaccttcaatgtggagtgccttaccactgaccactacacaggcgggatgaaacagaagtataccgtaaatcaatgtagaaggcaatcagaggattccacgttctatctcggagagcggacctattatatcgcggcagtcgaggtagaatgggattattcacctcaacgtgagtgggagaaggaattacaccatttacaggaacagaacgtttctaatgcattcctagataagggtgagttctatattggttcgaagtacaagaaggtggtctataggcagtacacagactccaccttccgggttcctgtggaacgtaaggctgaggaggagcatctcggtatcttgggcccacaacttcacgccgacgtcggagacaaggtgaagatcatcttcaaaaacatggccactcgtccgtacagcattcacgctcatggagtccagacggagagctccaccgtaactcctacactcccgggggaaacactgacgtacgtctggaagatcccggaaaggtcgggtgcagggactgaagattctgcttgcataccatgggcatattattccactgtggaccaagttaaggatttatacagcggtctcatagggccgttaatcgtgtgtcgtaggccatatcttaaggttttcaatcctcgtcggaaacttgagtttgcgctgttgttccttgtttttgacgagaatgagtcgtggtacttggatgataacattaagacgtacagcgatcaccccgaaaaggttaacaaggatgacgaggagtttattgagtccaataagatgcatgcgataaacggtaggatgttcgggaacctacagggtttgactatgcacgtgggcgatgaggtcaattggtatcttatgggcatggggaacgaaattgaccttcatacggtgcacttccacggacattcctttcaatacaagcataggggtgtgtattcaagcgatgtgttcgacatttttcccggaacatatcagaccctcgagatgtttccacgcacgccaggcatttggttgcttcattgccatgtcaccgaccatattcacgcaggaatggagaccacgtatactgtcttacaaaatgaggatactaagtctggc

SEQ ID NO: 1579 - DNA, 3195 bp, Artificial Sequence
  derived and/or modified sequence
atgaaaatcctgatcctgggaatctttctgttcctatgttccactccagcttgggccaaagagaaacactattacattggtattatcgagacgacatgggactatgcatctgatcacggagaaaaaaaactcataagcgtggatacagaacacagtaacatctaccttcaaaacggtcctgaccggattggccgcctctataagaaagccctctacctccagtacaccgacgaaacattcagaaccactatagagaaacctgtttggcttggtttcctgggaccaattattaaggcggagaccggggataaggtgtacgttcacttgaaaaatttggcctcccgtccatatacatttcactcccacggtataacatattacaaagagcatgaaggcgctatctatccagacaacacaaccgattttcagcgcgccgacgataaagtatatcctggagaacagtacacttatatgttgctcgccacagaagaacagagtccaggcgagggagatggaaactgtgtcaccagaatttaccattctcatatcgatgctcccaaagatatcgcaagcggactgatcggaccattaatcatttgcaaaaaagatagcctggacaaagagaaggagaagcatatcgatagggaattcgtagttatgttttctgttgtcgatgaaaacttttcctggtacctggaagataacattaaaacgtattgcagtgaaccagagaaggtagacaaagacaacgaggatttccaggaaagcaaccggatgtactctgtaaacggatacacttttggatccctgccggggctgtctatgtgtgcggaggaccgagtcaaatggtacctcttcggcatgggaaatgaggtggacgtgcacgcagcttttttccacggccaggcgcttaccaataagaactacagaatcgatacaatcaacttgttccccgccaccctctttgatgcttacatggtcgctcagaaccccggcgagtggatgctctcatgtcaaaatctgaaccatttaaaggctgggcttcaggcattcttccaagttcaagaatgcaataagtcatcttctaaggataacataagaggaaagcatgtgcgccattactacatcgctgctgaggaaatcatctggaattacgcaccgagcggtattgatatctttaccaaagagaacctgaccgcccccggatcagacagcgccgtcttctttgagcaaggcacaacccgcatcggcggcagctataagaaactggtctaccgcgaatatacagacgcgtctttcaccaaccggaaagagcgcggacccgaggaggaacatctaggtatacttggccccgtgatctgggccgaggtgggagataccatccgtgtgacctttcataacaagggtgcttaccccctcagcatcgaacctattggtgtgcgcttcaacaaaaataacgaaggtacatactattctcctaattataatccacagtcccgctctgttcctccctccgcctctcacgttgctcctactgagacattcacctatgaatggaccgtacctaaggaagtgggacctacaaacgcagacccagtgtgcctggctaaaatgtactactcagcagtagaccctacaaaagatatttttaccggcctcatcggcccgatgaagatatgcaagaagggaagcctccatgctaacggccggcagaaggatgtcgacaaagagttctatctgtttccaaccgtctttgatgagaacgagtctctgctcctggaggataacatacggatgttcacgaccgctcctgatcaggtcgataaggaggacgaggactttcaggaaagtaataaaatgcacagcatgaacggctttatgtacggcaaccagcccggactgactatgtgtaaaggagactcagtcgtatggtacctgtttagcgcaggcaatgaagcagatgtgcacggaatctactttagcggcaatacttatctttggaggggcgaacggagggacacggctaatctttttccccagacttcactcactctgcacatgtggccagatactgaaggaactttcaacgtggaatgccttaccactgatcattatacaggcggaatgaaacagaagtacaccgtgaaccaatgcagaaggcagagcgaagatagcaccttttatctgggggagagaacctactacattgccgccgtggaagtcgagtgggactattcacctcagcgcgagtgggaaaaggaactgcatcatctacaggaacagaatgtgagcaatgcattcttggataaaggcgaattctacatcggatcaaaatacaagaaagttgtctatcggcaatacacagatagtaccttccgagtgccagtggagagaaaggcggaggaagaacacttggggatcttagggccccaactgcacgcagacgttggcgacaaggtcaaaatcatttttaagaacatggccactaggccttactcgattcacgcacatggcgttcagactgagagctctacagttacacctacccttccaggcgaaaccctcacctatgtgtggaagatccccgaaagaagtggtgcaggaactgaggatagcgcttgcatcccatgggcatattactctaccgtcgaccaagttaaagacctgtatagcgggttgatcggacctcttattgtctgtagaaggccatatctgaaagtcttcaatccaaggcgaaaactggaatttgcccttctcttcctggtgttcgatgaaaacgagagctggtacctcgacgacaacatcaaaacctatagcgaccatcccgaaaaagtgaacaaagacgacgaggagtttatcgagtctaacaagatgcatgcgattaacggaaggatgtttggaaacctccaagggctgaccatgcacgtgggcgacgaggtgaattggtacctgatgggaatgggtaatgagatcgacctgcacactgtgcattttcacggccacagcttccagtacaaacacaggggagtgtactcctctgatgttttcgacatctttcctggtacttaccagaccttagaaatgttccctcgcacccccgggatttggctcctgcactgtcatgtgaccgatcacatccatgcaggcatggagaccacctataccgtcctgcaaaacgaggataccaagtctggt

SEQ ID NO: 1580 - DNA, 3195 bp, Artificial Sequence
  derived and/or modified sequence
atgaaaatactgatcctcggaattttcctgttcctatgctccacccccgcctgggcaaaggaaaaacattattacatcgggatcatcgagactacatgggattacgcctcagaccacggggaaaaaaagctgatttccgtcgacactgagcactcaaacatatatctgcaaaacggaccagatagaataggccgcctgtacaaaaaggccttatatttacaatatacggacgaaacattcaggaccacaatcgagaagccggtgtggctaggattcctgggtcccatcattaaagcggaaaccggggacaaagtgtatgtgcaccttaagaatctggcctcacggccctacactttccattcccacggcattacctactataaggagcacgagggggccatttaccccgacaataccactgacttccagcgcgccgacgataaggtttatcccggagagcaatatacatatatgcttttggctacagaggaacagtcccctggcgagggcgacggtaactgcgtgacgcgcatttaccactcccacattgacgcacctaaagacatcgcgtcagggctgatcggccctctcattatttgcaagaaggacagcttagacaaggaaaaagagaaacatatcgacagggagtttgtagtgatgtttagtgtggttgacgagaatttttcttggtacctcgaggataatatcaaaacatactgctctgaaccagagaaagtggataaagataatgaagacttccaggaaagtaaccgcatgtacagtgtgaacggttacacgttcggttctctgcctggactgagcatgtgcgccgaggaccgggtcaagtggtatttattcggcatgggcaacgaagtggacgtgcacgccgctttcttccatggacaggcactgacaaataaaaactatcgtatcgacacaatcaatctcttcccagctacactgttcgatgcatatatggtagctcaaaatcccggcgagtggatgctatcatgccaaaatctgaaccacttgaaagccggactgcaagcgttttttcaagttcaagaatgcaataagtcaagctcgaaagataatattcggggaaagcacgtccgccactactacatcgccgctgaggaaataatatggaattacgcccctagcgggattgatatttttactaaagagaacctgaccgctcctggctctgatagtgctgtgttcttcgagcagggaactacacgcatcgggggaagttacaagaaactggtttacagggaatatacggacgccagcttcactaaccgaaaagagaggggcccagaggaggagcatctcggtatcctagggcccgtgatatgggccgaggtcggagacacgatacgcgtgaccttccacaacaagggggcgtatcctcttagcatcgaacccattggggttcggtttaataagaacaatgaaggcacttactactcaccgaactataatcctcagagtcggtccgtgcctccatcggccagtcatgtcgcccctactgaaacattcacttacgaatggacagtgcccaaggaggttggacctaccaatgcggatcctgtgtgcttggcaaagatgtactactccgcagtagatcctacgaaggacattttcaccggcctcattggccctatgaagatctgcaaaaaaggcagtcttcacgctaatggtcgacagaaggatgtagacaaggagttttaccttttccccacggtgtttgacgaaaacgagtcccttctgttggaggataacatcaggatgttcacgaccgcacctgatcaagtcgacaaagaggatgaagattttcaagaaagtaataaaatgcactccatgaacggtttcatgtatggcaaccaacctggcctgaccatgtgtaaaggcgatagtgtggtgtggtatctgttttccgctggcaacgaggctgacgtgcacggcatctatttcagtggaaatacatatttgtggaggggcgagcgccgcgacacagcgaacttgttcccccagacgtctctgaccttacacatgtggcctgataccgagggcacttttaatgtggagtgtctcacaaccgatcattacaccggcggtatgaaacagaaatacaccgttaatcagtgcagacgtcagtctgaagacagcaccttttacctcggcgagaggacgtactatattgccgctgtggaggtcgagtgggattattcaccccaaagagaatgggaaaaagaactgcaccacctgcaagaacagaacgtgagtaacgcgtttctggacaaaggtgagttctacatcggctctaagtacaaaaaagtggtatatcgccaatacaccgactcgacttttagggtccccgttgaaaggaaggctgaagaggagcatctaggcatccttggaccacaactacacgcggacgtcggggacaaagtgaagataatatttaaaaacatggccactaggccgtattcaatccatgcccacggggtccagaccgagagctccacagtgacccccaccttgccaggagagacactcacgtacgtatggaagattcccgagcggtccggggccggtacggaggactctgcttgcatcccttgggcatattattccaccgttgaccaggtgaaggatttatacagcggactgatcggcccactaatcgtctgcaggcgcccctatctgaaggttttcaaccctcggaggaagctggagtttgcactgttgtttctggtgtttgatgaaaacgaatcctggtatctcgatgataacatcaagacttattctgaccatccagagaaggtgaacaaagatgatgaggaattcatagaatctaataagatgcatgccatcaacggtcgcatgtttggcaatcttcagggcttgactatgcatgttggcgatgaggtcaattggtacctcatggggatgggcaatgagatagacctccataccgttcacttccacggacacagcttccaatataagcataggggcgtgtactcatcggacgtgttcgatatctttcctggcacataccaaacgcttgaaatgttccctcgtactccaggcatttggctgctgcattgtcacgttacggaccacatacatgctggcatggagaccacttacacagttttgcagaatgaagataccaagtccgga

SEQ ID NO: 1581 - DNA, 3195 bp, Artificial Sequence
  derived and/or modified sequence
atgaagatccttattctggggattttcttgttcctttgcagcacccccgcgtgggccaaagagaagcattactacattgggattattgagacgacttgggattacgcatctgatcatggggagaagaaactcatatccgtggacaccgagcactcgaacatctatctccaaaatgggcctgaccggattggtagattgtacaagaaggccttgtacctgcagtatactgatgagactttcaggactactatcgagaagcctgtgtggcttggttttctgggccccataatcaaagccgaaaccggcgacaaggtttacgtgcatctgaagaatcttgccagccgcccttacactttccattcgcatggtattacctactacaaggagcatgagggagcaatttacccagataataccaccgattttcaacgagccgatgataaagtgtaccccggagagcaatacacttacatgcttctggcaaccgaggaacagtcccctggtgaaggagatggcaattgcgtgactagaatttaccactcgcatatcgatgcaccaaaggacattgcatccggtctgatcggccccctgatcatctgcaagaaagattccctggataaggaaaaggagaaacatattgatagggagttcgtggtgatgttttcggtggtggatgagaatttctcctggtacctcgaagataacattaagacctactgttcagagccagaaaaggtggataaagacaacgaagatttccaagagtccaacagaatgtattcggtgaacggatatacttttggatcacttcccggactctcgatgtgcgcagaagatagggtcaagtggtacctttttggaatgggtaacgaagtggacgtccatgctgcattctttcatggccaggcactgaccaacaagaactacagaatcgatactattaacctgttcccagccaccctgttcgatgcgtacatggtggcacaaaaccctggtgagtggatgctgtcatgtcaaaacctgaaccatttgaaggcaggattgcaggcatttttccaagtgcaagaatgtaataagtccagcagcaaggataacattcggggtaagcacgtcagacactactacattgccgcagaggaaatcatatggaactacgcaccatcaggaatcgacattttcaccaaggaaaacctgacggcaccggggagcgattcagccgtattctttgaacagggtaccacccgtatcggagggtcatacaagaagttggtgtatcgagaatacactgatgcgtcatttactaaccgaaaggaaagaggtcccgaggaagagcatctgggaatcctgggccctgtgatttgggcagaggtcggagacaccatccgtgtgactttccacaacaagggtgcataccccctttcaatcgaacctatcggggtgagatttaacaagaacaacgagggtacctactactcgcccaactataatcctcagagcaggtccgtgcctccttctgcaagccacgtcgcacctaccgaaaccttcacttacgaatggactgtgcccaaggaggtgggccctactaatgcagacccggtgtgtctcgctaagatgtattacagcgcagtcgaccccaccaaggacatctttaccggtttgatcgggcctatgaagatttgtaaaaagggctcgcttcatgccaacggacgtcaaaaggacgtcgataaagagttttaccttttcccaaccgtgttcgacgaaaacgaatcacttctcctcgaggacaacatacggatgtttaccaccgcgccagaccaagtggacaaggaggatgaggactttcaagaaagtaacaagatgcattcgatgaacggttttatgtacggtaatcaaccaggtctgaccatgtgtaaaggggactcggtcgtctggtacctgttctccgcaggtaacgaagcagatgtgcacggaatatacttttcgggtaatacttacctctggcgaggagaacgtcgcgacactgcaaacctttttccacaaacgtcgctgaccctgcatatgtggccagatactgaaggaacttttaacgtggagtgtttgacgacggatcactacaccggcggtatgaagcagaagtacaccgttaatcagtgtcgtagacagtcagaagattccacgttttacctgggggaaaggacttactatatagcagcagtggaagtcgagtgggattactccccacagcgggagtgggagaaggaactccatcatctccaagaacaaaacgtctcgaacgcattcctggacaagggggaattctacatagggtcaaagtacaagaaagtggtgtacaggcagtacacggattcgacttttcgcgtgcctgtggaaagaaaagccgaagaagaacacttgggtattctgggacctcagctccatgctgatgtgggagacaaggtcaagatcattttcaagaacatggcaacccggccctactcgatccatgcccatggcgtgcagactgagtcatcaactgtgactccaactctccctggtgaaactctgacctacgtctggaagattccagaacggtccggagccggaaccgaagattcagcttgtattccttgggcgtactactccacggtcgaccaggtgaaggatctttactcaggtctgatcggaccactgatcgtctgtaggcgtccctacctcaaggtgtttaatcctaggagaaaactggaatttgcactgctctttctggtgtttgacgagaatgagtcgtggtaccttgatgataacatcaaaacctactcggatcatcctgaaaaggtcaacaaagacgatgaggagtttattgagtccaataagatgcatgctattaacggacgaatgtttggtaatcttcagggtctgacgatgcatgtgggggacgaagtgaactggtacctgatgggaatgggaaacgaaattgatcttcatactgtccacttccatggccattcctttcagtacaaacaccggggcgtctattcaagtgatgtgtttgatatcttccctgggacttaccagacgctggaaatgtttcctagaacccctgggatctggctgctgcattgccacgtgaccgatcatattcacgccggtatggaaaccacctacaccgtcctccaaaacgaggatactaaatcgggt

SEQ ID NO: 1582 - DNA, 3195 bp, Artificial Sequence
  derived and/or modified sequence
atgaagatcttaatactgggcattttcctttttttatgttccactcccgcttgggctaaagagaagcattactacatcggaataatagaaactacttgggactacgctagcgaccacggcgaaaaaaagctgatatctgtcgataccgagcacagcaacatatatctacaaaacggtcccgaccgcattggtaggttgtacaaaaaggccctgtatctccagtacactgatgagactttcaggaccaccatagagaagcctgtgtggttgggctttttaggcccaatcatcaaggcagaaacaggtgacaaggtatacgtgcacctgaaaaatctggcctcccggccatatacatttcacagccatggcatcacttactacaaagaacacgagggggccatctaccctgataacactactgacttccagcgtgctgacgacaaggtatacccaggcgaacagtacacatatatgctcctggctactgaggagcagtcacctggcgagggagacggtaactgtgtgacaaggatttatcatagccacattgacgccccgaaggatattgcgtcgggcttgatcggacccctgatcatctgcaaaaaagacagtcttgacaaggagaaagagaaacacattgacagagagtttgtagtgatgttctctgtggtggacgaaaactttagctggtacctcgaagataatattaagacatactgttctgagcccgagaaggttgataaagataatgaagatttccaggagtcgaatcggatgtactctgtaaatggatatacatttggctctctcccagggctttctatgtgcgccgaggacagggtgaagtggtatctgtttggtatgggcaatgaagtcgacgttcacgccgcctttttccacggacaggcgttgaccaacaagaactatagaatagacacgatcaatttatttcctgcaacactgtttgacgcctacatggtggcccagaaccctggagagtggatgctgtcctgtcagaatttgaaccatctgaaggcgggtttgcaggccttttttcaagtgcaggaatgcaataaatcctccagtaaggacaatataagaggcaaacacgtgcgacattactacatcgccgcagaggaaatcatttggaattatgcgccgtcaggaatagacatttttaccaaagagaacctgactgctccgggcagtgattcagcagtgttcttcgagcaagggactacacggatcgggggttcctataaaaaactggtttaccgcgagtacacggatgccagctttacgaatcgtaaagaaagggggcccgaggaagagcatctcggcatcctggggcccgtgatttgggccgaggtgggagatactatcagagtaaccttccataataagggagcctatcccttgtctatagaaccaatcggagtcaggttcaacaagaataatgagggcacctactatagccctaactacaatcctcagagccgatccgtgccaccttctgcttcgcatgtggctcctacggagactttcacgtacgaatggaccgtccccaaggaagtcgggccaacaaacgccgaccctgtctgtctagcgaagatgtattatagcgctgtcgacccgaccaaggacatattcacaggcttaatcggcccgatgaaaatttgtaagaaggggtccctgcacgcaaacggaagacagaaggacgtggacaaggagttttacctgtttcctacggtctttgacgagaacgagtcacttctgctggaggacaacattcgcatgtttacaactgcccctgaccaggtggataaagaggatgaagacttccaagaaagtaacaaaatgcactccatgaacgggtttatgtatggcaaccaaccaggactgaccatgtgtaagggtgactccgttgtctggtacctgttctccgctggaaacgaagcggatgtgcacgggatctattttagcggtaatacgtatctttggcggggagagagaagagacactgccaacctgtttccacagacctcccttacactgcatatgtggccagacactgagggtacatttaatgtggagtgccttacaaccgatcactacacgggcggaatgaagcaaaaatacactgtcaatcagtgtcgaagacagtcagaggattccacgttttaccttggcgaacgcacttattacattgcagcagtggaagtggaatgggactactctcctcaacgggaatgggaaaaggaacttcaccacctccaggaacaaaatgtcagcaacgcattcctggataaaggcgaattctacattggatccaagtataagaaagtggtgtaccggcaatacaccgactccacattcagggtgcccgtcgagcggaaagctgaagaagagcatcttggaattcttgggccccaactgcacgcggacgttggagacaaggtgaagatcatttttaagaatatggccacccgtccgtactcaatccacgcccatggagtgcagacagaatctagcactgtaacacccacactgcccggcgagacattaacgtacgtgtggaagatcccagaacgttctggcgctggaaccgaggactctgcttgcatcccctgggcatattactcgactgtggatcaggtgaaagatctgtactcaggtctgatcgggcccctgattgtgtgtagacgcccgtacctgaaagttttcaaccctaggcgcaagctggagttcgcgctcctgtttctggtgttcgacgagaatgagtcttggtatcttgacgacaacatcaaaacatattctgatcatccagagaaggtaaacaaggatgacgaagagttcatcgagagcaacaaaatgcatgcaattaatggacggatgttcggcaacctgcaagggctaactatgcatgtgggagacgaagtgaattggtatctgatgggaatggggaatgagattgacttgcacactgttcacttccatggccattcatttcagtacaaacaccgcggcgtgtacagcagcgatgtgttcgacatatttcccggaacctaccaaactttggaaatgttcccccgcactcccggaatatggctcctgcactgccatgttacagatcacatccacgctggaatggaaaccacatatacagtattacagaatgaagataccaagtccgga

SEQ ID NO: 1583 - DNA, 3195 bp, Artificial Sequence
  derived and/or modified sequence
atgaagatcctcatcctcgggatcttcctcttcctgtgctcgactcctgcatgggccaaggagaaacactactacatcggaatcatcgagactacctgggattatgcgtccgaccacggagaaaagaagttgatcagcgtggatactgaacactcgaacatctacttgcagaacgggccggaccggattggacgcctgtacaaaaaggctctctacctgcaatacaccgatgaaaccttccggacgaccatcgaaaagccggtgtggcttggctttctcggaccaatcatcaaggccgaaactggcgacaaagtgtacgtgcatctcaagaacctggcatccagaccatataccttccacagccatggaattacgtactacaaggagcacgaaggcgcaatttacccagataacactactgacttccagcgcgcagacgataaggtctacccaggagagcaatacacctatatgctgctcgccactgaagagcaatcaccaggggaaggggatgggaactgcgtcacccggatctaccattcccatattgatgctcctaaggatatcgcatcgggcttgatcggaccgctgataatctgtaagaaagacagcttggacaaggagaaggaaaagcacatcgacagagagttcgtcgtgatgttcagcgtcgtcgacgaaaacttctcctggtatctcgaagataacattaagacttactgctcagagcccgagaaggtcgacaaggacaacgaagattttcaggagtccaaccgcatgtactcggtcaatggttacactttcgggtcgctcccgggactgtcaatgtgcgccgaggaccgcgttaagtggtatcttttcggaatgggtaatgaagtggatgtgcacgctgccttcttccacgggcaggcacttaccaataagaattacagaatcgacaccatcaatctgttcccagctaccctcttcgacgcatacatggtggcccagaatcctggcgaatggatgctgtcatgccaaaatctgaaccatctgaaggcaggactgcaggcctttttccaggtccaggaatgtaataagtcctcgtccaaagacaacatccggggaaagcacgtgagacattactacatcgcggcagaggagattatctggaactacgccccttccggaatcgacatattcactaaggagaacctcaccgcccctggatcagacagcgctgtgttcttcgaacagggaaccactcggatcgggggatcgtacaagaagctggtttaccgcgagtacacggacgcctccttcaccaacaggaaagaacggggcccggaggaagaacacttgggtattctcggtcctgtgatctgggccgaagtgggcgacacgattcgcgtgaccttccataacaagggagcatacccgctgtccatcgaacctatcggagtgcggttcaataagaacaatgaaggaacttactactccccgaattacaacccacagtcgcgctccgtcccaccgtcagcatcgcatgtggcccctaccgagacttttacctacgagtggaccgtcccgaaggaagtgggaccaacgaacgcggaccctgtgtgtctggctaaaatgtattacagcgccgtggatcctactaaggacatctttaccggactgatcggaccgatgaagatttgtaagaaagggagtctgcatgctaatggacgccagaaggatgtggataaggagttctacctgttcccaactgtgttcgatgaaaacgagtccctgctgctggaggacaatattcgtatgttcaccacggcgccagaccaagtggacaaggaagatgaggacttccaagaatccaacaaaatgcactccatgaacggttttatgtacggaaaccaaccggggttgacgatgtgcaagggggacagcgtggtttggtatctgttctctgccggaaacgaggctgatgtccacggaatttacttctcaggaaacacttatctgtggagaggcgaaagacgcgacactgccaacctgtttccgcagacctccctcaccctccatatgtggccggacaccgaaggcacgtttaacgtggaatgtttgacgaccgaccactacaccgggggaatgaagcagaagtacactgtgaatcagtgtcgcagacagtcggaggactcgactttctacctgggagaacggacttactatatcgcggccgtcgaagtggaatgggattacagcccccaacgcgaatgggaaaaagaactgcaccacttgcaggagcagaacgtgtcgaacgcgttcctcgacaagggagagttctacatcggatccaagtacaaaaaagtggtgtacagacagtataccgactccaccttcagagtgccggtggagcgcaaggcggaagaagagcacctcggcatcctgggtccgcagctgcacgccgatgtgggggacaaggtgaaaatcattttcaagaatatggcgaccagaccttactccatccacgcccacggcgtccagaccgagtcgtcaactgtgactccgacgttgcctggagaaactcttacttacgtgtggaaaatcccagaacgctcgggtgcagggaccgaggacagcgcgtgcatcccatgggcctactactcaacggtggaccaagtgaaggacctctactccggacttatcggaccgctcatcgtgtgcaggcggccgtacttgaaagtgttcaatccccggcgcaagttggagttcgccctcctgtttctggtgtttgacgagaacgagtcgtggtacctcgatgataacatcaaaacctattcggaccatcctgagaaggtgaacaaggacgatgaggagtttatcgaatcgaataagatgcatgccattaacggacgcatgttcggcaacctccagggccttaccatgcatgtgggagacgaagtgaattggtatttgatggggatgggaaatgagatagacctccacactgtccactttcatggtcacagcttccagtacaagcatcgcggtgtctactctagcgatgtgtttgacatcttccctggaacgtaccagactctggaaatgttcccacgcaccccgggtatttggctgctgcactgccatgtgaccgaccatatccatgccgggatggaaaccacgtacactgtgctgcagaacgaggacactaagtcaggc

SEQ ID NO: 1584 - DNA, 3195 bp, Artificial Sequence
  derived and/or modified sequence
atgaagatcctgattctgggaatttttctgtttctgtgtagtacgccagcctgggccaaggagaagcattactacatcgggatcattgagactacctgggactacgcatctgaccacggagagaaaaagctcataagcgtcgacactgagcacagcaacatctatctccagaatgggccggataggataggccggctgtataaaaaggcactttacctgcaatacaccgatgagactttccgcactaccatcgagaaacctgtctggctgggtttcttagggccaatcataaaagccgagacaggagacaaggtctatgtgcacctcaagaatcttgccagccggccctacaccttccattcccacggaatcacttattataaagaacacgaaggagcaatctaccctgacaacaccaccgacttccagagagccgatgacaaagtctatcccggggaacagtatacatacatgttgctggccacagaagaacaaagccccggagagggggacggtaattgtgtaacgcggatttaccactcccatatagacgcgcccaaggacatcgcgtcaggcctgataggaccactgattatttgcaaaaaggattcccttgataaggagaaggagaaacacatcgaccgggaattcgttgtcatgttttctgtggtggatgagaatttcagctggtacctggaggacaatattaaaacgtattgttcagaacccgagaaggtagacaaagacaatgaagattttcaggagtctaaccgtatgtatagcgttaatggttatacgttcggatcactccctggtctgtccatgtgtgctgaagatcgtgttaagtggtatctgttcggaatgggtaacgaggtcgatgtgcatgccgctttctttcatgggcaagcactcaccaacaagaattataggatcgacacaattaatctgtttcctgctaccctatttgacgcatatatggttgctcagaatccgggcgagtggatgctatcctgccagaacttgaaccacctgaaagcaggactgcaggcattcttccaggtacaggagtgcaataaatcatcgtccaaagataacatacgaggcaagcatgtgcgccactactatattgctgccgaggaaattatatggaactacgccccatcggggatagatatttttaccaaggagaatctgacagccccgggcagcgatagtgccgtcttctttgaacagggtactactcggataggcggttcctataaaaagctagtgtatcgtgaatatacagatgctagttttaccaatcgcaaagagcgagggcctgaggaggaacacttgggcatcctaggacccgtgatatgggcagaagtgggggatacaataagagtcacattccacaataagggtgcttatcccctttctatagagccaatcggagtgcgttttaacaaaaataacgaaggcacatattactcacctaactacaacccacagagcaggtcggtgcccccatcagcctcccatgttgcccccacagaaaccttcacttatgagtggaccgtcccaaaagaagtggggcctacgaatgcggaccccgtgtgcctcgccaaaatgtactacagtgccgtcgacccaacgaaggatatctttactggtttaattggtcccatgaagatttgcaagaagggcagcttacacgcaaacgggagacaaaaggacgtggacaaggagttttacctgtttcctacggtatttgatgaaaatgaatccctactgctcgaagataacattcgcatgttcactaccgctcccgaccaagtggacaaagaggacgaagattttcaagaaagcaacaaaatgcactccatgaatggcttcatgtatggcaatcagccaggactgaccatgtgtaaaggtgactccgtcgtctggtatttgttcagcgcaggcaacgaggccgacgttcatggaatttacttctccgggaatacttatctgtggagaggggagaggcgagacactgctaacctgtttccccagacttctcttacactgcatatgtggcctgacactgaaggtacctttaatgttgaatgcctcactacagatcattatacagggggcatgaaacaaaagtacaccgtaaatcagtgtcgcaggcagagtgaggattctaccttctatctgggcgagcggacttactatattgcagctgtggaggtggagtgggattactccccacagcgggaatgggagaaggagctgcaccaccttcaggaacagaacgtgagcaatgcgttccttgataagggcgaattttacataggatctaagtacaaaaaggtggtatacaggcagtatacagattcaacatttagagtccccgtcgagcggaaggcagaggaggagcatctgggaatcctgggcccacagcttcacgctgacgtaggtgacaaggtgaaaataatttttaaaaacatggcaactcgtccatacagtattcacgcgcatggagtacagacggaaagctctacagtcacccccactctgcctggagaaactttgacctatgtctggaagattccagaacggtctggcgccggcactgaggattcagcctgtatcccgtgggcctattactctaccgttgaccaggtgaaggacctttactctggacttatcgggcctctaatcgtgtgtcgtaggccttacctgaaggtgtttaacccccgcaggaagcttgaattcgccttactgttcttagtcttcgacgagaacgaatcatggtacctggacgacaacatcaagacttactccgatcatccggaaaaagttaataaagatgacgaagagtttattgagtctaacaagatgcacgccatcaatggacggatgttcggcaacttgcaggggctcacaatgcatgtgggagatgaagtaaattggtaccttatgggaatgggcaatgagattgacctgcacactgtccatttccacgggcattcttttcagtacaaacatagaggtgtgtacagttctgacgtctttgatatattccctggcacttatcagacactcgagatgttcccccgtacaccaggaatttggttgctgcactgccacgttactgaccacatacacgcaggcatggagacgacctacaccgtgctgcaaaatgaggatactaagtctggt

SEQ ID NO: 1585 - DNA, 3195 bp, Artificial Sequence
  derived and/or modified sequence
atgaagattttaattctgggcatctttctcttcctgtgcagcacgccagcctgggctaaagagaagcactattatatcgggattatagaaactacatgggattacgcaagcgaccacggggaaaaaaagctgataagtgtggacaccgaacatagtaacatctatctccagaatggccccgatagaatcggccgcctctacaagaaggcactatacttacagtataccgacgagacttttaggactaccatcgagaagcctgtgtggcttgggtttctagggccgataatcaaggccgaaacaggcgacaaggtgtatgtacacctgaaaaacctggcttcccggccctacaccttccacagccacggaattacctactataaggagcacgagggcgccatatatccagacaacactactgacttccagagagctgatgacaaggtttatcccggggagcaatacacatatatgctattggctacggaggagcagtcccccggagagggggatggaaactgcgtgacgagaatataccattcacacatcgacgcaccaaaagacatcgctagtgggcttataggaccattgatcatctgtaaaaaagactctctggacaaagaaaaggagaaacacattgatcgggagtttgtggtaatgttcagtgttgtcgatgaaaattttagctggtatctcgaggacaacatcaaaacctactgctccgaacctgagaaggtggataaagataacgaagacttccaggagtcaaatcgtatgtactctgtaaatgggtacacgtttggtagtttgcctgggctgtcaatgtgcgccgaggacagagtcaagtggtacttatttggaatgggcaatgaagttgacgtccatgctgcgttctttcatggccaagctttgaccaataaaaactataggatagacacaatcaacctgttccctgccactctctttgatgcatatatggtggcccaaaatccgggcgaatggatgctgagctgtcagaatcttaaccacctgaaggccggtctgcaggccttctttcaagtgcaggaatgtaataagtccagctccaaagacaacattaggggtaagcatgtgcggcactattatatcgccgccgaggagattatttggaattacgccccatcgggcatcgacatctttaccaaggagaatctgacagctccaggcagcgacagcgcggtgttcttcgaacagggaactacccgcataggtgggagctacaagaaactggtgtatcgcgaatatacagacgcgtccttcactaaccggaaggagaggggccccgaagaggagcacctgggtatcctggggcctgtcatctgggccgaagtgggtgacactattagagtgacattccacaataagggcgcctaccccctgagcatcgagccaattggcgttcgctttaacaagaacaacgaaggcacctactattcgcctaattacaacccccagtcaagatccgtccctccctcagctagtcatgtggcacccaccgagacctttacttacgagtggaccgttccgaaagaagtgggccccaccaacgctgacccagtctgccttgccaaaatgtattattccgctgtggatcccactaaggacatctttaccgggctgatcggccccatgaagatctgtaaaaaaggtagtctgcatgcaaatgggcggcagaaggatgtggacaaggaattctacctctttccaactgtgttcgacgagaatgagagtttattgctcgaagacaatattcggatgtttactacagctcccgatcaggtcgataaagaagacgaggactttcaagaaagtaacaaaatgcacagtatgaacggttttatgtatggcaatcagcccggcctcacgatgtgtaaaggagactctgtggtctggtacctattttctgccggaaatgaagcggatgtccacggaatttatttttccggcaacacatacctatggcgtggggaaagacgggataccgccaatctgttccctcagaccagccttacactgcacatgtggccagacacagagggaacctttaacgttgaatgcctgactaccgatcactatacgggcggaatgaagcagaaatacaccgtaaaccagtgcaggagacaatctgaggactcgactttttacttgggggagaggacctattacatagcagccgtagaggtggagtgggactattcaccacagcgggagtgggagaaggagcttcaccatctgcaggagcagaacgtgtccaacgctttcctcgacaagggcgaattttatatcggctctaagtataagaaggtggtgtatcggcagtacacagactctacctttagggtgccagtggaaagaaaggccgaagaggagcatctcggtatcctgggcccacaattgcacgcagatgtcggtgataaagtgaagattatattcaagaatatggctactcggccatactcaatccacgctcacggagttcaaaccgagtcaagtacagtgactcctaccctaccaggcgagacattgacatatgtgtggaaaataccagaacggagcggcgcaggaaccgaggatagcgcatgtattccgtgggcgtattactccacagtagatcaggtgaaggacctgtattctggactgatcgggccactgatcgtgtgtagacgtccctacctcaaggttttcaacccacgcagaaagctggaatttgccttactgtttctggtctttgatgagaacgagtcatggtatctagacgataatatcaaaacatattcagaccatccagaaaaggtgaacaaagacgatgaggaattcattgaaagcaacaaaatgcacgctatcaacggcaggatgttcgggaacctccagggattaaccatgcacgtgggagacgaggtaaattggtatttgatgggcatgggtaatgagattgacttacacacagttcatttccacgggcactcattccagtataaacaccggggggtgtacagtagcgacgtctttgacatcttcccaggcacctaccagacactcgagatgtttccccggacacccgggatctggctcttacactgccatgttacagatcacattcacgcgggcatggagaccacatatacagtgctacagaatgaggacactaaatcgggc

SEQ ID NO: 1586 - DNA, 3195 bp, Artificial Sequence
  derived and/or modified sequence
atgaaaatcctcatcctgggcatcttcctgttcctatgctctacccccgcctgggcgaaggagaagcactattatattggtatcatcgaaacgacctgggactacgcaagcgaccatggagagaaaaagctcatctccgtggataccgaacacagtaacatctaccttcagaacgggcccgataggattggtcggttgtacaaaaaagcgttgtatcttcagtataccgatgagacctttcggaccactattgaaaagcccgtttggctaggattcttaggccccattataaaagcagagaccggggacaaggtctacgtgcatctgaaaaacctcgctagtcggccgtatacgttccacagtcacggaattacctattacaaagagcacgagggggccatctatccggacaatactacagatttccagcgcgcggacgataaggtataccccggcgaacagtatacgtatatgctcctggccacagaggaacaatccccgggggaaggggatggaaattgcgttaccaggatttatcattcccacattgatgcaccaaaggacattgcttctggtcttattggccccctcattatatgcaagaaggactcattggacaaggaaaaggagaaacatattgacagggaattcgtggttatgtttagcgttgtcgatgaaaacttttcctggtacttggaggataacatcaagacttactgttctgagccggagaaagtggataaggacaacgaggatttccaggaatcaaaccgcatgtacagcgtgaatgggtatacattcggaagcttacccggcctttccatgtgcgcggaagaccgcgtcaagtggtatcttttcggaatggggaacgaggtcgatgtccacgctgcatttttccacggacaggctttgaccaataagaactatcgcatcgacactatcaacttgttccccgctactttgttcgacgcctacatggtcgcccagaatcccggtgaatggatgctgagttgtcagaatctgaaccatctcaaggctggcctgcaggccttttttcaggtccaggaatgcaacaagtcttcttcaaaagataatattaggggcaaacacgtccgccattattacatcgcagcagaagagattatttggaactacgctccctcagggatcgacatttttaccaaggaaaacctgacagctccaggttctgatagcgcagtctttttcgaacagggtacaacaagaataggcgggtcctacaaaaagctggtttatagggagtatacagatgcgtcctttacaaacaggaaggagagaggcccagaagaggaacatcttggaattttaggaccggtcatctgggctgaagtgggagataccattcgggtgacgtttcataacaagggcgcctatccactgtccattgagcccatcggagtgcggttcaacaagaacaatgagggcacctattattccccaaactataaccctcaaagccggtctgtccccccatccgctagtcatgtggcccctaccgagacatttacctacgagtggacagtccccaaggaggtcggcccaaccaacgctgacccagtgtgcttggcaaaaatgtattactccgctgttgatcccacaaaagacatttttacgggcctgatcggcccaatgaaaatttgcaagaaaggaagcttgcacgccaatggccggcagaaggacgttgacaaggaattctacctgttccctaccgtctttgacgaaaatgagagcctcctgctggaagataatatccggatgttcacaacagccccagaccaggtggataaggaggacgaggatttccaggagagtaacaagatgcatagcatgaacggttttatgtatggtaatcaacccgggctgacgatgtgcaaaggggattccgtggtatggtaccttttttcggcaggaaacgaagccgatgtacatggaatttatttctctggcaacacctacctatggcgcggagagcgccgagatacagctaatttattccctcagacatccctcaccctccacatgtggcctgacacagaggggacctttaatgtagagtgtctcacaaccgatcactataccggaggcatgaagcaaaagtacactgtgaaccagtgcaggcgccaatctgaggactccaccttttacctgggcgagcgtacttattatattgccgcagtcgaggtagaatgggattattccccacagcgggaatgggaaaaagagcttcaccacctgcaggagcagaatgtgagcaatgcatttctcgacaaaggagagttctacatcgggtctaagtacaaaaaagtggtttataggcagtacactgatagcacatttcgcgtgcctgtcgagcgcaaagctgaggaagaacacttgggaattctaggtccccagctccacgcagatgtgggagataaggttaaaattattttcaaaaacatggcaacacgaccatattcaatccatgcacacggggtgcagactgaatccagtactgtgactcccaccttgcctggggagacactgacgtacgtgtggaagatcccagagcgatcaggagcgggcacagaagactctgcttgcataccatgggcctactatagcaccgtggaccaggttaaagacctttatagcggcctgattgggcctttgatagtgtgcagaaggccctatctaaaggtgttcaaccctcggcgcaagctggagtttgctctcctctttctggttttcgacgaaaacgagagttggtacctggacgataacattaaaacatattcagaccaccccgaaaaggtgaataaggatgatgaggagtttatcgagtccaataagatgcatgccatcaatggccgcatgttcggaaatctgcagggtttgacaatgcacgtcggggacgaggtaaattggtatctcatgggcatgggaaacgaaatcgacctgcacacagtgcattttcatggccactcctttcagtataagcatcgaggagtttattccagcgatgtttttgacatctttcccggcacataccaaaccctggagatgtttccacgcacacccggcatttggctgctccactgtcatgtgacggaccacatacatgcgggcatggaaacaacttacacggttcttcagaatgaagacaccaagagcgga

SEQ ID NO: 1587 - DNA, 3195 bp, Artificial Sequence
  derived and/or modified sequence
atgaagatacttatacttggtattttcctctttctttgttccacgccagcctgggccaaagaaaagcattactacattgggattatcgaaaccacttgggattacgcatcagaccatggagagaaaaagctgattagcgtggacacggagcatagcaacatttaccttcaaaacggtcctgatcgaattggtcgtctttacaagaaggcactttacctgcaatacactgatgaaaccttcagaaccactattgaaaaaccagtgtggcttggtttccttggtcctatcatcaaggcagaaaccggtgacaaagtctatgtgcatctgaaaaacctcgcatcgcgtccgtatactttccactcgcatggtattacctactacaaggaacacgaaggagcaatttaccctgataatacgaccgattttcaacgcgcggacgacaaggtgtacccgggcgaacaatatacgtacatgcttctcgcaactgaagaacagtcaccaggtgagggagacggaaactgcgtgacccgaatttaccattctcatattgatgcgcccaaggatattgcctcaggtctgatcggacccctgattatctgtaagaaagatagcctggacaaggagaaagagaaacatatcgatcgagaattcgtggtcatgttttcggtcgtcgatgaaaacttttcctggtacctcgaggacaacattaagacctactgttccgaacccgagaaggtggacaaggataacgaagattttcaagaaagtaacagaatgtactccgtgaacggatacacctttggcagcctcccaggcctttcgatgtgtgccgaggaccgtgtcaagtggtacttgtttgggatgggtaatgaagtggatgtgcatgcagccttttttcatggtcaggcactgaccaacaagaactaccgaatagataccattaaccttttcccggcgactctttttgacgcatacatggtggcacagaaccccggcgagtggatgctgtcttgtcagaatctcaaccatttgaaggcgggactccaggcattctttcaggtgcaggaatgtaacaagtcgtcctcaaaggataacattcgtggtaagcatgtgcgtcattactacatcgcagccgaagagatcatttggaattatgcaccaagcggaatagatatcttcaccaaagaaaacctgaccgccccgggctcagattccgcagtctttttcgaacaagggaccacccggattggggggtcgtacaagaagctggtgtaccgagaatataccgacgcatccttcaccaacaggaaagaaaggggtcccgaggaagaacatctcggtatcctcggtcctgtgatctgggccgaggtgggcgataccataagagtgacctttcataacaagggtgcatacccactctccattgagcctattggcgtccggtttaacaagaataatgagggcacttactactcacctaactataacccacaaagcagatcagtgccgcccagcgcctcacatgtggcaccgaccgaaacctttacttacgaatggaccgtgccaaaagaagtgggacctaccaacgcagatcctgtctgtttggcaaagatgtactactcggcagtggatccaactaaagacattttcaccggactgattggacctatgaagatttgtaaaaagggaagccttcacgccaacggacggcaaaaagatgtggataaggaattctacctctttccaactgtttttgatgagaatgaatccctcctgttggaggataacatccgaatgttcactaccgcacctgaccaagtggacaaggaagatgaagatttccaagaatcgaacaagatgcattcaatgaatggttttatgtacggaaaccaacctgggctgaccatgtgtaaaggtgattcagtggtttggtatcttttctcggctggaaatgaagctgatgtacatggaatctacttctcgggaaatacctacctgtggaggggagaacgaagagataccgcaaacctttttccacaaacctcgctgacccttcatatgtggcccgataccgaagggacctttaacgtcgaatgtttgactactgatcactacactggaggaatgaagcagaagtacactgtcaatcaatgcagacggcaatcagaagattccaccttttaccttggagaaagaacctactatatagcggcagtggaagtggaatgggactactcccctcagagagaatgggaaaaggaactccatcacttgcaagaacaaaacgtgagcaacgcatttctggacaagggagagttttacattggatccaaatacaagaaggtcgtgtacagacagtacactgattccacttttagggtgccagtggaaaggaaggccgaggaagagcaccttggtattctgggaccacagcttcacgcggatgtgggcgacaaggttaagattatcttcaagaacatggcgaccagaccatacagcattcatgcgcatggtgtgcaaactgagtcatcgaccgtgacccctaccctcccaggtgagactctgacttacgtgtggaagattcctgaaagatcgggggcggggactgaggattccgcatgcattccttgggcgtactactcgaccgtcgaccaagtgaaggatctgtactcggggcttatcggtcctcttatcgtctgtcgtagaccgtacctcaaggtgtttaacccccgcagaaagctcgagttcgccctgctttttctcgtgtttgacgaaaacgaatcatggtacctcgacgacaatatcaagacctactccgatcatccagagaaagtcaacaaggatgatgaggagtttattgagagcaataagatgcatgccatcaacggaagaatgttcggaaacctccaagggctcacgatgcatgttggagacgaggtcaattggtacctgatgggtatggggaacgaaattgatcttcacactgtgcatttccacggacactcgttccagtacaagcaccgcggtgtctacagctcagacgtgttcgatatctttcctggaacctaccaaactcttgaaatgtttcccagaaccccaggcatctggctgcttcactgtcatgtcaccgaccatatccacgcaggcatggaaactacttatacggtcctgcaaaacgaggacactaaaagcggc

SEQ ID NO: 1588 - DNA, 3195 bp, Artificial Sequence
  derived and/or modified sequence
atgaagattctgatcctggggatttttctgtttctgtgttcaaccccagcatgggccaaggagaagcattactatattggaattatcgaaaccacctgggattacgctagtgaccatggtgaaaagaagctgatcagcgtggacacggagcattcgaacatctaccttcaaaacggtccagaccgcattggacggctgtacaagaaggcactgtacctccagtacacggatgaaactttcaggaccaccattgaaaaacccgtgtggctcggattcctgggacctatcatcaaggcagagactggggataaggtgtacgtgcatttgaaaaacctggccagccggccttacacctttcactcgcatggaattacgtattacaaggaacatgaaggagcaatttacccagataacactaccgacttccaacgtgcggacgataaagtgtacccaggagaacaatacacttacatgctgcttgctaccgaagaacagtcccccggagaaggcgatggaaattgtgtgactcgaatttaccactcacacattgatgctccaaaagatattgcatccggccttataggtcctctgataatctgtaagaaggattccctcgataaggagaaggaaaagcatattgatagagagtttgtggtcatgttttcagtggtggatgaaaacttttcctggtacctcgaagataacatcaaaacctactgctcagaacctgaaaaagtggataaagacaacgaagattttcaagagtccaaccggatgtactctgtgaacggttacacctttgggtcactccccggtctgtccatgtgtgccgaggacagggtgaagtggtacctttttggaatggggaacgaggttgatgtgcatgctgccttctttcatggacaggccctcactaacaagaattaccggattgatacgatcaacctttttcctgcaactctttttgacgcatacatggtggcacaaaacccgggtgaatggatgctgtcgtgtcaaaatcttaaccatctcaaagctgggctccaagccttctttcaggtgcaagaatgtaacaagtcctcgtcaaaggataacatccgcggtaagcatgtgcgccactattacatcgcagcagaagaaatcatctggaattacgcaccttcaggaatcgatatctttacgaaggaaaacctgacggcccccgggagcgatagcgctgtgttttttgaacagggtaccacgagaatcgggggctcatataagaagttggtgtacagggagtacactgatgcctcgtttaccaatcgcaaagagcgcggacccgaggaagagcacctggggatcctgggacctgtgatttgggcggaagtgggcgataccattcgagttacttttcacaataagggtgcatacccactgtccattgaaccaattggtgtgagatttaacaaaaacaacgaaggaacctactactcgcctaactataacccacagtcaagaagcgtgcccccttccgcctcacatgtggccccaaccgaaaccttcacctacgagtggactgtccccaaggaggtgggtcctacgaacgcagacccagtgtgcctggctaagatgtattactcggccgtcgaccctactaaagatatcttcaccggtctgattgggcccatgaagatctgcaagaagggttcactgcacgccaacggtaggcagaaggacgtagacaaggagttttacctttttcctaccgtgtttgacgaaaatgagtcgcttcttctggaggacaacattcgcatgttcaccaccgcaccggatcaagtcgataaagaagatgaggatttccaggaatccaacaagatgcactctatgaacggttttatgtacggaaaccagcccggcctcaccatgtgcaagggagactcagtggtgtggtacctgttctcggcgggaaatgaagctgacgttcatggaatctacttctccggaaacacctacctttggagaggagagaggcgggacaccgccaacttgtttcctcagacttccctgactctccatatgtggcctgacactgaaggaactttcaatgtggaatgcctgaccactgatcattacaccggtggaatgaagcaaaagtataccgtgaaccaatgtaggagacaatcggaggacagcaccttctacctgggagagaggacctattacattgccgccgtggaagtggaatgggattacagccctcaacgggaatgggaaaaggagctgcatcatctgcaggaacagaatgtgtcgaacgcattcctcgataaaggggaattctacatcggttcgaaatacaagaaggtggtctacagacagtacactgactctactttccgcgtgcctgttgagcgaaaagccgaagaagaacatttgggaattcttgggccacaacttcatgcagatgtgggggacaaggtgaagattatcttcaagaatatggccacccgcccttactcaatccatgcgcacggcgtccagactgagagcagcactgtgacgccaactctccccggagagacgctgacttacgtctggaagattccagaaagatccggagccggaaccgaagattcggcgtgtattccatgggcttactactccactgtggatcaagtcaaggatttgtactccggactcatcgggccactgattgtttgcagaaggccttaccttaaagtgtttaaccctcgtagaaaacttgaatttgcgctcctgtttctcgtgttcgacgagaatgaatcgtggtatttggatgacaacataaagacctattccgatcacccagaaaaggtgaacaaggatgatgaggagtttatcgaatcgaataagatgcatgcaatcaacggaagaatgtttggcaatctccaaggactgaccatgcatgttggagatgaagtgaactggtacttgatgggcatgggtaacgaaatcgaccttcatactgtccattttcatggtcacagcttccagtacaaacatcggggagtctactcctcggacgtctttgacatttttcccggtacttaccaaaccctcgaaatgtttccgagaacccctggaatctggctgcttcactgccatgtgactgaccatatccatgcaggcatggaaactacctacactgtccttcaaaacgaagataccaaatcggga

SEQ ID NO: 1589 - DNA, 3195 bp, Artificial Sequence
  derived and/or modified sequence
atgaaaattttgatactgggcatctttctcttcctatgctctactcccgcctgggctaaagagaagcattattacataggaatcatcgaaaccacgtgggattatgcgagtgaccatggcgagaagaagttaatctcggtagacaccgagcacagcaatatttacttgcaaaatggacctgacagaataggacgcctgtataagaaagccctctaccttcaatacactgatgagacttttcgcacaacaatagagaagccagtttggctgggcttcctggggcctattatcaaggcagagacgggggataaagtctatgttcacctgaagaatcttgccagccggccctacacttttcacagccacgggattacatattacaaggagcatgagggcgccatttatccagacaatactacagactttcagcgtgctgatgacaaagtataccctggggagcaatacacatatatgctacttgccaccgaggaacagtcacctggggaaggagatggcaattgcgtgacaaggatataccatagccacatcgacgcccccaaagacatcgccagtggcctcatcggaccccttatcatctgcaaaaaagactctctggataaggagaaggagaagcatatcgaccgcgaattcgtcgtaatgttctccgtggtggacgagaacttttcttggtacctggaagataacattaagacttactgttcagagcccgagaaagtggacaaggataacgaggatttccaggaatcaaaccgtatgtattcagtgaacggatatacatttggcagcctgcccggtttgtccatgtgcgccgaggacagagtgaaatggtacctctttgggatgggaaacgaggtggatgtccatgcagcctttttccatggtcaggctttgaccaacaagaactacaggattgatacaattaatctgttcccggccaccctcttcgatgcttacatggtggcacagaatcccggggaatggatgctgagctgccaaaatctgaaccacctgaaggctggcttacaggccttctttcaggtgcaagaatgtaacaagtcctcatcaaaggacaacataaggggcaagcacgtcaggcactattacatcgccgccgaggaaatcatctggaactatgcgccttccggcatagacatctttactaaagaaaacttgactgcgccaggcagcgactccgccgttttctttgagcagggcacgactcgcattgggggtagctacaaaaaactggtctatcgtgagtacacagacgcctcatttaccaaccggaaggaacgcggtcctgaggaggagcatttaggcatcttgggacccgtaatttgggccgaggtcggggacacgataagggtgacctttcataataaaggagcttatcctctgtcaatagagccaattggggttagattcaacaaaaacaacgagggcacctactattcacctaattataatccccagagccgctcggtacccccctcagcctcgcacgtggccccaaccgaaacatttacatacgaatggaccgtccccaaagaagtggggccaactaatgccgacccagtctgtctggccaaaatgtactactcagctgtggacccaaccaaagatatttttacagggctgattggccctatgaagatctgcaagaaaggaagcttacacgccaacggccgacaaaaggacgttgataaagagttttacctcttccctactgtgttcgacgagaacgaatcccttctactggaggacaacatccggatgttcacaaccgcgcctgatcaagtagacaaagaagatgaagacttccaggaaagtaataagatgcacagtatgaacggctttatgtatggaaaccaacccggactgaccatgtgtaaaggtgattcagtcgtatggtatctgtttagtgcagggaacgaagccgatgttcacggaatttatttcagcggaaacacttatctgtggagaggcgagcgaagagacactgcaaacctgttcccccaaacaagtttgaccctgcatatgtggcctgacaccgagggcaccttcaacgtcgagtgtcttacgactgatcactataccggggggatgaagcagaagtatactgtgaaccagtgccgtcggcagtcagaggacagcacgttctatctgggagaaagaacatattacattgccgctgtggaagtggaatgggactacagcccacagcgcgagtgggaaaaagaattgcatcatctacaggagcagaacgtgtctaatgctttcctggacaaaggggaattctacatcgggagcaaatataagaaagtcgtctacaggcagtacactgactcaacgttccgggtcccagtggaacgcaaggctgaggaagagcacctgggcatactcggtccccagctgcacgccgacgtcggtgacaaggtcaagatcatcttcaaaaacatggcaacccggccatattctatccacgctcatggcgtccaaactgagtcttcgacagtaaccccgactctgcccggagagaccctgacctacgtttggaaaataccagaacgatctggggccggaaccgaagattctgcgtgtatcccatgggcttactactctacagtcgatcaggtgaaggacttgtatagtgggctgatcggaccattgattgtatgtagaagaccttacctgaaagtcttcaacccgagaaggaaactcgaatttgcgctcttattcctcgtgttcgatgaaaacgagagctggtatctcgacgataatattaaaacctattcagaccatcctgagaaagttaacaaagacgacgaagagttcatcgaatcgaacaaaatgcatgccataaatggccggatgttcggaaatctccagggactgactatgcacgtcggagatgaggtcaactggtatctgatggggatgggaaacgaaattgacctgcatactgtgcactttcatggtcatagcttccaatataagcacagaggagtgtatagctcagatgtcttcgatatctttccaggcacctaccagacactcgagatgttcccacgtacaccgggcatctggttactccattgccatgtgaccgaccacatacacgcagggatggagaccacctatacagtgctgcaaaatgaagacacgaaatccggt

SEQ ID NO: 1590 - DNA, 3195 bp, Artificial Sequence
  derived and/or modified sequence
atgaagatcctgattctggggatcttcctctttttgtgctccacgcccgcatgggctaaggagaaacactactacatcggaatcatcgaaactacttgggattacgcatcggaccatggcgaaaagaaattgatctcggtggataccgagcattcaaacatttatctgcagaacggaccagacagaatcgggaggctgtacaaaaaggcactgtacctgcagtacaccgacgaaactttccgcacgactattgaaaagccggtctggctgggatttctcggaccaattatcaaagcggaaaccggagacaaagtctacgtccacctgaagaatctggcgtcccgtccgtacactttccactctcatggaatcacctactacaaggagcacgagggagccatctaccctgataatacgactgacttccagcgcgcagacgataaagtgtacccaggagaacaatatacctatatgcttctggccaccgaagaacagagcccaggagaaggggacggaaattgcgtgacccgcatctaccattcgcatattgatgccccgaaagacatcgcttccggactgatcggcccactgatcatctgtaagaaggatagtctggataaagaaaaggagaagcatatcgatcgggaattcgtcgtgatgtttagcgtcgtcgacgagaacttttcgtggtacctggaggataacatcaagacgtactgttccgagccggagaaggtcgacaaggataatgaggacttccaagagtcaaaccgcatgtacagcgtcaatggttacacctttggctcactgccgggactgagcatgtgtgcggaggaccgggtgaagtggtacttgtttggcatgggaaacgaggtcgacgtccacgcagctttctttcatggccaagcgctgactaataagaactacaggattgataccatcaacctcttcccggccacccttttcgatgcctatatggtcgcacaaaatccgggagaatggatgctgtcatgtcagaatctgaaccatttgaaggctggcctccaggcattcttccaggtccaggaatgtaataagtcatcttccaaggataacatccggggcaagcacgtgcgccactattacatcgcagcagaggaaatcatttggaactacgccccgtcgggcatcgatatctttaccaaagagaaccttactgccccgggatcggacagcgccgtgttcttcgagcaggggactacccggatcggtgggtcgtacaagaagttggtgtatcgggagtacaccgatgcgtcatttactaacagaaaggagcgtggacctgaagaagagcatctgggaatccttggaccggtgatctgggccgaggtgggagataccatccgggtgactttccacaataagggcgcataccctctctccatcgaaccgatcggagtgcggttcaataagaataacgaaggaacctactactccccaaactacaaccctcagagcaggtccgtcccgccgagcgcgtcccatgttgctccaaccgagactttcacttacgaatggacggtcccaaaggaagtgggtccgacgaacgcggacccagtttgcctggcaaaaatgtactactcggccgttgacccgacgaaggacatcttcacgggactcatcgggccaatgaagatttgcaagaagggatccctgcacgctaacgggagacagaaagatgtggataaggagttctacctgtttccgacggtgttcgatgaaaacgagtcacttctcctggaggacaatatccgaatgttcaccactgcccctgaccaagtggataaggaagatgaagatttccaggagtccaataagatgcactcaatgaatggcttcatgtacggcaaccagccgggactgactatgtgcaagggggactccgtggtttggtatctgttctccgcaggaaacgaagctgatgttcacggaatttacttctccggaaatacttacctctggagaggggagcggagagacaccgcgaatttgttcccccagacctcgctcacgctccacatgtggccagacaccgaaggtactttcaatgtcgaatgcctcacgaccgaccactacaccggaggcatgaagcaaaagtacactgtcaaccagtgtcggcgccaaagcgaggactcgaccttttacctgggggaacgcacctactacatcgccgctgtggaggtggaatgggactactcgccacaacgcgagtgggaaaaggagcttcaccatcttcaggaacaaaacgtctctaacgccttcctcgacaagggagagttctacatcggatcaaaatacaaaaaggtcgtgtaccgccagtacactgactcgacgttccgggttcctgtggaacgcaaggcggaagaagaacacctgggcattttggggccgcagttgcacgccgacgtgggcgacaaagtgaagatcatctttaagaacatggcgacgcggccgtatagcattcacgcacacggagtgcagactgaatcaagcactgtcacccccaccctgcctggggagactctgacctacgtctggaagatcccggaacgctcgggagcaggcactgaagattccgcctgcatcccgtgggcctactactcgactgtggatcaggtgaaagatctgtatagtggcctcatcggaccactgatcgtctgcaggcggccgtacctgaaggtctttaacccgcggagaaagttggagttcgctctcctgttcctggtgttcgacgagaatgaatcttggtacctcgatgacaatatcaaaacttattcagatcaccctgaaaaggtgaataaggacgatgaagagttcatcgaatcgaataagatgcatgccatcaatgggagaatgttcgggaacctgcaagggttgacgatgcacgtgggagacgaagtcaactggtacttgatggggatgggcaatgagatagacctccacactgtgcacttccacggacattccttccaatacaagcatagaggagtatacagctcggatgtgttcgacattttccctggcacttaccagacgctggaaatgttcccaaggactccaggcatctggctgcttcactgccacgtgactgaccatattcatgccggaatggagacgacctacactgtgctgcaaaatgaagataccaagtcgggc

SEQ ID NO: 1591 - DNA, 3195 bp, Artificial Sequence
  derived and/or modified sequence
atgaaaatccttatccttggcatcttcctcttcttgtgctctacccctgcctgggctaaggaaaagcactactacatcggaattatcgaaaccacctgggactacgctagcgaccacggagagaagaaactgatctccgtggataccgagcacagcaatatctacctgcagaacggtcctgatagaattggacggttgtataagaaagccctgtacctgcaatacaccgacgaaacttttagaaccactatcgaaaagcccgtgtggctcgggttcctcggaccgatcatcaaggcggaaacgggagacaaggtgtacgttcacctcaagaacctcgcgtcgcggccatacacctttcactcccatgggatcacttactacaaggaacatgaaggagcgatttaccctgacaacaccactgacttccaacgcgcagatgataaagtttacccaggtgagcagtacacttatatgcttctcgcaactgaggagcaaagcccgggagagggtgacggaaactgcgtcactcgcatctatcactcccacatcgatgctccgaaggacatcgcatccggactgatcggacccctcattatctgtaagaaggactcgctggataaagaaaaggaaaaacacatcgaccgcgagttcgttgtgatgttctcggtggtcgacgaaaacttttcgtggtacctggaggacaacatcaagacttattgctccgaacctgaaaaggtcgacaaggacaacgaggacttccaggaatcgaatagaatgtactccgtcaatggatacaccttcggctcgctcccgggactctcaatgtgcgccgaagatcgcgtgaagtggtatttgttcggaatgggaaacgaggtcgacgtccatgctgccttcttccacggacaggcgctgactaataagaactatcgcatcgataccatcaatctgttcccggcgactctgtttgacgcgtacatggtggctcagaaccctggagaatggatgctgtcgtgtcagaacttgaaccacctgaaggctggactgcaagcatttttccaagtgcaagagtgtaataagagcagctccaaggacaacattcgcggaaaacacgtgcgccattactacatcgcggcagaagagatcatctggaattacgctccgtccgggatcgacattttcaccaaggagaatcttacggctcccggctcagactcggcagttttcttcgagcaagggaccactagaattggaggatcctacaagaagctggtctacagggagtacactgacgcatcgttcactaaccgcaaagagcggggaccggaagaagagcacctgggaatcctgggtcctgtcatttgggccgaagtcggagataccatcagagtgactttccataacaaaggtgcttaccccctctcgatcgaaccaatcggcgtccgctttaacaaaaacaacgagggaacctactattcgccgaactacaatccgcaatcacggtccgtcccgccttctgcctcgcatgttgcgccaaccgagacgttcacctatgaatggactgtgccaaaggaggtgggaccaaccaacgccgacccggtatgcctcgcgaagatgtactactccgccgtcgacccaacgaaggacatcttcaccggcctgattggcccaatgaagatctgcaagaagggaagcctccacgcgaatggacggcagaaagacgtggacaaagagttttaccttttcccgacggtgttcgacgagaacgagtcgctgttgctcgaggataacatccgtatgtttaccaccgcacctgaccaggtcgataaagaagatgaggatttccaggagtccaacaagatgcacagcatgaacggtttcatgtacggcaaccaaccgggtttgactatgtgcaagggcgactccgtggtgtggtacctgttcagcgcaggcaatgaagcggacgtccacggaatctacttcagcggtaacacctacctgtggagaggggaacgccgggacacggccaatctcttcccgcagacttcgctgaccctgcatatgtggccagacaccgaaggcacctttaatgtcgaatgcttgaccaccgaccactacacgggaggaatgaaacagaagtataccgtgaaccagtgccggcgccagtcggaggattcaaccttttacctcggggagcggacctactacatcgctgctgtcgaggtggagtgggactactcaccgcagagagagtgggagaaggaactccaccacctccaggagcagaacgtgagcaatgcctttctggacaagggagagttttacattggttcgaaatacaaaaaggtggtttacaggcaatacacggactcgacctttagggtcccggtggagcggaaggccgaagaggaacacctcggcatcctgggtccacagctccatgcagatgtcggcgacaaggtcaagatcatcttcaagaacatggccacccgcccttactccatccatgcgcacggcgtgcagaccgaaagttcaactgtgactcccacgctgccaggagaaaccctcacctacgtctggaaaattcctgaaaggtcaggagccggcaccgaggacagcgcgtgcatcccgtgggcgtactacagcactgtggaccaggtgaaagacctctactcgggtctgatcggaccgctgatcgtgtgccgccggccttacctgaaggtgtttaacccacggcggaagctggaattcgcgctgctgtttctggtgtttgacgagaacgaatcatggtatctggatgacaacatcaaaacttactcggatcatcccgaaaaagtcaacaaggatgatgaggaattcattgagtcaaataagatgcacgcgatcaacggaagaatgtttggcaacctgcagggactgactatgcatgtgggcgacgaagtcaactggtacctgatgggaatgggtaacgagatcgatctgcacaccgtgcactttcacggacactcattccagtacaagcaccggggtgtgtattcgtcggacgtgtttgacattttccctggaacctaccaaaccctggaaatgttcccgcggactccaggaatatggctgctgcactgccacgtgaccgaccacatccacgcgggtatggaaaccacctacactgtgttgcagaatgaggacaccaaaagcgga

SEQ ID NO: 1592 - DNA, 3195 bp, Artificial Sequence
  derived and/or modified sequence
atgaaaattcttatcctcggcatctttctttttctgtgctccactccggcatgggcaaaggaaaagcattactacatcggcattatagaaaccacctgggactacgcaagcgaccatggcgagaagaagttgatttcagtcgacactgaacattccaacatttatctgcagaacggacctgaccggatcggacgcctttacaagaaggccctttaccttcagtacaccgatgaaacgtttcgaaccaccatcgagaagccagtgtggctgggtttccttggacctattatcaaggcggaaacgggagataaagtgtacgttcaccttaagaaccttgcatcacgtccatacactttccatagccacgggattacctactacaaggaacacgaaggagcaatttacccagataatactacggattttcagagagccgatgataaagtgtatcctggagagcaatacacctatatgctgctcgcaaccgaagaacaatcaccgggtgagggtgatgggaattgtgttactagaatctatcattcacatatagatgcaccgaaagatattgcatctggccttattgggccactgataatctgtaagaaggacagtctggacaaggagaaggaaaaacatatcgatcgcgaatttgtggtcatgttcagcgtggttgacgagaacttttcctggtacctcgaagataacatcaagacttattgctcagaacccgagaaagtggacaaagacaacgaagatttccaggagtcaaatagaatgtactccgtcaacggatacaccttcggctcgttgcctggcctctcgatgtgcgcagaggatagagtgaaatggtatctcttcggcatgggaaacgaagtcgacgtccatgccgcattctttcatggacaagccttgactaacaagaattaccgcattgataccattaacctttttccagccaccctgtttgacgcgtacatggtggcacaaaaccccggtgaatggatgctgtcctgccagaaccttaaccatcttaaagcaggactgcaggcatttttccaggtgcaagaatgtaacaagtccagctcgaaggataacatccgcggtaagcatgtgcgtcactattacattgcagccgaggagatcatttggaactacgccccaagcggaattgacattttcaccaaggaaaacttgaccgctcctgggtctgattcggccgtgtttttcgagcaaggcactacccggattggagggtcatacaagaagctggtgtaccgtgaatacaccgatgcaagttttaccaaccgaaaggaaagaggtccagaagaagaacatcttggaatcctggggcccgtcatttgggcagaggttggggataccattagagtgacttttcacaacaaaggagcataccctctttcgatcgagcctattggggtgagattcaacaagaacaatgagggaacttactacagccctaactacaatccacagtcacggtcagtgccgccttcggcctcgcacgtggcaccaactgagacttttacttacgagtggaccgtgcctaaggaagttggaccgactaatgccgatcctgtgtgtcttgcaaagatgtattactcggctgtggacccgactaaggatatctttaccggtctgattggtcctatgaagatttgtaagaagggatcgttgcacgccaatggtcggcagaaggacgtggataaggaattctacctgtttccaactgttttcgatgagaatgaatcgcttctgctggaggataacatcaggatgtttaccacggcccctgatcaagtcgataaggaagatgaggacttccaggaatccaacaagatgcattcgatgaacggattcatgtacggaaatcagcctggtctgactatgtgtaagggagactccgtggtctggtaccttttttcagcaggaaacgaggcagacgtccatggaatttacttttcgggaaatacctacctgtggagaggtgaacgacgcgataccgcaaacttgttcccacagacctccctgaccctgcatatgtggcctgacaccgaggggacttttaacgtcgaatgtctgacgaccgatcattacaccggtggtatgaaacagaagtatacggtgaaccagtgccgccgacagtcagaagattccactttttacctgggggaaaggacttactacattgcagcggtggaggtggaatgggattacagcccccaacgtgaatgggaaaaagaacttcatcatcttcaagagcaaaacgtgtccaatgcctttctcgataaaggagagttttacattggaagcaagtataagaaggtcgtgtacagacagtataccgacagcacttttcgggtccctgtcgaacgcaaggctgaggaagagcacctggggatcctcggaccgcagctgcacgcagatgtgggggataaggttaagattatctttaagaacatggctacccgtccctactccattcacgcacacggagtgcaaacggaatcctcgactgtcacccctacgctcccaggagaaacccttacctacgtttggaagatccccgaaagatcaggtgctggcaccgaagattcagcttgcattccatgggcgtactactcgaccgttgaccaagtcaaggatctttactccgggctgattggccctctgatcgtgtgccggcgaccataccttaaagtgttcaacccacgcagaaagctggaattcgcactcctttttctcgtctttgacgaaaacgaatcatggtaccttgatgacaacatcaaaacttactcggatcacccagagaaggtgaataaggatgatgaagaattcattgaaagcaataagatgcacgcaattaacggtaggatgtttggtaacctccaggggctgactatgcatgtaggcgacgaagtgaactggtacctcatgggcatgggtaacgaaatcgatctgcatactgtccattttcatgggcactcatttcagtacaaacacaggggtgtctacagctctgatgtctttgacattttccctggtacttatcagactctggagatgttcccaaggactcccggaatttggctcctgcactgtcatgttactgaccacatccacgccggtatggaaacgacttacaccgtgctgcaaaatgaagataccaagtcgggg

SEQ ID NO: 1593 - DNA, 3195 bp, Artificial Sequence
  derived and/or modified sequence
atgaaaatcctcatcctgggaatcttcctttttctctgcagtactccggcttgggcgaaggagaaacactactacatcggaattatcgaaaccacctgggactacgcatcagatcacggcgaaaagaaacttatcagcgtggacactgaacattccaacatatacttgcagaacggaccggacagaatcggacggctgtacaagaaggctttgtacctgcagtacactgacgaaaccttcagaaccaccatcgagaagcccgtctggctcggatttctgggacccatcatcaaggcggaaactggtgataaggtgtacgtgcatctgaaaaacctggcctcccggccatacacgttccactcccacgggattacctactacaaggaacatgagggagcgatctacccagataataccactgactttcagagggcggacgacaaggtgtacccgggagaacagtacacttacatgctcctcgccactgaagagcagagcccgggcgagggagatggaaactgcgtgacccggatttaccactcgcacatcgatgccccgaaggacatcgcctcgggactgatcggccccctgatcatttgcaagaaggattccctggacaaggaaaaggaaaagcatatcgaccgcgagtttgtcgtgatgttcagcgtggtggatgagaatttctcgtggtacttggaagataacatcaaaacttattgctccgaaccggaaaaggtggacaaagataatgaagattttcaagagtccaaccgcatgtactcagtgaacggatacacttttggcagcctccctgggctctcaatgtgcgccgaagatagagtgaagtggtacctctttggaatgggaaacgaggtggatgtccacgctgcattctttcacggacaagctctgacgaataagaactaccggatcgatacgatcaatctctttccggcgactctgttcgacgcctacatggtcgcccagaatccgggtgaatggatgcttagctgtcagaatctcaaccatctgaaggcggggcttcaagccttctttcaggttcaggagtgtaacaaaagctcctccaaagataacatccgcgggaagcacgtgcgccattactacatcgcagccgaagaaatcatctggaattacgcccccagcggcattgatatcttcactaaggagaacctgaccgccccgggatcagattcggctgtattcttcgagcagggtactacccgcatcggcggatcctacaagaaactggtctaccgggagtacaccgacgctagcttcactaatagaaaggagcggggaccggaggaagaacatctcggaattctcggaccagtgatctgggccgaagtgggagacaccatcagggtcacgtttcacaataagggagcctacccattgtcgatcgagccgatcggagtcagattcaacaagaacaatgagggaacctactactcgccgaactataacccacagtcacggtcagtgcccccgagcgccagccatgtggccccaacggaaacctttacgtatgaatggaccgtcccaaaagaggttggaccaacgaacgccgacccggtctgcttggccaagatgtactactcggccgtggacccgacgaaagacatcttcaccgggctcatcgggcccatgaaaatctgcaagaaggggtccctccatgctaatggacgccagaaggacgtggataaagaattctacctgtttccgaccgtgtttgatgaaaacgagtccctgctgcttgaagataacattcggatgttcactaccgcgcctgaccaggtggacaaggaggatgaagatttccaggaaagtaacaagatgcactccatgaacggttttatgtacggcaaccagccggggctgaccatgtgtaaaggagacagcgtggtgtggtatctcttctcggcaggaaacgaggcagacgtgcacggtatttacttttctggcaacacctatttgtggcgcggagaaaggcgggacaccgccaaccttttcccgcaaaccagccttacccttcacatgtggcccgacaccgaaggaacgttcaacgtggaatgcttgactaccgaccattacaccggaggcatgaagcagaagtacaccgtgaaccaatgtcggcggcagtcggaggactcgactttttacctgggggaacgcacgtactacatcgcggccgtggaagtggaatgggattactctccacaacgcgagtgggagaaggagcttcatcacctgcaggaacagaatgtgtccaacgcattcttggacaaaggcgagttctacattgggtccaagtacaagaaagtggtctaccggcagtacaccgactcaactttcagagtgcctgtggagcggaaggctgaagaagaacatcttggcatcctgggaccgcaactccacgcagatgtgggtgacaaagtgaagatcatcttcaagaacatggcaaccagaccgtacagcatccacgcacatggcgtgcagactgagagctccactgtcactcctaccctcccgggcgagactctcacctacgtgtggaagatcccagaacgctcgggagccggtaccgaggacagcgcatgtatcccttgggcatactacagcaccgtggaccaagtgaaagacctctactccggtctgatcggacccctgatagtctgccggaggccgtacctgaaagtctttaacccacgccggaagttggaatttgctctgctgttccttgtgttcgacgaaaatgaatcatggtacctcgatgataacattaagacctactccgatcacccagagaaggtcaacaaagatgacgaggagttcatcgaatcaaacaaaatgcacgcgatcaacggacggatgttcggcaacctgcaaggcctgaccatgcacgtgggagacgaagtcaattggtacctgatgggcatgggtaatgaaattgacctgcacaccgtgcatttccatggccattcttttcagtacaaacaccgaggcgtctattcgagcgatgtgtttgacatcttcccgggcacttaccaaaccctggaaatgttcccgcgcactcctggcatttggctgctgcactgccacgtgactgatcacatccatgccggaatggaaactacttacactgtgctccagaacgaagatactaaaagcgga

SEQ ID NO: 1594 - DNA, 3195 bp, Artificial Sequence
  derived and/or modified sequence
atgaagatcctgatcctgggaatcttcctgttcttatgcagtacacccgcttgggccaaggaaaaacattactatatcggaatcatcgagaccacttgggattacgcaagtgaccatggtgagaagaagcttatcagcgtggacactgaacattctaatatatacctgcagaacgggcccgaccgaatcgggagactctacaagaaagccctgtacctgcagtatacggatgagacatttaggaccaccattgagaagccagtttggctggggtttctgggtcccatcattaaggccgaaactggggataaggtgtatgtccatctgaagaacctcgccagtaggccctacacattccactctcacggaataacatattacaaagaacacgagggagcaatttaccccgacaataccaccgacttccagcgagcagatgataaggtttaccctggcgaacagtatacctatatgctgctagcaacagaagagcagagtcctggggaaggggacggtaactgcgtcacccggatctaccactctcatattgatgctcccaaggacattgctagtggcctcatcggcccactgataatttgcaagaaggacagcctagataaagagaaggagaagcatatcgacagagaattcgtagtgatgttcagtgtggtcgacgagaacttctcctggtacctggaagataacatcaaaacctattgctccgaacccgaaaaggtcgacaaggacaatgaggatttccaggagtctaatcgaatgtattcagtcaacggctacacctttggcagtctacctggccttagtatgtgcgctgaagatagggttaagtggtacctgtttggaatggggaatgaggtggacgtgcatgccgccttcttccatggccaagcgttgaccaacaagaattataggatcgacacaataaatttgtttcccgctacactgttcgatgcctacatggtcgcgcagaatcccggcgaatggatgctgagctgtcagaacttgaaccacctgaaagccggattgcaggccttctttcaggtccaggaatgcaacaagtcctcatcaaaggacaacataagaggtaaacatgttaggcattattacatcgcagccgaagagattatctggaattacgccccttctggcatcgacatttttaccaaggagaatctgacagcacccggctccgacagcgccgttttttttgaacagggtaccaccagaatcggaggctcctataagaaacttgtgtaccgggagtacacagatgctagtttcaccaaccgcaaggaaaggggtccggaggaggagcaccttgggattctgggccctgtgatatgggctgaggtaggagataccattagggttactttccataataaaggggcttacccgctgtctattgaacccatcggagtgcggttcaataagaataacgaagggacctactattcccctaactacaacccacaatcgagatctgtgcctccgagtgcgtcccacgttgctccgacagaaacttttacgtacgagtggaccgtcccgaaagaggtggggcctacgaacgcggacccagtctgcttggccaagatgtactactccgccgtagaccccaccaaggatattttcacagggttaatcgggccgatgaagatctgcaaaaagggtagtctgcacgctaatgggcgccagaaagatgttgataaggagttctatcttttccccacggtgttcgacgaaaatgagtctctgctgctggaagataatattaggatgtttactacggcccccgatcaggtggataaggaagatgaagattttcaggagagtaataagatgcactctatgaatggatttatgtatggaaatcagccagggcttaccatgtgtaaaggcgacagcgtcgtgtggtatctcttctctgccggaaacgaggcagacgtgcatggtatctattttagtggcaacacatacctttggcgtggagaaaggcgggataccgccaatctcttcccccaaacatctttgacactgcacatgtggcccgatactgaaggaacattcaacgttgaatgtctgaccaccgaccactataccggcgggatgaagcagaaatataccgttaatcagtgccgtcgccagtcagaagattccaccttctatttaggtgaaaggacctactatattgcagccgtggaggtggaatgggactacagccctcaaagggagtgggaaaaggaactgcaccatctacaagaacagaacgttagcaatgctttcctcgataaaggcgagttctacattggctctaagtacaagaaggttgtgtatcgccagtacaccgattccacatttagagtccctgtggaacggaaggctgaggaggagcacctgggcatcctggggccccaactacatgccgacgttggggataaggttaaaatcatatttaaaaacatggccaccagaccctacagcatccacgcccacggagttcagactgagagcagtaccgtcacccctactttgccgggagaaacccttacatatgtgtggaaaattcccgaaaggtctggagccgggaccgaggattctgcctgcattccttgggcctactacagcacagtggaccaagtgaaagacctgtactccggtctaatcggccccctaatcgtgtgcagacgcccttatcttaaagttttcaacccgaggcgaaaattggaattcgcactgctgtttttggtgttcgatgaaaatgagagctggtacctggacgacaacattaagacgtactccgaccatcccgaaaaggtgaataaagacgatgaagagttcatcgagtcgaataaaatgcatgccatcaacgggcggatgtttggtaacctacaggggctgaccatgcacgtgggcgatgaagtgaactggtacctcatgggcatggggaacgagattgatcttcatacagtgcactttcacggacattcattccagtataagcatcgtggcgtttattctagcgatgtctttgacatcttccccggaacttaccagactttggagatgtttcccagaaccccaggaatctggttgctgcactgtcatgttactgaccacatacacgccggaatggaaaccacgtacactgtgctccaaaacgaggacaccaaaagcggg

SEQ ID NO: 1595 - DNA, 3195 bp, Artificial Sequence
  derived and/or modified sequence
atgaagattcttattcttggaatttttcttttcttgtgctctaccccagcctgggctaaggagaagcactattacattgggattatcgaaaccacatgggattacgcctcagatcacggagagaaaaaacttatttccgttgacacggagcatagtaacatctatctccagaatgggccggaccgcattggtcgcttgtacaagaaggctctgtatcttcagtataccgacgagacctttcgcacaacaattgaaaagccagtgtggcttggctttctcgggcccatcataaaagctgaaaccggggacaaagtgtacgtccacttgaagaacctggcttctcgtccatacacctttcattcacacggcatcacctactataaagaacacgaaggggctatctatcccgacaacactaccgatttccagcgcgcagacgataaggtttaccctggggagcagtacacctatatgcttctggccacagaggaacagagtcccggtgaaggagacgggaactgtgtcactcgcatttatcactcccatattgatgcccctaaggatattgcaagcggcttgatcgggcctctgattatctgcaaaaaggactcgctggataaggaaaaagagaaacacatcgaccgcgaatttgtggtcatgttctctgtagtcgacgagaatttctcatggtacctggaggataatatcaagacctactgttcggaaccagagaaggtcgacaaggacaacgaagacttccaagaatccaaccggatgtattccgtgaacggctatacattcggctcccttccgggcctgagtatgtgtgctgaagatcgggtaaaatggtacctctttggcatggggaacgaggttgatgttcatgcagctttctttcacggtcaagccctgactaataaaaattaccggattgatacaattaatctgttccctgcaactctgttcgacgcctatatggttgctcagaacccaggtgagtggatgttgtcctgccagaacttaaaccaccttaaagcaggcttgcaggccttttttcaggttcaggagtgtaacaaatcaagcagtaaggataacattcgcgggaaacatgtgaggcattactacattgcagcagaagagatcatatggaactacgctccatccggaatcgacatcttcactaaggagaacctgacggcaccgggctctgatagcgccgtgtttttcgagcaaggcacaacacgaatcgggggaagttataagaaactggtgtaccgagagtacacagatgcgagctttaccaatcgaaaagaaaggggccccgaggaggagcacctcggtattctgggcccggtgatctgggccgaagtgggagataccattagggttacctttcataacaaaggagcatacccactgtccatcgagcccatcggagtgagatttaacaagaacaacgagggcacttactacagtcccaattacaacccccaaagccgctcagtgccacccagtgccagccacgtggcaccaacagagacattcacgtatgagtggacggtgcccaaggaggtcggtcctactaatgcagatcccgtatgcttggcgaaaatgtactactccgctgtcgacccaacaaaggatatctttaccggcctcattgggcccatgaagatctgcaagaagggttctctacacgcaaatggccggcagaaagacgtcgacaaggaattctacttattccccactgtgtttgatgaaaacgagtccctgctgttagaggataatatcaggatgtttaccacagcacctgaccaggttgataaggaggatgaggactttcaggagagcaacaagatgcatagtatgaacggttttatgtacgggaatcaacccggccttacgatgtgcaaaggtgatagcgtcgtctggtacctgttttctgccggcaacgaggcggacgttcacggcatatacttctcaggaaacacctatctttggcgaggggaacgcagggatactgcaaacctgttccctcagacaagcctgaccctgcacatgtggcccgacaccgaggggacttttaacgtcgaatgtcttacgacagatcattatactggtggaatgaaacagaagtacaccgtaaatcagtgcagacgacaatcagaggactccacattttaccttggggagcgaacgtattacatcgcagcagttgaggtggagtgggactacagtccacagcgcgagtgggaaaaagagttgcaccatctgcaggagcagaacgtgagtaacgctttccttgacaaaggagaattttacattgggtctaagtataaaaaagtggtctatagacagtatactgactctactttccgcgttcctgttgagcgtaaagcagaggaagaacacctcggaatcctgggaccccagctgcatgctgacgttggagacaaagtgaaaatcatatttaaaaatatggctacaaggccttactcgatccatgcccacggggttcagaccgaatcgtccacggtgacaccgacgctgcccggggaaaccctgacctatgtatggaagattccggagcgcagcggggcaggcactgaagatagcgcatgtataccctgggcgtactacagcacagtggaccaagttaaggatctttactccggcttgattgggccattgattgtctgccgcaggccgtacctcaaggtctttaatccccgacggaaactggagtttgcccttttgtttttagtgtttgatgaaaatgagtcgtggtatttagatgataacattaagacatatagcgaccatcctgagaaggtgaacaaggacgacgaggagttcatcgagtccaacaagatgcatgctatcaatggccggatgttcggtaacttacagggactcacgatgcacgttggcgacgaggtaaattggtacctgatggggatgggcaacgagatcgatctgcacaccgtccacttccacggtcattcatttcagtacaagcataggggggtttacagctccgacgttttcgatatatttcctggaacctatcagacccttgaaatgtttcctaggacccctggaatttggttgctccactgccatgtgaccgatcacatccatgccggcatggaaaccacatacacagtgttacagaatgaagatacaaagagcggg

SEQ ID NO: 1596 - DNA, 3195 bp, Artificial Sequence
  derived and/or modified sequence
atgaagattctgatcctgggcatatttctgtttctgtgctccacccctgcgtgggcgaaagagaagcactattacattggtatcatcgagactacgtgggattacgcctccgatcatggagaaaagaaacttatttccgtggacaccgaacactcgaacatctacttgcagaacggacctgacagaatcgggagactgtataagaaggccctgtacctgcaatacacggacgaaactttccgcaccactatcgaaaaaccggtttggctcggattcttggggccgatcatcaaggccgaaactggtgacaaggtctacgtgcacctgaagaaccttgcttcaagaccatacactttccactcccacggaatcacctattacaaagaacatgagggcgccatctaccccgacaacacgacggatttccagagagctgatgacaaagtgtaccccggagagcaatacacttacatgctcctcgcaactgaagagcagtcaccaggagaaggcgacggtaactgtgtcaccaggatctaccactcacatatcgacgctccaaaagacatcgcttccggactgatcggtccacttatcatttgtaagaaggatagcctggacaaggaaaaagagaaacatatcgatcgcgagttcgtggtcatgttctccgtcgtggatgagaacttctcgtggtacctggaggacaacatcaaaacgtactgctccgagccggaaaaggtggacaaggataacgaagattttcaggagtccaaccgaatgtactccgtcaacggatacactttcgggagcctgcccggactgtccatgtgtgctgaggaccgggtcaaatggtaccttttcggcatgggaaacgaggtggacgttcatgcagcgttcttccacgggcaggctctgactaataagaactaccgcatcgacaccataaacctgttccctgcgactttgttcgacgcgtacatggtcgcacagaaccctggagagtggatgctctcctgccagaacctgaaccacctgaaagccggcctgcaggcgtttttccaggtgcaggagtgcaacaaatcatcgtccaaggacaacattagaggcaagcacgtgcggcattactatatcgccgccgaagagatcatttggaattacgctccttccggaattgatatcttcacgaaggaaaatctcaccgcgccgggatccgattcggccgtgttcttcgagcagggaaccacccggatcggtggtagctacaaaaagctggtctaccgcgaatacactgacgcctcgttcaccaaccggaaggagagaggaccggaggaggaacacctcggaatcctgggtccggtaatctgggccgaggtcggcgacaccatcagagttaccttccacaacaagggcgcctaccctctgagcatcgagccgattggagtgaggttcaacaagaataacgaaggcacttactactccccaaattacaacccgcaatcccggtcggtgccgccgagcgcctcccacgtcgcaccaactgagactttcacttatgagtggactgtgccaaaggaggtcggaccaactaacgcggaccctgtgtgcctggcaaagatgtactactcagctgtggacccgaccaaggatatcttcactggcctcatcggaccgatgaagatttgcaaaaagggatcgctgcacgccaacggtcggcaaaaggacgtcgataaagagttttacttgttccccaccgtgttcgatgagaacgaatccctccttctggaagataacattcggatgtttactaccgctcctgaccaggtggataaggaggatgaggattttcaagagagcaacaaaatgcactcgatgaacggattcatgtacggaaaccagccgggattgactatgtgcaagggggactcagtggtgtggtacctgttctccgccgggaacgaagcggatgtccacggcatctacttcagtggcaacacctacctctggcggggagagcggagagacacggcgaatctgttcccgcagacttccctcaccttgcacatgtggccggacaccgaggggacgttcaatgtggagtgtctcaccactgatcactacactggcggtatgaagcagaagtacaccgtgaatcaatgccggagacaaagcgaggattccactttctacctgggggagcgcacctactacatcgccgctgtcgaggtggagtgggactacagcccgcagagggaatgggagaaggaattgcaccacctccaagagcagaacgtgagcaacgccttcctggacaaaggagaattctacattggttcgaagtacaaaaaggtggtctaccggcaatacactgattcgaccttccgggtgcctgtcgagcgcaaggcagaagaagagcatctcggcatcctcggcccgcaactgcacgcggacgtgggggataaagtgaaaatcatctttaagaacatggcaacccggccttacagcatccacgcgcacggagtccaaactgaatccagcactgtgaccccaaccctgcccggggaaacgctcacgtacgtgtggaagatcccggagcgcagcggagccgggacggaggactctgcgtgcattccgtgggcttactacagcacggtggatcaggtgaaggatctgtactccggacttatcggacccctcatcgtgtgccgcagaccttatctgaaggtgtttaatccgcgccgaaagttggagttcgccctgctgtttctcgtgttcgacgaaaacgagtcctggtacctggatgacaacatcaagacttactcggatcacccagaaaaggtgaataaagatgacgaagaattcatcgaatccaataagatgcacgctatcaacggacgcatgttcgggaacctgcagggcctcaccatgcacgtgggggacgaagtgaactggtaccttatggggatggggaacgaaattgacctgcataccgtccatttccacggacacagcttccaatacaagcatcgcggagtgtacagctcggacgtctttgacattttcccaggtacctaccagacccttgaaatgttccctcgtaccccgggaatctggctgctccattgccacgtcaccgatcatatccatgcaggcatggagactacctacactgtgcttcagaacgaggacaccaagagcggc

SEQ ID NO: 1597 - DNA, 3195 bp, Artificial Sequence
  derived and/or modified sequence
atgaagatactgatcttaggtatattcctttttctgtgctcaacccccgcctgggctaaggaaaaacactactacataggcattattgagaccacctgggattatgcaagtgatcatggggaaaaaaagttgatttcagtggacactgaacactctaatatctacctgcagaatggtcccgaccgtatcggaaggctgtataagaaagctctgtatctccagtataccgatgagacctttcgcacaacgatcgaaaagccagtctggttaggctttttgggtcccataattaaggctgaaactggggataaagtgtatgtacatttgaagaatctcgcttcacgaccctacacctttcacagtcacggtatcacctattataaggaacatgaaggagccatttatcccgacaatacgacagatttccagcgtgcggatgataaggtgtaccctggggagcagtacacatacatgttgctagctaccgaggagcagagcccaggagagggtgacgggaattgtgtaaccaggatatatcatagtcacatcgacgcaccgaaagacatagcgtccggactgattgggcccctgatcatatgtaaaaaagattcgcttgacaaggagaaggaaaagcacattgacagagaattcgtggtgatgttctctgttgtcgatgaaaatttcagttggtaccttgaagacaacatcaagacctactgcagtgaacctgaaaaagtcgacaaggacaatgaagacttccaagagtctaaccgaatgtatagcgttaatggttacacatttgggtccctacccggtctgtctatgtgcgccgaagacagggtcaaatggtatctgttcggtatggggaatgaagttgatgtacatgccgccttcttccacggccaagctctcactaacaagaactatagaatcgataccattaacctgtttccggccacactgttcgatgcttatatggtggctcagaaccccggcgaatggatgctgtcttgccagaatctaaaccatctgaaggcaggccttcaggcattcttccaggtgcaggagtgtaataaatcctcttccaaagacaacatcagaggaaaacatgtgcgccattattacatcgcagcagaagaaataatttggaattatgcaccttccggcattgatattttcaccaaggaaaatctgaccgcgccaggctctgacagcgctgtgtttttcgaacagggaacgactcgaattggcggatcctataaaaagctggtctaccgagagtacaccgacgcaagcttcaccaaccgcaaagagagaggtcccgaagaggagcacctcgggattctgggccccgtgatttgggccgaggtgggagacacaatcagggtaactttccacaataagggcgcctatcccctgagtatagagccgataggagtcagattcaataagaacaacgaaggaacttattattcccctaactataatccccaatctcggtccgtgcctccaagcgcgagtcatgttgctcccactgaaacgttcacctacgaatggacagtgcctaaggaagttgggcccacgaacgccgatccagtctgccttgctaagatgtactatagcgccgtggaccctaccaaggacatttttaccggtctcataggccccatgaagatttgcaaaaaggggagtctccacgctaacgggagacagaaagatgttgacaaagaattttatctgtttcccacagtgttcgacgaaaacgagagcttgctcctggaggataatataaggatgttcacaactgcaccggaccaggtggataaggaagatgaagattttcaggagagcaacaagatgcactctatgaatgggttcatgtacggcaatcagccaggactgactatgtgcaagggcgactcagtggtttggtatttattctctgctgggaatgaggccgacgtacacggcatctattttagtgggaatacctatttgtggcgcggggaacgtcgtgacactgcaaatctttttcctcagacaagccttacactgcatatgtggccagatactgagggaacattcaatgtggagtgcctgactaccgatcattacaccggggggatgaagcagaagtatacggtgaaccagtgccgacgacagagtgaagactccacattttaccttggcgaaagaacgtactatatcgcagccgtcgaagtggagtgggattacagcccccagcgagaatgggagaaggaactgcaccacttacaggagcaaaacgtgtcgaatgcatttttagacaagggggaattctatattgggtctaagtataaaaaggtcgtgtatcggcagtataccgactctacttttagagtacccgtcgagaggaaagcggaggaggagcatctgggtattctggggccacagttacacgcagatgtgggcgacaaagtgaagatcatctttaaaaacatggcaactcgaccctatagcatccatgcacacggcgtgcagacagaatccagtacagtgactccaactctgcccggggagaccctgacctacgtttggaagattccagagcgcagcggcgccggtactgaagactctgcatgtatcccgtgggcatactactcgaccgtggaccaggttaaggatctatattctgggctgattgggccgctaattgtatgcaggcgaccctacctgaaagtgtttaacccacgacgaaagcttgaatttgccctgctgtttttagttttcgatgagaacgaatcttggtacctggacgataatattaaaacctactctgatcatcctgagaaagtgaacaaagacgatgaagaattcattgaaagcaataaaatgcacgctataaatggaagaatgtttgggaatttacaaggactgactatgcatgtgggggacgaagtcaattggtatctgatgggaatggggaatgaaatagacctgcatacagtccattttcatggacactcgttccagtataagcatcgaggggtctattctagcgacgtatttgatatcttccccggcacctaccagacgttagaaatgttcccccgaacaccagggatctggctgctgcattgccatgttacagaccacatacatgcgggcatggaaacaacttacactgtgcttcagaatgaggatactaagtctggc

SEQ ID NO: 1598 - DNA, 3195 bp, Artificial Sequence
  derived and/or modified sequence
atgaagatccttatccttggcatatttctgttcctctgttccactccagcgtgggccaaggaaaaacattactatattggaattatcgaaactacttgggactacgcttcggaccacggtgagaaaaagctgatttcggtggatactgaacatagcaacatctacctgcaaaacggtccagatcggattggacgactgtacaagaaagccctttaccttcagtacaccgatgaaacctttcgcaccactattgagaagcctgtgtggctcggctttctgggaccaatcatcaaggcagagactggagataaagtgtacgtgcatctgaaaaaccttgcgagccggccttacacgtttcattcgcatggaattacttactacaaggaacatgaaggtgccatctacccagataataccaccgattttcaacgcgctgatgacaaggtgtatccaggagagcaatacacttatatgcttttggcaaccgaagaacaatcccctggagaaggtgatgggaactgtgtcacccgtatataccattcacatattgacgcccctaaggacattgcctcgggactgatcggtccactcattatctgtaagaaagatagcctggacaaggagaaggaaaagcacatcgatcgcgaattcgtggtcatgttttcggttgttgacgagaacttttcctggtatctggaagataacattaagacgtactgtagcgaaccagagaaagtcgataaagataatgaggactttcaagagtcgaacagaatgtactctgtgaacggttacacctttggttccctgcccggtctttccatgtgtgcagaggatagggtgaaatggtatctgttcgggatgggaaacgaggtcgacgtgcatgcagcattcttccatggacaggcacttactaataagaattatcggatagacactattaacctctttcccgcgacgctgtttgatgcctacatggtggcacaaaaccctggggagtggatgctttcgtgccaaaacttgaatcacctgaaagccggacttcaggcatttttccaggtccaggaatgtaacaagtcatcctcgaaggataacattcgaggaaaacacgtgcgacactactatatcgcagcagaagaaatcatatggaactacgcaccatccggcatcgatatctttaccaaggaaaatcttactgcacctggctcagattcggcagtcttttttgaacagggaaccaccaggataggtggatcatacaagaagctcgtctaccgcgaatacaccgatgcatcttttaccaacaggaaagagcgaggcccagaggaggagcatctgggtattctcggtcccgtgatttgggcagaagtgggtgataccattcgcgtcacttttcataacaagggcgcatacccactgtcgattgagccgattggtgtgcggttcaataagaacaacgaggggacttactactcccccaactacaatcctcaatcaaggtccgttccaccatctgcgtcgcatgtcgcaccaaccgaaaccttcacctacgaatggacggtgcccaaggaagtgggtcccacgaatgcagatcccgtgtgtttggcaaaaatgtactactcagcggtggatcctaccaaggatatcttcaccggcctgattggaccaatgaagatctgcaagaaaggttcacttcacgccaacggtaggcagaaggacgtggataaggagttttacctgtttcctactgtgtttgacgaaaacgaaagccttctgctcgaggataacattagaatgtttacgacggcaccagatcaagtcgataaggaggacgaggacttccaagaatccaacaagatgcacagcatgaacggttttatgtacggaaatcagcctggtcttaccatgtgtaaaggggactccgtggtttggtacttgttttccgcaggaaacgaagcagatgtgcacgggatctacttctcgggtaatacttacctctggcggggcgagcgacgtgatacggccaaccttttcccccaaacctcgcttaccctccacatgtggccagacaccgagggaacctttaacgtcgagtgtctgaccaccgatcattacaccgggggaatgaagcaaaagtacactgtgaaccagtgtcgccgccaaagcgaagattcaactttttacctgggagagagaacctactacatcgctgcagtcgaagtggagtgggattactcgcctcagcgagaatgggagaaggaacttcaccatcttcaagagcagaatgtttccaatgcttttcttgataagggggaattctacataggatcgaagtacaaaaaggtggtctacagacagtataccgatagcacttttagagtccctgtcgaaagaaaggcagaggaagaacaccttggtattcttggaccacaactgcacgcagacgtgggcgataaggtgaagatcatctttaagaacatggccactcgcccctacagcattcatgcacatggtgttcaaactgaatcctcgactgttactcccaccctcccaggtgaaaccctgacctatgtctggaagatcccggaaagatcaggggccggaactgaggactcggcatgtatcccgtgggcgtactacagcacggtggaccaggtgaaggatctttactcaggactcatcggccccctgatagtctgtaggcggccttatctcaaggtgtttaacccccggaggaaattggaattcgcgctcctgtttcttgtttttgatgaaaatgaatcctggtaccttgacgacaacatcaaaacttactccgatcatccggagaaagtgaacaaggacgacgaggagtttatcgaatcgaataagatgcacgcaataaacggacgaatgttcggtaacctccaaggacttaccatgcacgtgggcgatgaagtgaattggtacctgatgggaatgggtaatgagattgatcttcacaccgtccactttcatggacactcctttcagtacaaacaccgaggtgtgtactcgtccgatgtgtttgacattttcccggggacttaccaaaccctggagatgtttccacggacccccggaatttggcttctccactgtcatgtcaccgatcacattcacgcgggtatggaaaccacctacaccgtgctccaaaacgaggacactaagtcagga

SEQ ID NO: 1599 - DNA, 3195 bp, Artificial Sequence
  derived and/or modified sequence
atgaaaatattaatattaggtatatttttatttctatgttcgacgccggcgtgggcgaaagaaaaacattattatataggtataatagaaacgacgtgggattatgcgtcggatcatggtgaaaaaaaactaatatcggttgatacggaacattcgaatatatatttacaaaatggtccggatcgaataggtcgactatataaaaaagcgttatatttacaatatacggatgaaacgtttcgaacgacgatagaaaaaccggtatggctaggttttttaggtccgataataaaagcggaaacgggtgataaagtatatgtacatttaaaaaatctagcgtcgcgtccgtatacgtttcattcgcatggtataacgtattataaagaacatgaaggtgcgatatatccggataatacgacggattttcaacgagcggatgataaagtttatccgggtgaacaatatacgtatatgttactagcgacggaagaacaatcgccgggtgaaggtgatggtaattgtgttacgcgtatatatcattcgcatatagatgcgccgaaagatatagcgtcgggtttaataggtccgttaataatatgtaaaaaagattcgttagataaagaaaaagaaaaacatatagatcgtgaatttgttgttatgttttcggtagtagatgaaaatttttcgtggtatttagaagataatataaaaacgtattgttcggaaccggaaaaagtagataaagataatgaagattttcaagaatcgaatcgtatgtattcggtaaatggttatacgtttggttcgttaccgggtctatcgatgtgtgcggaagatcgtgttaaatggtatctatttggtatgggtaatgaagtagatgttcatgcggcgttttttcatggtcaagcgctaacgaataaaaattatcgaatagatacgataaatttatttccggcgacgttatttgatgcgtatatggtagcgcaaaatccgggtgaatggatgctatcgtgtcaaaatctaaatcatttaaaagcgggtctacaagcgttttttcaagttcaagaatgtaataaatcgtcgtcgaaagataatatacgaggtaaacatgtacgacattattatatagcggcggaagaaataatatggaattatgcgccgtcgggtatagatatatttacgaaagaaaatttaacggcgccgggttcggattcggcggttttttttgaacaaggtacgacgcgaataggtggttcgtataaaaaattagtttatcgtgaatatacggatgcgtcgtttacgaatcgaaaagaacgaggtccggaagaagaacatctaggtatattaggtccggttatatgggcggaagtaggtgatacgatacgtgttacgtttcataataaaggtgcgtatccgttatcgatagaaccgataggtgtacgttttaataaaaataatgaaggtacgtattattcgccgaattataatccgcaatcgcgttcggttccgccgtcggcgtcgcatgtagcgccgacggaaacgtttacgtatgaatggacggtaccgaaagaagtaggtccgacgaatgcggatccggtatgtctagcgaaaatgtattattcggcggtagatccgacgaaagatatatttacgggtctaataggtccgatgaaaatatgtaaaaaaggttcgctacatgcgaatggtcgtcaaaaagatgttgataaagaattttatctatttccgacggtatttgatgaaaatgaatcgttattattagaagataatatacgaatgtttacgacggcgccggatcaagtagataaagaagatgaagattttcaagaatcgaataaaatgcattcgatgaatggttttatgtatggtaatcaaccgggtttaacgatgtgtaaaggtgattcggtagtttggtatttattttcggcgggtaatgaagcggatgtacatggtatatatttttcgggtaatacgtatctatggcgtggtgaacgacgtgatacggcgaatctatttccgcaaacgtcgctaacgttacatatgtggccggatacggaaggtacgtttaatgtagaatgtctaacgacggatcattatacgggtggtatgaaacaaaaatatacggttaatcaatgtcgacgtcaatcggaagattcgacgttttatctaggtgaacgaacgtattatatagcggcggttgaagttgaatgggattattcgccgcaacgtgaatgggaaaaagaattacatcatctacaagaacaaaatgtatcgaatgcgtttttagataaaggtgaattttatataggttcgaaatataaaaaagtagtatatcgtcaatatacggattcgacgtttcgagtaccggtagaacgaaaagcggaagaagaacatttaggtatattaggtccgcaactacatgcggatgtaggtgataaagtaaaaataatatttaaaaatatggcgacgcgaccgtattcgatacatgcgcatggtgtacaaacggaatcgtcgacggtaacgccgacgttaccgggtgaaacgttaacgtatgtatggaaaataccggaacgatcgggtgcgggtacggaagattcggcgtgtataccgtgggcgtattattcgacggttgatcaagtaaaagatttatattcgggtctaataggtccgctaatagtttgtcgtcgaccgtatttaaaagtatttaatccgcgtcgaaaattagaatttgcgttattatttctagtatttgatgaaaatgaatcgtggtatttagatgataatataaaaacgtattcggatcatccggaaaaagtaaataaagatgatgaagaatttatagaatcgaataaaatgcatgcgataaatggtcgtatgtttggtaatctacaaggtttaacgatgcatgttggtgatgaagttaattggtatttaatgggtatgggtaatgaaatagatttacatacggtacattttcatggtcattcgtttcaatataaacatcgtggtgtatattcgtcggatgtatttgatatatttccgggtacgtatcaaacgctagaaatgtttccgcgaacgccgggtatatggttactacattgtcatgtaacggatcatatacatgcgggtatggaaacgacgtatacggtactacaaaatgaagatacgaaatcgggt

SEQ ID NO: 1600 - DNA, 3195 bp, Artificial Sequence
  derived and/or modified sequence
atgaaaatcttgatattgggtatcttcttattcctttgtagcacgcctgcctgggctaaggaaaagcattactacatcgggattattgagaccacctgggactacgcttccgaccatggcgagaaaaagttgatctccgttgacacggaacactccaacatctacttgcagaacggccccgaccgaatcggtcgattgtacaaaaaggctctctacctccaatacaccgatgaaaccttccggaccacaatcgagaaacctgtgtggctaggcttccttggtcctattatcaaggctgagaccggtgacaaggtgtacgtgcacctgaagaacctagcttcacgtccttacaccttccactcccatggcattacctactacaaagagcacgagggcgctatttaccccgacaatacgaccgatttccagcgtgcagatgataaggtctatccaggagagcaatacacctacatgttgctggctactgaagaacagtcgccgggtgagggtgacggtaattgtgtgacccgaatctaccacagtcacattgatgcacccaaggatatcgcctctggactcatcggtcctttgattatttgtaagaaggatagcttggacaaggagaaggagaagcacatcgatcgcgagttcgtcgttatgttctctgttgttgatgagaatttcagttggtatctggaggacaacatcaaaacatattgctccgagcccgagaaggtggacaaggacaatgaggacttccaggagagcaacaggatgtattcagtgaacggctacaccttcggctctctgcccggtctatccatgtgtgctgaagatcgcgtcaaatggtaccttttcggtatgggaaacgaggtggatgtccatgcggccttcttccatggccaggcgttgaccaataagaactaccgcattgatactatcaacttgttccctgctacgttgttcgatgcgtacatggtcgcacaaaatcccggcgagtggatgctgtcgtgtcagaatctcaaccatctcaaggctggtctgcaagcgttcttccaggtgcaggagtgcaacaagtccagctccaaggacaatatccgtggcaagcacgtgcggcattactacatcgcggctgaagagataatctggaactacgctcccagtggtatcgatatatttaccaaagagaacttgactgcacccggctccgattccgccgtgttctttgagcagggcacgactcgtatcggaggctcctacaagaagctcgtgtaccgtgagtacaccgatgcttcgttcaccaacagaaaggaacgcggacctgaggaagagcacttgggcatccttggtcccgtcatatgggccgaagttggcgacaccatacgcgttaccttccacaacaaaggcgcctaccctctttctatcgagcctatcggcgtccgcttcaacaagaataatgaggggacctattattcgccaaactacaatcctcagtctagaagcgttcctccttccgcctcccatgtagcgcctaccgagactttcacctatgagtggacggtaccgaaagaggtgggccccaccaacgccgaccccgtctgcctggccaagatgtactactcggctgtggaccccacgaaggacatattcaccggcctgatcggacccatgaagatctgtaaaaagggaagtttgcacgcgaacggtcggcagaaggatgtcgacaaggaattctacctgtttcctaccgtttttgatgaaaatgagagcttgctacttgaagacaacatccgcatgttcactaccgcccctgatcaagtggataaggaggacgaggacttccaggagtccaacaagatgcatagtatgaacggcttcatgtacggaaaccaacccggtcttactatgtgtaagggagacagcgtggtatggtatttgttttcggccggtaacgaggcggatgttcacggcatttatttctcgggaaacacgtatctttggcgaggcgagaggcgagacacagctaacctttttcctcagacttcgctgacattacatatgtggcccgacaccgagggcacattcaatgtcgagtgcctgaccaccgaccattacactggcggcatgaagcagaagtatacagtgaaccagtgccgtcggcagagtgaggattcgaccttctatcttggagagcgaacctactacatcgcggccgtcgaggtcgagtgggactactcacctcagcgtgagtgggagaaagaactccaccacctccaggagcagaacgtgtcgaatgccttcctcgataagggcgagttctacattggaagtaagtacaaaaaagtcgtataccgtcagtacacggactccacgttcagggtccccgtcgagcgaaaggcggaggaggagcaccttggcattcttggaccccaactgcacgctgacgttggtgataaggtcaagatcattttcaaaaacatggccacgcgcccttactccatccacgcacacggagtgcagacagaatccagtaccgttacgccaactctgcccggtgagaccctcacctacgtatggaagatcccggaacggtctggtgctggcaccgaagactccgcgtgtattccgtgggcctactactccaccgtcgaccaggtgaaggacttgtatagcggtctcattggacctctgatcgtgtgcagacgcccctatttaaaggtttttaatccccgccgtaagcttgaattcgccctgttgttcttggttttcgatgaaaatgagagctggtacctggacgacaatatcaagacttactccgaccaccctgagaaggtcaacaaggacgacgaagagttcattgagtctaataagatgcacgccataaacggccgtatgttcggtaatctccagggcctgaccatgcacgttggagacgaagtcaattggtaccttatgggtatgggcaacgagatcgacctccataccgtccacttccacggccactcattccagtacaagcaccgcggtgtgtacagttctgacgtcttcgacatctttccgggtacgtatcagacccttgagatgttcccgaggacacctggtatctggttgctccattgccacgtcaccgatcatattcatgccggcatggaaacgacttataccgtgctccaaaatgaggataccaagtctggc

SEQ ID NO: 1601 - DNA, 3195 bp, Artificial Sequence
  derived and/or modified sequence
atgaagatccttattctgggtattttcctgtttttgtgcagtacacctgcatgggcaaaggagaagcattactacatcggtatcattgagaccacctgggactacgccagtgatcacggtgagaagaagctgatttccgtggacactgaacacagcaacatctacctacagaatggtccggacagaattggtcggctgtacaagaaagccctatacttgcaatataccgatgaaactttccgtaccaccattgagaagccggtttggcttggcttccttggacccatcatcaaagccgagaccggcgataaggtgtacgttcacttgaagaacctggcctcacggccctacaccttccacagccacggcataacatattacaaggagcatgagggtgctatttaccccgataacaccacagatttccagcgcgccgatgataaggtgtatcccggcgagcagtacacctacatgcttctggctacagaggagcagagcccaggagagggcgatggcaattgcgttaccaggatctatcattctcatatcgacgccccgaaggatattgcttcgggtttgatcggacccctgatcatttgcaagaaagattcactcgataaggaaaaagagaagcacatcgatcgcgaatttgtcgtgatgtttagtgtggtcgatgaaaacttcagttggtatttggaagataacattaagacctactgctcggaacccgagaaggtcgataaagacaacgaggacttccaggagagtaatcgcatgtatagtgtcaacggatatacgttcggatctctgcccggactttccatgtgcgccgaggaccgtgtgaaatggtatttgttcggcatgggaaacgaagtggatgtccatgccgccttcttccacggccaggcactcacgaacaagaattatcgcatcgacaccataaacctctttcctgctacactttttgacgcttatatggtcgcacagaaccccggcgagtggatgttatcgtgccagaatctgaatcacctgaaggccggcttgcaggccttcttccaggtccaagaatgcaataagtctagttccaaggacaacatccgcggaaagcacgttcgccactattacatagccgctgaagagatcatatggaattacgcaccgtcaggaattgatatattcacgaaagaaaacctgactgccccaggaagcgatagcgccgtgttcttcgagcaaggaaccaccagaataggcggatcatacaagaagctcgtgtaccgggagtacacagatgcctccttcaccaaccgcaaggagagaggaccggaggaagagcacctcggcatcctgggaccggttatttgggccgaggtgggagatacgatcagagttacattccataacaagggtgcctacccattgtcaatcgagccgatcggcgtgcgctttaacaagaacaatgagggtacttattactccccgaactataatccacagtcacgaagtgtgccccccagtgcgagtcacgtcgcgccgaccgaaactttcacttatgaatggactgtgccgaaggaagtgggtcctactaacgccgatccggtgtgcctggccaaaatgtactactccgccgtggaccctacaaaggatatctttaccggtctgatcggcccgatgaagatctgcaaaaagggctccctgcatgctaacggacgacagaaggacgttgacaaggagttctacctcttcccaactgtgtttgacgagaatgagtctttgctgctggaggataacattcgaatgttcaccactgcccccgatcaggtagataaggaagacgaagactttcaggaaagcaataagatgcacagcatgaatggctttatgtatggaaatcagccaggtttgaccatgtgtaagggggactctgtggtctggtacttgttttccgccggaaacgaggccgatgtgcatggcatatatttctccggaaacacgtacttgtggcgcggtgagcgccgagatactgcgaatctgtttcctcagacgagccttaccctgcatatgtggccagacaccgaggggacgttcaacgtggaatgcctgacaacagatcactataccggaggtatgaaacagaaatacaccgtcaatcagtgccgtcgccagagcgaggactcaacattttacctgggagaaagaacgtattacattgccgcagtcgaggtggagtgggactatagcccccagcgggaatgggaaaaggagttacaccatctccaggaacagaacgtatccaatgccttcttagataagggagaattttacatcggtagcaaatacaagaaggtcgtataccgccaatatacggattctactttccgggttcccgtggaacgaaaggccgaggaggagcacttggggatcctgggtccccagctgcacgctgatgtcggtgacaaggtgaagattatcttcaaaaatatggcgacacggccctactccattcacgcccatggtgtccagactgagtcatcgaccgtcaccccgaccttgccgggagaaaccttgacatatgtttggaagattccagagcgctcaggcgccggcactgaagactcggcgtgcatcccatgggcgtactactcgacggttgaccaggtgaaggatttgtactcgggcctaatcggcccattgatagtttgccgtcgtccttacttgaaggtttttaacccacggcgcaagctggaattcgctctgttgtttctagtgttcgacgagaacgagtcctggtacctagatgacaacattaagacctactccgatcatccagaaaaagttaataaggacgatgaggagtttatagagagcaataagatgcatgccatcaacggacgtatgttcggcaatctccaaggtctcactatgcacgtgggcgatgaggtgaactggtacctgatgggcatggggaacgagattgatttacacacggtccacttccatggtcactcattccagtacaagcaccggggggtgtactcctcggacgtgtttgatatttttcctggtacctatcagaccctggagatgttcccacgaacacccggcatctggctgttacactgccatgtcaccgaccatatccacgccggcatggagactacctatacggttctacaaaacgaggatacaaaatcgggc

SEQ ID NO: 1602 - DNA, 3195 bp, Artificial Sequence
  derived and/or modified sequence
atgaaaatactgatcctagggattttccttttcttatgctctacaccagcatgggctaaggaaaaacattactatatcggaataattgagaccacttgggattacgcttctgatcacggggagaaaaagcttatctctgtcgataccgaacactcaaatatctatttgcagaacggaccggatcgaatcggaagactttataaaaaggctctctaccttcaatatactgatgagacatttagaactacaatcgagaagccggtttggttaggattccttggacctataatcaaggctgagacaggagacaaggtctatgttcacctgaagaatttggcttccagaccttatacattccacagtcacgggatcacatattataaggaacatgagggtgctatttacccagataacacaacagacttccagcgtgctgacgacaaagtctatcctggggagcagtacacgtacatgcttcttgctaccgaggaacaatcacctggtgagggcgatgggaattgtgttactcgaatctaccattcccacatcgatgcaccgaaggatatagcgtccggtctcatagggccattgattatctgcaagaaagactcgttagataaggaaaaagagaaacatatagatagagaatttgttgttatgtttagtgttgttgatgaaaattttagctggtatctcgaagacaacattaagacttactgttccgaacctgagaaggtagacaaggataacgaggatttccaggagtctaaccgtatgtactcagttaacggatatacatttggctctcttccaggtctgtctatgtgcgccgaagatcgtgtaaagtggtaccttttcggaatgggtaatgaggtagacgttcacgctgcattctttcatggtcaggcacttactaataagaattataggattgatactataaatctgttccctgctacattattcgatgcttatatggtagcacaaaatccgggagaatggatgttgtcatgccaaaatttaaaccacctgaaggcaggtcttcaagcttttttccaagttcaagagtgtaataagtcctcgtctaaggacaacattcgaggtaagcatgtcaggcattattatatcgctgctgaggagatcatctggaattacgccccttctggtatcgacatattcaccaaggaaaaccttacggcacccggctcagactctgctgtgttcttcgagcagggtaccacacggattggtggttcttacaaaaagcttgtttaccgagagtacacagatgcttcctttacaaatagaaaagagagggggcccgaggaggagcatcttggtatcctgggccctgttatttgggctgaagtcggagacacgataagagtcacctttcataacaaaggtgcttatccattgtccattgagcctatcggtgtgcggttcaacaaaaacaacgagggcacttactattcaccaaactacaatccacagtctcgctcggttccaccatccgctagccacgttgctcccaccgaaacttttacctatgagtggacagtgcctaaagaggttggtccaacaaatgccgaccctgtatgcctggctaagatgtactactcggctgttgaccccactaaagacatttttacaggtcttataggtccaatgaaaatttgcaaaaagggatctttgcatgccaatggtagacagaaggatgttgacaaagagttttacctgttccctactgttttcgatgaaaacgaatcactattgttggaggataacattagaatgtttacgacagctccagaccaggttgataaggaagacgaagattttcaagagtcaaacaaaatgcattctatgaatggattcatgtacggcaaccagcctggtctgactatgtgcaagggagattcagttgtttggtacctcttctcagccggtaatgaagctgatgtccatggcatctacttctcagggaatacctacttgtggagaggagagaggcgtgatacagcaaacctttttccacagacaagtcttacgctccatatgtggcctgacacagaaggtactttcaatgttgagtgccttactacagatcattatactgggggtatgaaacagaaatatacggttaaccagtgtagacgacaaagtgaagatagtactttttatctgggggaacgtacatactacattgcagccgttgaagtggaatgggattactccccacagagggaatgggaaaaggaacttcaccatcttcaagagcaaaacgtgagcaatgcattccttgataaaggggaattctacattgggagcaagtacaaaaaagtcgtgtaccgccaatacacagatagcactttcagagtaccagtcgaaagaaaggcggaagaggagcatcttgggattcttggtccgcagttgcatgcagatgtgggagacaaggttaagatcatatttaagaacatggctactcgtccttattccattcatgcacacggagttcagactgagagctctacagttactcctacgctcccaggagagacattaacctacgtttggaagatcccggagcgctcgggagctgggactgaggattcggcctgcatcccatgggcctactactcaactgttgaccaagtaaaggacctatactcagggctaatcgggcctcttattgtttgccgacgtccttatttgaaggtctttaatccacgtcgtaagcttgaatttgcccttcttttcttggtcttcgatgagaatgaatcttggtatctagacgataacatcaaaacttattctgatcatcctgagaaggtaaataaggatgatgaagaatttatcgagtcaaataagatgcacgctatcaacggaagaatgttcggcaacctgcagggcttgaccatgcatgtaggtgatgaggttaattggtatctcatggggatgggtaatgagatcgatttacataccgttcattttcatggacactccttccagtataagcataggggggtttattcctcagatgttttcgatatattcccaggaacctaccagacactggaaatgttccctagaacacctggaatatggttgcttcactgtcatgtgacggatcacattcatgctggtatggaaactacttatacagtgttgcaaaacgaggatactaagtccgga

SEQ ID NO: 1603 - DNA, 3195 bp, Artificial Sequence
  derived and/or modified sequence
atgaagattctcattctcggaatctttctgtttctctgcagcacccctgcgtgggcaaaagagaaacattactacattggtatcattgaaaccacctgggattacgcatcggatcatggagaaaagaagttgatttcagtggatactgagcattcaaatatctacctgcaaaacggaccagatagaatcggacgactttacaagaaagcgctgtacctgcaatacaccgatgagacttttagaaccaccattgaaaagcctgtatggttgggcttccttggaccgatcattaaagcagaaactggagataaagtgtacgtccatcttaagaaccttgccagccgcccttacacttttcatagtcacggaattacttactacaaggagcatgaaggggcgatttaccctgacaatactacggatttccaacgtgccgatgataaggtctaccccggcgaacaatatacctacatgctccttgcaactgaagagcagtcaccaggggaaggtgatggaaattgcgtgactcggatttaccattcgcatatcgatgcccctaaggatatcgcctccggactgattggtccactgatcatttgtaagaaggattcgctggacaaggagaaagaaaagcatattgaccgcgagttcgtcgtgatgttctcggtcgtggatgagaatttcagctggtacctggaagataacatcaagacctactgctcggagccagaaaaggtggataaggataacgaggatttccaagaaagcaaccgtatgtactccgtgaacggctacactttcggtagcctgcctggcctctcgatgtgcgcagaggatagggtgaagtggtacctgtttgggatgggaaatgaagtggacgtgcacgcagcgttttttcatggacaagccctgaccaataagaattaccggattgataccattaatctttttccagcgactctctttgacgcctacatggtcgcacagaacccgggagaatggatgctctcctgtcagaaccttaaccacctcaaggcaggactccaagcattctttcaggttcaagagtgcaataagtcatcatctaaggacaacatacgaggaaagcacgtccgccactactacattgcagcggaagaaatcatctggaattatgcaccaagcggaatcgacatctttactaaagaaaatctcactgcccccggtagcgactccgccgtcttttttgaacagggaaccactcggattggaggatcatacaagaaactggtgtacagagagtacactgatgcatcattcaccaatcgcaaggagcgtggtccagaagaagagcatctgggaatccttggcccagtcatttgggcagaagtgggagataccattagggtgactttccacaacaaaggtgcataccctttgtccattgagccgattggagtgcggttcaataagaacaatgaggggacttactactcgcctaactacaacccccagagcagatcagtgccgccatctgcatcccacgtcgcacccaccgagactttcacctacgagtggaccgtgccgaaagaagtcggcccaactaacgcagatcccgtgtgtcttgcaaagatgtattactccgccgtggaccctaccaaggacattttcaccggtcttataggtcccatgaagatttgtaaaaaggggagcctgcacgcaaatggtcgccagaaggacgtggataaggaattctaccttttcccaactgtgtttgatgaaaatgagagcttgctccttgaagataacatacggatgtttactactgcacctgaccaagtggacaaagaagatgaagatttccaagagtcaaacaagatgcatagcatgaacggtttcatgtacggtaaccaacccgggctgactatgtgtaaaggtgactcggtggtgtggtacttgttttccgcaggaaacgaagcggacgtccatggcatttacttctccggtaacacttatctttggcgaggggagagaagagataccgcaaacctgttcccccaaacctccctgacccttcatatgtggccagataccgagggaacctttaacgtggagtgcctcaccaccgatcactataccggaggaatgaagcagaagtacacggtcaatcagtgtcggaggcagtcagaggactcgaccttctaccttggtgagcgtacgtactacattgccgcggtcgaggtggagtgggactactcacctcagagggaatgggagaaggaactccaccatctccaagaacaaaacgtgtctaacgcgtttttggataagggtgagttctatattggttccaagtataagaaagtggtgtaccgtcagtacaccgactcaacctttcgggtgccagtggaacgaaaggcagaggaagagcaccttggaatccttggaccccagcttcatgccgacgtgggagacaaagtcaagattatcttcaagaacatggcgactagaccctattcgatccacgcacatggagttcaaactgaatcgagcaccgtgactccgactcttccaggggaaactttgacttacgtgtggaagattccagagcgcagcggggcaggtaccgaggactcggcgtgtattccatgggcatactattcaactgtggaccaagtcaaggacctgtactccggcctcattggtcctctcatagtgtgtagaaggccttacctcaaagtgtttaaccctagaagaaaacttgaatttgcattgctgttccttgtgttcgacgaaaatgagtcatggtacctggacgacaacatcaaaacctactcagatcatccagagaaggtcaataaggatgatgaagagttcatcgaaagcaataagatgcatgcaatcaatgggcggatgtttgggaaccttcagggactgactatgcacgtcggtgatgaagtgaattggtaccttatgggtatgggtaacgagattgatctgcataccgtccacttccacgggcattcatttcaatacaaacacaggggagtgtactcatctgacgtgtttgatatcttccctggaacttatcagaccctggaaatgtttcctcgcacccctggtatatggctgcttcactgtcacgtcactgatcacatccatgctggaatggaaactacctacactgtgcttcaaaacgaggatacgaaatcggga

SEQ ID NO: 1604 - DNA, 3195 bp, Artificial Sequence
  derived and/or modified sequence
atgaagattctgatattgggcattttcctgtttctgtgtagcacgccagcatgggcgaaggagaaacattactacatcggtatcatcgaaaccacttgggactacgcatcggatcatggcgaaaagaagctcatctcggtggatactgaacactcaaacatatacttgcaaaacggacctgaccgcatcggacggctttacaaaaaggcattgtacctgcagtacactgatgaaaccttcagaactaccattgaaaaacctgtgtggcttggattcctggggccgatcattaaggctgaaaccggtgacaaagtgtacgtccatctgaagaacctggcatcacggccttacacgttccactcccacggcatcacttactacaaggaacatgaaggggcaatttacccggataatactaccgattttcagcgagcagatgataaggtctacccaggggaacaatacacttacatgctgctggctactgaagagcaatcccccggagaaggagatggaaactgcgtcacgagaatataccacagccatattgatgcaccgaaggatattgcaagcggtttgatcgggccattgattatctgtaagaaggattcgctggataaggaaaaagagaagcacattgatagggaatttgtcgtgatgtttagcgtggtggatgaaaacttctcgtggtaccttgaggataacattaagacctactgcagcgaacccgaaaaagtggacaaggacaacgaagatttccaagaaagcaacagaatgtacagcgtcaacggatacacctttggtagcctgccgggactctctatgtgtgcagaagatcgggtcaaatggtacctttttggtatgggaaacgaggtggatgtgcatgccgcctttttccacggacaggcgcttactaacaagaattacagaatagatactattaacctgttcccagcgaccctgtttgacgcatatatggtggcccaaaatcctggcgaatggatgctgtcctgccaaaatctcaatcatctgaaagcaggcttgcaagcgttctttcaagtccaggagtgtaataagtcaagctcaaaggacaatatacgtggaaagcatgtgcgtcactattacattgcagctgaggagatcatttggaactacgctccctcgggaattgacatattcaccaaagagaaccttaccgcgccgggttcagactcggcggtgttctttgaacaaggaaccactagaatcggcggatcgtacaagaagctggtctacagagaatacaccgatgcatcgttcacgaaccggaaggagaggggtcccgaagaggagcatctgggaatcctcgggcctgtgatttgggccgaagtgggcgacaccattcgcgtcacctttcacaataagggggcgtacccgctgtccatcgaaccgataggagtgcgctttaacaagaacaatgagggcacctactactcccccaactacaacccacagtcacggtcggtccctccttcggcatcacatgtggccccgactgaaaccttcacgtatgagtggaccgtgccaaaagaggtgggcccaaccaacgcagacccggtttgtctggccaaaatgtactactcggcagtcgatcccactaaagacattttcaccggactgattggtcctatgaagatttgtaagaagggctcgctgcatgcaaacggtaggcaaaaagatgtggataaagaattctacctttttccaactgtctttgatgaaaacgaatccctgctgctggaggacaatattcgtatgtttacgaccgcgccagatcaggtggacaaagaggacgaggattttcaagagagcaataagatgcactccatgaatggcttcatgtacggtaaccaacctggacttactatgtgcaaaggcgactcagtggtgtggtacctgtttagcgcaggaaacgaagcagatgtgcatggcatctacttttctggtaatacttacttgtggagaggggaaagacgagataccgccaacctgtttcctcaaacctccctcaccctccatatgtggccggatactgagggtactttcaacgtggaatgtcttactaccgatcactataccgggggtatgaagcagaagtacactgtgaaccaatgtagacggcagtccgaagattcgactttctatctgggggaacggacgtactacatcgctgctgtcgaagtggaatgggattattctcctcagagagagtgggaaaaggagcttcatcatctccaagagcagaatgtgagcaacgcattcctcgacaagggagagttttacatcggaagcaagtacaaaaaagtggtctaccgccagtacaccgattctacttttcgggtgccagtcgaaaggaaagcagaagaagagcatctgggcatactgggcccccaactccatgccgatgtcggggacaaggttaagatcatctttaagaatatggcaacgcggccttactcaatccacgcccacggggttcagactgaatcgtcaaccgtgacgcctactctccccggagaaactctcacctacgtttggaaaattccggagagatccggagccggcaccgaggactccgcatgtatcccttgggcctactactcgactgtcgatcaagtgaaggacctttactccgggctcattggacctctcattgtttgccgcaggccataccttaaggtctttaacccgcgacgtaagctggaatttgctcttctctttctggtgtttgatgagaacgaatcatggtaccttgatgataacatcaagacctattccgatcatcccgagaaggtgaacaaggacgatgaagaattcatcgaatcgaataagatgcatgcgattaatggccgtatgtttggaaatctccaaggactgaccatgcatgtgggtgacgaggtgaactggtatcttatgggtatgggaaatgagatagacctgcacaccgtgcattttcacggtcattcgtttcagtacaagcacagaggagtgtacagctccgacgtgtttgacattttcccgggtacttatcaaaccctcgaaatgtttcctcgaacgcctggaatttggctgctgcattgccacgtgactgatcacatccatgcaggtatggaaactacgtacaccgttcttcagaatgaggacactaaatccggt

SEQ ID NO: 1605 - DNA, 3195 bp, Artificial Sequence
  derived and/or modified sequence
atgaagatccttatactcggaatcttcctgtttctgtgctcgaccccagcatgggcaaaagaaaaacattactacatcggaatcattgaaaccacctgggattatgcatccgatcacggtgagaaaaaactgatttctgtggatactgagcattctaacatttacctgcagaatggccccgatagaattggacgcctttacaagaaggcactttacctgcagtataccgatgaaacctttcgtaccaccattgaaaaaccagtttggctgggctttctggggcctataatcaaggcagagactggagacaaggtctacgtacacttgaaaaaccttgcgagccggccatacaccttccattcccacggcattacttactataaggaacatgaaggtgctatttacccggataacaccaccgattttcaaagagcagacgacaaggtgtacccaggagagcagtacacgtacatgcttctcgcgactgaagaacagtcaccgggcgaaggagacggaaactgtgtgaccagaatttaccatagccacattgacgccccaaaggatatagcctcgggtctgattggacctcttatcatttgtaagaaagattctctggataaggaaaaggagaagcacatcgaccgtgaattcgtcgtgatgttttccgtcgttgacgaaaacttctcctggtacctggaggacaacattaagacttactgttccgaacctgaaaaggtcgataaggataacgaagatttccaagagtcgaaccgcatgtacagcgttaacgggtatacttttggatctctcccaggactgagcatgtgcgcagaagatagagtgaaatggtacctgtttggtatggggaacgaagtagacgtgcatgcagcattcttccacggccaggcactgactaataagaactacagaatcgacactattaacctctttccagcaactctgttcgacgcctacatggtggcccagaatcctggagaatggatgttgtcgtgccagaacctgaatcatctgaaggcaggcctgcaagcatttttccaggtgcaggaatgcaacaagagctcgtccaaagataacatccgcggtaagcatgtccgtcactactatattgcggcagaggaaatcatttggaactacgcccctagcggaattgacattttcactaaggagaatcttacggctccaggttcggatagcgccgtgttctttgaacagggtaccacgcgcattggcggtagctacaaaaagctcgtgtaccgggaatacactgacgcttccttcacgaaccgcaaggaacgcgggcctgaggaggagcatctgggcattctgggccctgtgatttgggcagaggtgggggatactatccgagtgaccttccataacaagggagcataccccctgtctattgagcccataggtgtgcggttcaataagaacaatgaaggaacctactacagtcctaactacaatccacagtcgaggtccgtgcccccatcggcttcccacgtggcacctactgagactttcacctacgagtggaccgtacctaaagaagttgggcccaccaacgccgatcccgtgtgcctggctaagatgtattactcagcggtggaccctaccaaggacattttcacgggactcataggaccaatgaaaatctgtaagaaaggatcgctgcatgcaaatggtcgccaaaaggatgtggataaggagttctacctctttcccaccgtctttgacgagaacgaatcccttctccttgaagataacatcaggatgtttaccactgcgcccgaccaggtggataaagaagatgaggattttcaagagagcaacaagatgcactcaatgaacggatttatgtacggtaatcagcccgggcttaccatgtgtaagggagattctgtggtctggtacctcttttcagcgggaaatgaagcggatgtgcatggaatatacttttcaggtaacacctacctgtggaggggagagcgtcgagacactgccaacctgtttccccagacctcactcacccttcatatgtggccagacactgaaggaacctttaatgtggaatgcctgactaccgatcactacaccggaggcatgaagcagaagtacaccgtcaatcaatgtaggagacaaagcgaagattccacgttctaccttggggagcgtacctactacatagctgcggtcgaagtcgagtgggattactcccctcaaagagaatgggagaaggaattgcatcatctgcaagaacaaaatgtctctaacgcattcttggataagggggaattctacataggttctaagtacaagaaagtcgtctaccgccagtatactgactcaaccttcagagtgccagtcgagagaaaggcagaagaagagcacctgggtattctcggacctcaactgcacgcagacgtcggtgataaagtgaagatcatattcaagaatatggccactaggccctactccatccacgcgcatggggtgcagactgaatcctcaactgtgacccctacccttccaggagaaaccctcacctatgtgtggaaaataccggaaagaagcggagcaggtacggaagattccgcctgtattccgtgggcatattactcaactgtggatcaggtgaaggatctctattccggacttatcggtcctttgattgtctgtagaaggccttacctcaaagtgtttaatccacgaagaaaacttgagtttgcacttctttttctcgtgttcgacgagaatgagtcgtggtacctggatgataacataaagacttactcagaccatccggagaaagtgaataaagatgacgaagagtttattgagtcgaataagatgcatgctatcaacggtcgcatgtttggaaaccttcaaggcctcactatgcatgtgggtgacgaagtcaactggtacctgatgggaatggggaatgaaatcgatctgcacactgtgcatttccatggccactcatttcaatacaagcataggggcgtgtactcatcagatgtgtttgatatctttccaggaacgtaccagacccttgaaatgtttccacggacgccaggaatttggttgcttcattgtcatgtgacggatcatatccacgcaggtatggaaaccacgtacaccgtgctgcaaaacgaggacacgaaaagcggg

SEQ ID NO: 1606 - DNA, 3195 bp, Artificial Sequence
  derived and/or modified sequence
atgaagattctaatcctagggatcttcttgttcctgtgtagcactccggcttgggctaaagagaaacactattacattggcataatcgagaccacgtgggattatgccagcgaccacggcgaaaagaaactcatttccgtcgatacagagcatagtaatatctacctgcagaacggcccggaccggatcggcaggctttataaaaaggcactgtacctgcagtacacagacgagacattccggacaacaattgaaaagccggtatggctgggtttcctcggtcccattattaaggcagaaactggcgataaggtgtacgtacacttgaagaatctggcatccaggccatatactttccattctcacgggataacctattataaggaacacgaaggcgccatttacccagacaacacaactgactttcagagagcagatgataaagtttaccccggggaacagtacacgtatatgctactagcaacagaggagcagagtcctggagagggagacggaaactgtgttaccaggatttatcacagccacatcgacgctcccaaagatatcgcatccggcctgatcggtccactgattatttgcaagaaggactccctggacaaggagaaagagaagcacatcgatcgggagttcgtggtcatgttctcagtagtggatgaaaatttttcttggtatttggaggacaatataaaaacctattgctcagagccggagaaggtggacaaggacaacgaggatttccaagagtctaatcggatgtattcagtcaatggatatactttcggctccctgccaggactgtccatgtgcgctgaggaccgggtcaaatggtacttattcgggatgggcaatgaagtggacgtgcacgccgcattcttccacggacaagcactgacgaacaagaattataggatcgatacaattaaccttttcccagctacactcttcgacgcatacatggtagcccagaaccccggagagtggatgttgagctgccagaatctgaaccacctcaaggcaggcctccaggcattcttccaggtccaggagtgcaacaaatcttcaagtaaagataatatccgtgggaaacatgtgagacactactatatcgccgcagaggagatcatctggaactatgccccatccgggatcgacatcttcactaaggagaatctgaccgctcctgggtccgattcagcagtgttttttgaacaagggaccacccggataggcggttcttacaagaagctggtgtacagggagtacaccgacgcctcctttacaaaccgaaaggaacggggccctgaagaagaacaccttgggatactgggccctgtgatctgggccgaagtgggagatactattagggtgactttccacaacaaaggggcttatcctctgagcatagagcctatcggagtgaggttcaataagaacaacgagggcacctattattcgccaaactataatccacagtctcgcagcgtgcctccctccgcgagtcacgttgcacctacagagacgttcacctacgagtggaccgtgcccaaagaagtaggacccaccaatgccgaccccgtgtgtctggccaaaatgtattattctgctgtagatcccactaaagatattttcacaggtctgataggacctatgaagatctgcaagaagggatcgctccacgccaatggacgacagaaggatgtggacaaggagttctacctgtttcctacagtgtttgatgaaaatgaatctcttctgctggaggataacatcaggatgtttactaccgcaccagatcaggtcgacaaagaagatgaggactttcaagaaagtaataagatgcactcaatgaacgggtttatgtatggaaatcaaccaggcctcactatgtgcaagggcgactccgtagtatggtatctattttccgccggcaacgaggctgatgtgcatgggatttacttcagcggcaacacttacctgtggaggggggaaaggagggataccgcaaatctattccctcagacttcacttacactgcacatgtggcctgacaccgaagggacattcaacgtggagtgcctgaccacagaccactacacaggaggtatgaagcagaagtatacagtaaatcagtgtcggaggcaatctgaagactcaacgttttacctgggagagcgaacttactatattgctgctgtggaagtggaatgggattactcccctcaaagggagtgggagaaggagctgcatcacttgcaagagcaaaacgtatcaaacgcatttttggacaaaggggaattctatattggttccaagtacaagaaggtggtctaccgccagtacaccgatagtacttttagggttccggtggagagaaaagccgaagaagagcatctgggcatcctggggccgcagctacacgctgacgttggcgataaagtgaagataatctttaagaacatggctacccggccctattccatccatgctcatggggtccagaccgagagttccaccgtgacacccacccttccgggcgagacgctgacctacgtttggaagataccagaacgttctggagccggtactgaggactccgcatgcatcccgtgggcctactacagtacagttgatcaggtaaaggatttgtatagcggcctgataggtccgttgatcgtctgcaggaggccatatctgaaggtattcaacccacggcggaagttagagtttgctcttctgttccttgtattcgacgaaaacgaatcctggtacctggacgacaacataaaaacatatagcgatcaccccgagaaggttaacaaggatgatgaggagtttatagagagcaacaagatgcacgccataaacggccgtatgttcgggaatctacaagggctaacaatgcacgtcggtgacgaggtgaactggtacctgatggggatgggtaacgagattgacctccacacggttcatttccacggtcacagcttccagtacaagcatcggggtgtttattcctccgacgtgttcgatatatttccaggtacttaccagacgctggagatgtttccacgaacaccaggcatctggctactgcactgccacgttactgatcacatccacgccgggatggagactacctatacagtactgcaaaacgaggatacaaagtccgga

SEQ ID NO: 1607 - DNA, 3195 bp, Artificial Sequence
  derived and/or modified sequence
atgaagatcctcatactcggaatcttcctcttcctgtgctccaccccggcgtgggcgaaggaaaaacattactacatcgggatcatcgaaactacctgggactacgcgtcagaccacggagaaaagaagctcatctccgtggacactgagcacagcaacatctacctgcaaaacggccccgacagaatcgggaggctgtacaaaaaagccctgtacctgcagtacaccgatgaaaccttccggactaccatcgagaagccggtctggctggggttcctggggcctattatcaaggccgagactggtgataaggtctacgtgcacctgaaaaacctggcttctaggccgtacacgttccactcgcatggaatcacctactacaaggagcacgagggagccatatacccggataacaccaccgacttccaaagagccgatgataaggtgtacccgggcgaacagtacacctacatgctgctggcaactgaggagcagtcccccggggaaggggacggcaactgcgtgacccgaatctaccactcacacatcgacgcccctaaagacatcgcctcgggcctgatcggcccgctgatcatctgcaaaaaggattccctggataaagagaaagaaaaacacattgatagagagttcgtggttatgttctccgtcgtagatgaaaatttctcgtggtaccttgaggacaatattaagacctactgttccgagcccgagaaagtcgacaaagacaatgaggacttccaggaatcgaaccgcatgtactcggttaacggctatactttcggaagcctgccgggtcttagtatgtgcgcagaagatagggtgaagtggtacttgtttggtatgggaaacgaagtcgacgtccatgcggcattcttccacggacaggccttgactaacaaaaactacagaatcgatactatcaatcttttcccggcgaccctcttcgacgcttacatggtggctcaaaaccctggcgagtggatgctgtcatgtcagaacctcaatcacctcaaggccggattgcaggccttcttccaggtccaagagtgcaacaagagctcgtcaaaggataacatcagaggaaagcacgtcagacactactacattgcagctgaagagatcatctggaactacgcgccgtccggaatcgacattttcactaaggaaaatctgactgctcccggatcggactccgccgtgttctttgaacaaggtactacccgcattggaggatcatacaagaagctcgtgtaccgcgagtacactgacgcatctttcaccaaccggaaggagcgcggccctgaggaagaacatcttggaatcctcggaccggtgatctgggcggaagtcggcgataccatccgcgtgacgtttcacaacaagggcgcataccctcttagcatcgaaccgatcggagtgcgcttcaataagaataatgaaggtacttactactcacccaattacaacccacaatccaggtcggttccaccaagcgcctcgcatgtggccccaactgaaacgttcacctatgagtggaccgtcccgaaagaagtgggtccaactaacgcggaccctgtgtgcctggccaagatgtactacagcgccgtcgacccgaccaaggacatctttaccggattgattgggccgatgaagatctgcaagaagggctcgctccacgcgaatggtcgccagaaggatgtggacaaagaattctacctgtttccaactgtgttcgacgagaatgagtccctcctgttggaagataacattagaatgttcactaccgctcctgatcaagtggacaaggaggacgaagattttcaggagagtaacaagatgcattcgatgaacgggttcatgtacggtaaccagccaggacttaccatgtgcaagggagactcagtggtgtggtacctcttctcggccggtaatgaagccgacgtccacggaatctacttctcaggaaacacgtacctgtggcggggagagcgtagagataccgcaaacctcttcccacagacctctctcactctgcacatgtggcctgataccgaaggaactttcaatgtggaatgcctgaccaccgaccattataccggcggcatgaagcagaagtacaccgtgaatcagtgtcggcgccagtcggaggatagcaccttttaccttggagagcgaacttactatatcgcggccgtggaagtggaatgggactactcgccgcaacgggaatgggaaaaggaactgcaccacctgcaagaacaaaacgtgagcaacgctttcttggacaaaggcgaattctatatcggctcaaagtacaaaaaggtggtgtaccggcaatataccgacagcacttttagggtgccagtcgagcggaaagccgaggaagagcacctcggaattctcgggccccagctccacgctgatgtgggagataaagtgaagatcatcttcaagaatatggcgactcggccgtactccatccatgcacatggagtgcagactgagtcgagcaccgtgactccgactctgccgggagagactctgacttacgtgtggaagatccctgaacgctccggggcaggaacggaagattcagcctgcatcccgtgggcatactacagcactgtcgaccaggtcaaggacctgtacagcggactgatcggacctctgattgtgtgtcgccggccatacctgaaggtgttcaacccgcgccggaaactcgaatttgccctgcttttcctggtgttcgatgaaaatgaatcatggtacctcgatgacaacatcaaaacgtatagcgaccatccagaaaaggtgaataaagacgatgaggaatttattgaatccaataagatgcacgctatcaacgggcgcatgtttggcaacttgcagggactgaccatgcacgtcggcgacgaggtcaactggtatctgatgggcatgggtaatgagatcgacttgcacaccgtgcattttcatggacattcctttcaatacaagcatcgcggagtctactcctcggacgtgttcgacatctttccgggaacctaccagaccctggagatgtttccccggactccaggcatttggctgctccactgccatgtcacggaccatatccacgcggggatggaaaccacgtacactgttctccagaacgaggatacgaagtccgga

SEQ ID NO: 1608 - DNA, 3195 bp, Artificial Sequence
  derived and/or modified sequence
atgaagatcctgattctgggaatctttctgtttctgtgctcaacgccggcatgggcgaaggaaaaacactattacatcgggatcattgaaactacttgggattacgcgtcggaccatggagagaaaaaactgatctccgtggatactgaacacagcaacatctaccttcagaacggacctgatcggatcggaaggctgtacaagaaggctctctacctccaatacaccgatgagacgtttcggaccaccatcgagaagccggtgtggctgggattccttggccctatcatcaaggctgaaactggcgacaaggtctacgtgcatctgaaaaacctggcttcacgcccctacaccttccactcacacggaatcacctactacaaggaacacgagggagctatctacccggacaacaccaccgactttcagcgggccgatgataaggtgtacccgggagagcagtacacttacatgctgctggctactgaggagcagtccccgggtgaaggcgacggcaattgcgtgactcgaatctaccacagccatatcgacgcgcctaaggacatcgcgtcaggcctgatcgggccgttgatcatctgtaagaaagattcgttggacaaggagaaggagaagcacatcgaccgcgaatttgtcgtcatgttctccgtggtcgatgagaacttctcatggtacctggaagataacatcaagacctactgttccgagcctgaaaaggtggacaaggacaatgaggacttccaagagagcaatcggatgtacagcgtgaacgggtacactttcggatcgttgccaggactgtccatgtgtgccgaggaccgcgtgaagtggtacctgtttggcatgggaaatgaggtggacgtgcacgcggccttcttccatggacaggcgctgactaacaagaactaccggatcgatacgattaatctgttcccagcaaccctgttcgacgcctatatggtggcccagaatcctggagaatggatgctgtcatgccagaacctcaaccatctgaaggctggactgcaagccttcttccaagtgcaggaatgcaacaaaagcagcagcaaggacaacatccgtgggaagcacgtgaggcattactatattgccgcggaggagatcatatggaactacgctccgtcaggcattgatatcttcactaaggagaacctgaccgccccaggttccgacagcgcagtctttttcgaacagggaacgactcgcatcggcggatcctacaaaaagttggtgtaccgcgaatacaccgacgcttccttcactaatcggaaagagcgcggtcctgaggaggaacatttgggcatccttggacccgtgatctgggcagaagtgggagatactatccgagtcacttttcacaataagggagcatatccattgtccatcgaacctatcggagtgcgcttcaacaaaaacaacgagggcacctactattctcctaattacaacccgcagtcgcgcagtgtgccaccgtctgcctcgcatgtggcgccaacggagacttttacctacgagtggactgtccccaaggaagtgggaccgactaacgcagaccctgtctgtctggctaaaatgtactactcagcggtcgatccaaccaaggacatctttaccggactcatcggaccgatgaagatctgcaaaaagggtagcctgcacgcaaatggacgccagaaagacgtggacaaagagttctaccttttcccgaccgtgttcgatgagaacgagtccttgcttctcgaggacaatattcgtatgtttacgactgccccagaccaggtcgacaaagaagatgaggatttccaggagtcgaataagatgcactcgatgaacggctttatgtacggtaatcaacccgggctgaccatgtgtaaaggcgattcagtggtctggtacctgttcagcgccggcaatgaggcggacgtgcacgggatctacttctcgggaaacacttacttgtggagaggagagcgtcgcgacactgcgaatctcttcccgcaaactagtctgactctgcatatgtggcccgacactgagggtacttttaacgtggaatgcctcactaccgaccactacaccggcgggatgaagcagaaatacaccgtgaaccaatgcagacggcagtccgaagattcgaccttttacttgggggaaagaacttactacatcgcggccgtcgaagtcgaatgggactactcgcctcagcgggaatgggagaaggaactgcaccacctccaggaacagaacgtgtccaacgcatttctcgacaagggagagttctatattggatcgaagtacaagaaggtcgtgtacagacaatacacggattctactttccgcgtgccggtggagcgcaaggccgaagaagaacatctgggaatcctgggaccgcagttgcatgcggacgtcggagacaaagtgaaaatcatcttcaagaatatggctacccgcccctacagcattcacgcccacggcgtgcaaactgaatcgagcacggtgactccgacccttcctggcgagactctgacttatgtgtggaagatcccagaacgctcgggcgctggaaccgaggactcggcatgcattccatgggcgtactactccaccgtcgaccaggtcaaggatctctactccggactgattggccccctgattgtgtgtcgccgcccatacctgaaagttttcaacccgcgcagaaagctcgagttcgccctgctgttcttggtgttcgacgaaaacgaatcctggtacctcgacgacaatatcaagacttacagcgaccacccagagaaggtgaacaaggacgatgaggagttcatcgaaagcaacaaaatgcacgctatcaatggacgcatgttcggaaacctgcagggactgaccatgcacgtgggagatgaggtgaactggtacctgatgggaatggggaatgaaattgatctccacactgtccacttccacggacactcattccagtacaaacaccggggtgtctactcgtcagacgtctttgacattttcccaggtacttaccagaccttggaaatgtttcctcggaccccaggaatctggctcctgcattgccatgtgactgatcacatccacgccgggatggaaactacttacaccgtcctccagaacgaagatactaagtcgggc

SEQ ID NO: 1609 - DNA, 3195 bp, Artificial Sequence
  derived and/or modified sequence
atgaagatactcatcctgggcatatttctgttcttgtgcagtactcccgcctgggcaaaggagaaacactattacatcggcatcattgaaacaacctgggattacgcttctgaccatggcgagaagaaactgatcagcgttgatacagagcacagcaatatatatctgcagaatggaccagatagaataggtcggctgtacaagaaagcgctgtatctacagtacacggatgagaccttcagaactactatagagaagccggtctggctcggattcctggggcctatcatcaaggcggagaccggcgacaaggtttacgtacacctgaagaatcttgcctccaggccgtacaccttccattcccatggaatcacatactacaaggagcacgaaggggcaatttacccagataatacaacagatttccagcgggctgacgataaggtgtatcccggggaacagtacacttacatgctcctggctactgaggaacagtccccaggggagggcgatggtaactgtgtgacccgtatctaccattctcacatcgacgctccgaaggacatcgcatcaggtctcatcggaccactaatcatctgcaagaaggacagcctggataaagaaaaagagaaacacattgatagggagtttgtcgtgatgttctcagtggtggatgagaacttcagctggtatcttgaggacaatataaagacctactgttctgagccagaaaaggtggataaggataatgaggattttcaagagtctaacagaatgtattccgtgaatgggtacacattcggatctctaccaggcctcagcatgtgcgctgaggaccgtgtgaagtggtacctctttggaatgggcaacgaggtggatgtgcatgcagcctttttccacggccaggccttaactaacaagaactataggatagatacaatcaacttgtttcctgctacattgtttgatgcttacatggtagcacaaaacccaggtgagtggatgctttcctgccagaatctgaaccatctgaaggccggtctgcaggcattctttcaggtacaggagtgcaacaagagttctagtaaggataatattagagggaagcacgtgaggcattattacatcgccgccgaagagattatctggaactacgccccctctggaatcgatatcttcaccaaggagaacctgaccgcacccggctcagatagtgctgtgttctttgagcaggggactactcgcattggaggcagctataagaagttggtgtaccgagaatacaccgatgctagtttcacaaatagaaaggaacggggacccgaggaagagcacctggggattctggggcctgtgatttgggcagaagtgggcgatacgattcgcgtaacattccacaataaaggcgcctatcctctgtccatcgagcctattggcgtcagatttaataagaacaacgaaggaacctactacagtcctaactataatccacaaagtaggagcgttccaccatccgccagccatgtggctcctaccgaaacgttcacatacgagtggacagttcctaaggaggtcgggccgacaaacgcagaccctgtttgtctagccaagatgtactatagcgcagtcgatcctactaaagacattttcaccggcctcattggccccatgaagatctgtaaaaagggaagcctccacgctaatggcaggcagaaggacgtggacaaagaattttacctgtttcccacggtgtttgacgaaaacgagtctcttttgcttgaagacaatatcagaatgtttaccaccgcgcccgatcaggttgacaaggaagacgaggactttcaagagagcaacaagatgcactccatgaatggcttcatgtacggcaaccagcctggactgacaatgtgcaaaggtgattcagtagtatggtatctgtttagtgctggcaacgaggctgacgtacacgggatatatttctccgggaacacgtacttatggcgcggggagaggagagacaccgctaatctgttcccacagacttcattaaccctgcacatgtggcccgacaccgaaggtacgttcaatgtcgagtgtctcaccacagatcactataccggtggcatgaaacagaaatacaccgtgaaccagtgcaggcggcaatctgaagactctactttttacctcggcgaaagaacatactatattgcagcggtagaggttgaatgggactactcacctcagcgggagtgggagaaggaactacaccacttgcaggagcagaatgtctctaatgccttcttggacaagggagagttttacatcgggtccaagtataaaaaggtggtttataggcaatacacagattcaaccttcagggtccccgtcgaaaggaaagcggaagaagagcatctcggaattctcgggccacagctgcatgccgatgtaggagacaaggttaagataatttttaagaatatggccacacgcccctactctatacacgcccacggggttcagacagagagctcaacagtgactcccactctccccggagagacgcttacctatgtatggaaaatacctgaacgctccggcgctggaactgaggattctgcttgtattccctgggcctattattccaccgtggaccaagtcaaggatctgtactccggattgattgggcctctcattgtctgtaggcgcccgtatctgaaggtcttcaatccgaggcggaagttggagtttgcactactcttcctcgtatttgacgagaacgagtcttggtatctcgacgacaacattaagacttacagcgaccatcccgagaaagtgaataaggacgacgaagaattcatcgagagcaataagatgcacgctataaatggacgaatgttcggcaatctacaagggctgacaatgcatgtaggggatgaagtgaattggtaccttatgggcatgggcaacgaaattgatctccacaccgtgcactttcatggtcactctttccagtacaaacaccgcggcgtgtactctagtgacgtcttcgacattttccccggcacatatcaaactctggagatgttccctcgaacgccgggcatatggcttctccattgtcacgttacagatcacattcatgctgggatggaaacaacttatacagtactgcagaacgaagacactaagtctggc

SEQ ID NO: 1610 - DNA, 3195 bp, Artificial Sequence
  derived and/or modified sequence
atgaagatcctgatactgggcatcttcctattcctctgctcaaccccagcttgggcaaaggagaagcactactacatcggcattatcgagaccacatgggactatgctagcgaccacggcgaaaaaaaacttatctccgtcgatacggaacatagcaatatttatcttcagaacggaccggatagaatcggacgactgtataagaaggcactgtaccttcagtacaccgacgagacattcagaacaaccattgagaaacccgtatggttgggcttcctggggcctatcatcaaagcggaaacgggagataaggtgtatgtccacctcaagaacctggcaagtcggccatacactttccatagccacggtataacatactacaaggaacatgaaggcgcaatatacccagacaacaccacagatttccagcgagccgacgacaaggtttaccctggggagcagtacacctacatgcttcttgctaccgaagagcaatcacccggggaaggcgatggtaactgcgtgacccgtatttaccactcacatatcgatgcgcctaaagatatcgccagcggactgatcgggcccttaattatctgcaagaaggatagccttgacaaagagaaagagaagcacatcgatcgcgaattcgtcgtcatgttcagcgtcgtcgatgagaacttcagctggtacctggaggacaacatcaagacttattgtagcgaacctgaaaaggttgataaggacaacgaggacttccaggagagcaacaggatgtatagcgtcaacggctacacatttggctcactgcccggtctgtctatgtgtgcagaagaccgagtcaagtggtatctgttcggcatgggcaatgaggtggacgttcacgccgcttttttccacggacaggccttgaccaataaaaactataggatcgacaccataaacctctttcctgcaaccctcttcgatgcctacatggtggctcagaaccctggggagtggatgttaagctgtcagaacttgaaccacctgaaagccggtctgcaggcattcttccaagtccaggagtgcaacaaaagttcttcaaaagacaatatccggggcaaacacgtgaggcactactatatcgccgcagaggaaatcatctggaactacgcaccaagcggaatcgatatcttcacaaaggagaacttaactgcccctggtagtgattctgcggtgtttttcgagcagggaacaaccaggattggggggagttacaaaaaattggtctaccgggagtacacagatgccagcttcactaacagaaaggaaaggggccctgaggaagagcacttgggtatcttagggcccgtgatttgggcagaagttggtgataccattcgtgtgacctttcacaacaaaggagcttatcccttgagcattgagccaattggtgtcaggtttaataagaacaacgagggcacatactactcccctaattataacccccagagtagaagcgttccaccttcagcaagccatgttgcaccaaccgaaacttttacttacgaatggaccgtcccaaaggaggtggggcctaccaacgcagacccagtttgcttggcaaaaatgtattactccgccgtcgaccctaccaaagatatttttacagggcttatcggacctatgaagatctgcaagaaggggagcctacacgctaacggcaggcaaaaggacgtcgataaggagttctacctgttcccaacagtcttcgatgagaacgagtcccttctgctcgaagacaacattaggatgttcaccactgctccagaccaagtggataaagaggacgaggacttccaggagagcaacaaaatgcatagtatgaacggctttatgtacggtaaccagccagggctcaccatgtgcaaaggcgatagcgtggtttggtatctctttagcgctgggaacgaagcagatgtgcacggaatatattttagcggtaatacctacctgtggcggggcgagagaagggatactgctaacctgttcccccagacctcactgacactgcatatgtggccagatacggaaggcacctttaatgtggaatgcttgactaccgatcactataccggcggcatgaaacaaaaatacactgtgaatcagtgcagacgccagtctgaagattccaccttctaccttggagaaagaacctactacattgcggctgtggaagtggagtgggactattcgccccagagggaatgggagaaggaactgcatcatctgcaagaacaaaatgttagtaatgcattcctggataaaggagaattttacatcgggtcaaagtacaaaaaagtggtgtacaggcagtatacagatagcaccttccgcgttcctgttgaacggaaggctgaagaagagcacctgggaattctgggtccacagctacatgccgacgtcggtgataaagttaagattatctttaagaatatggccacacgtccatacagcatccatgcgcatggcgtacagaccgagtctagtaccgtcactccaacacttccaggagagacacttacttacgtctggaagattccggagagaagcggcgcaggtactgaggatagcgcttgcatcccctgggcctactattctacagtggaccaggttaaagatctctatagcggcctaatcggacctcttattgtctgtcggagaccttacttaaaggttttcaaccccaggcggaagttggagtttgcgctgcttttccttgtgtttgacgaaaatgagtcatggtacctggatgacaacatcaagacatacagcgaccaccctgagaaggtgaacaaggatgacgaagagttcatagaatcgaacaaaatgcacgcgattaacggtaggatgtttggtaacttgcaagggttgaccatgcatgtaggagatgaggttaactggtaccttatgggaatggggaatgaaattgacctgcataccgtgcactttcatggccatagtttccagtacaaacaccgcggggtgtactcttcagacgtattcgatatattccccggcacctaccagactctcgaaatgttcccccgcacacctgggatttggctgcttcattgtcacgtgaccgatcacattcacgcaggaatggaaaccacctatactgtgcttcaaaacgaggacaccaaaagcggg

SEQ ID NO: 1611 - DNA, 3195 bp, Artificial Sequence
  derived and/or modified sequence
atgaagatcctcatcctgggaatattcttgtttctctgctcaaccccggcctgggcaaaagagaaacattactatatcggcataattgaaactacttgggactacgcatccgatcatggcgaaaagaaactcatctcagtggataccgaacactccaatatctacctccagaacggaccggaccgaatcggaaggctctacaagaaggcgctgtaccttcaatacaccgatgagacttttcggactaccatcgagaagccagtttggttgggatttctgggtcctatcatcaaggctgagactggagataaggtatacgtgcatctgaagaaccttgcctccaggccgtatacttttcacagccatggaatcacgtactataaagaacacgagggagcaatctaccctgacaacaccactgatttccaacgggccgatgacaaagtgtaccccggcgaacagtacacctacatgctgctcgccacggaggagcagagtcccggagaaggagatgggaattgcgtcacccggatctatcactcgcacatcgacgcaccgaaggacatcgcgagcggactcattggccccctgatcatctgcaagaaggactccctcgataaggaaaaagagaagcatattgacagagagtttgtggtcatgttctctgtggttgatgagaatttcagttggtatctcgaggacaacatcaagacttactgcagcgaacccgagaaggtggacaaggacaacgaagatttccaagagtcaaatagaatgtactccgtcaatggctacaccttcggctccctgccggggctgtccatgtgcgctgaggaccgggtgaaatggtatctgtttggaatgggcaatgaagtcgatgtgcacgccgcgttctttcacggtcaagcgctgaccaataagaactacagaatcgacactatcaaccttttccctgcgaccctgttcgacgcctacatggttgcgcaaaaccctggagaatggatgttgtcctgccaaaatctgaaccatctgaaagctggattgcaggccttcttccaagtgcaggaatgcaacaagtcctcgtcgaaggacaatatccgggggaaacacgtgcgccactactacattgccgcagaagaaatcatttggaactacgctccgtcgggaatcgacatattcacgaaagaaaacctcactgcgcccggctcagattcggccgtgttcttcgagcagggaactacccggattggtggctcgtacaagaagctggtctaccgcgagtacactgacgcatcattcaccaatcgcaaggaacgggggccagaggaagagcacctgggaatcctcggaccggtgatctgggctgaggtcggagatacgatcagagtgaccttccacaacaaaggagcctacccactctctatagagcccattggagtgcgcttcaacaagaacaatgaaggtacctactacagcccgaactataatcctcagtcaagatctgtcccaccttcggcatcccacgtcgctccgactgaaaccttcacttatgaatggactgttccgaaggaggtgggaccgactaacgcggacccggtgtgtttggcaaagatgtactactcggccgtggacccgacgaaagacattttcactgggctgatcggaccgatgaagatttgtaagaaaggaagcctgcacgctaacggacgccaaaaggatgtggacaaggaattctacctgttcccgaccgtgttcgacgaaaacgagtcgttgctgctcgaggataacatccgcatgtttaccaccgccccggaccaggtcgacaaggaagatgaggattttcaggaaagcaacaaaatgcattccatgaatgggttcatgtacggcaaccagccaggcctgaccatgtgcaaaggtgactccgtggtctggtatcttttctccgcaggcaacgaggctgatgtgcatggcatctacttcagcggaaacacctacctgtggcggggtgaacggagagacaccgccaacctgtttccacagacctccctgaccctgcatatgtggccagatactgaaggaacctttaatgtggaatgccttactactgatcattacaccggaggaatgaagcagaaatacactgtgaaccagtgtcggcgccagtcagaagattccactttctacctgggtgaacgcacctattacatcgcagcggtggaggtggagtgggactacagcccacaacgcgaatgggagaaggagctccaccacctgcaggagcagaatgtgtcaaacgcgttccttgacaaaggcgagttctatataggatccaagtacaaaaaggtcgtgtacagacagtacactgacagcacctttcgggtcccggtcgaacgtaaggcggaagaagagcatctgggaatcctgggcccgcaactgcatgctgacgtgggtgacaaggtgaagatcattttcaagaacatggcgaccagaccgtactcgatccacgcccacggggtgcagactgaatcatccactgtgacccccaccctcccgggggaaacgctgacttacgtctggaagatcccagaacgctcaggtgcagggacggaagattcagcatgcatcccgtgggcctattactcaactgtggaccaggtcaaagatctgtactcgggactgatcggtccattgatcgtgtgcaggcggccatacctcaaggtgttcaatccccgaaggaagctggaattcgccttgctgtttctggtgttcgacgagaacgagtcctggtaccttgacgacaacatcaaaacgtatagcgaccatcctgaaaaggtgaataaggacgatgaggaattcatcgaaagcaacaagatgcacgccattaacggtagaatgttcgggaacctccaaggattgaccatgcacgtcggggacgaggtcaactggtacctcatgggcatgggtaatgagatcgatctgcacacggtccactttcatggtcacagcttccaatacaagcatagaggcgtctacagctcggatgtgttcgacatctttccgggcacgtaccaaaccttggaaatgttcccgcgcacccctggaatatggctcctgcattgtcatgtgaccgaccacatccacgcaggaatggaaaccacgtatactgtgttgcagaacgaggacaccaagtctgga

SEQ ID NO: 1612 - DNA, 3195 bp, Artificial Sequence
  derived and/or modified sequence
atgaagatccttatcctcggcatcttcttgtttctgtgctcaaccccagcttgggcaaaggagaagcactactacattggaatcatcgagactacctgggattacgcatccgatcacggagagaaaaaactgattagcgtggatactgaacatagcaatatctatttgcaaaatggacctgatagaattggaaggctgtacaaaaaggcactttacctccaatacactgacgaaacttttcggactaccatcgagaagccggtctggcttggcttcctggggccaatcatcaaagcagaaactggagataaggtctatgtgcacctgaagaacttggcctcgcgcccatacaccttccattcgcatggaataacttattacaaggagcacgagggggcaatctacccagacaacacgactgatttccagcgagctgacgacaaagtgtaccctggggagcagtacacttacatgcttctggcaactgaggaacagtcgcctggagaaggagatgggaactgcgtcactcgcatctaccactcacacattgatgcgcctaaagatattgcatcaggacttatcggtcctctgattatctgtaagaaggacagcctggataaggaaaaggaaaagcatattgatcgggagttcgttgtcatgttttcggtggtggacgagaacttttcgtggtaccttgaagataacatcaaaacgtactgttcagaaccagaaaaggtcgataaagataacgaggattttcaggaatccaatagaatgtacagcgtgaatggttacacgtttggatccctccctggcctcagcatgtgtgcagaagatagagtcaagtggtaccttttcggaatgggtaacgaagtggatgtgcatgcagccttttttcacggtcaagcactgactaataagaattacaggattgataccattaatctcttccccgcaactctttttgacgcttacatggtggcccagaaccctggagaatggatgctttcctgccagaaccttaaccatcttaaagcagggcttcaagccttctttcaagttcaagagtgtaacaagagcagttccaaggataacattcgaggcaagcatgtgcggcattactacattgccgctgaagagattatctggaattacgcaccaagcggaatcgacattttcactaaggaaaacctgacggcccctggctcggattcggcggtgtttttcgaacagggaaccacgagaattggcgggtcgtacaaaaaacttgtgtaccgagaatacactgatgcgtcgtttactaatagaaaagaaaggggcccggaagaagaacaccttggtatactcggtcctgtgatttgggcagaagtgggtgatacgataagggtcacctttcacaacaagggagcgtatccgctctcgatcgagccaatcggggtgcggttcaataagaacaacgaaggaacctactacagcccaaattacaacccacagtcgcgttcagtgccgccatcggcatcccatgtggctccaactgaaactttcacttacgagtggacggtgccaaaggaggttggtccaactaatgcagatcctgtctgtctggcaaaaatgtactactcagcggtcgatccaaccaaggacatattcactggtttgataggaccaatgaagatatgtaaaaaggggtcactgcatgcgaatggtagacaaaaggatgtggataaagagttttacctgtttcccacggtgtttgacgaaaacgagtcccttcttctggaggacaacatacgaatgtttactaccgcaccagaccaggtcgacaaggaggacgaagatttccaagaatctaacaagatgcactctatgaatggctttatgtacggtaaccaacctggccttaccatgtgtaagggggactcagtggtgtggtacctgttttccgcaggtaatgaagccgatgtgcatggtatctactttagcggaaacacctacctgtggcgaggtgaacgccgagacaccgcaaatctgtttcctcaaacgtcccttactctgcatatgtggcctgataccgaaggtacttttaacgtcgaatgtcttaccaccgatcactacactggtggcatgaagcagaagtacactgtgaatcagtgcagacgtcaatcggaagattccaccttttaccttggagaacggacctactacatcgcggcagtggaagtcgaatgggattactcaccacaaagagagtgggaaaaggaattgcaccacctccaagagcagaatgtctcaaacgccttcctggataagggtgagttctacattggatcgaagtacaagaaagtggtgtaccggcagtacaccgattcgacttttagagtgccggttgaacgtaaagcagaagaggaacatctgggcatacttggtcctcaactccacgcagatgtcggagacaaggtgaagatcatattcaagaatatggccactcgtccttactcgatacacgcccatggagtgcagactgagtcatcgacggtgactccaaccctgccaggtgaaacccttacttacgtctggaagattcctgaaagaagcggcgcagggaccgaggacagcgcctgtatcccatgggcctactacagcactgtcgatcaagtgaaagatctgtactccgggcttatcggtccacttattgtgtgccgccgtccataccttaaggttttcaatcctcggcgcaagttggagtttgccctgctctttctggtattcgacgagaatgaatcctggtatttggatgataacatcaagacttattctgatcatccagaaaaggtgaataaggatgatgaggagttcatcgaaagcaataagatgcatgccattaacggacgaatgtttgggaacctgcaaggactgactatgcacgtgggggatgaagtcaattggtaccttatgggaatgggcaacgaaattgacctgcacactgtacactttcatggacattcctttcagtacaagcataggggagtgtactcgtcggacgtctttgacatttttcccggaacctaccagactcttgagatgtttccgcggactcccgggatctggcttcttcattgtcatgtgaccgatcatattcatgccgggatggagactacctacactgtgcttcagaatgaggataccaagtccgga

SEQ ID NO: 1613 - DNA, 3195 bp, Artificial Sequence
  derived and/or modified sequence
atgaagattctcatcctcggaatcttcctgtttctatgcagcacccctgcatgggctaaggagaaacattactatattgggattatcgagaccacctgggactatgctagcgaccatggcgaaaaaaagctaatttcagtggataccgagcattcaaatatttatcttcaaaacgggccggatcggatcgggcggttgtacaaaaaggcgctgtatctgcagtacaccgatgaaaccttccggacaaccattgagaaaccggtgtggttaggctttctcgggcccatcattaaggcagagacaggggataaggtttatgtccacttaaaaaatttggcctctcggccatacacatttcactcgcatggaatcacctactacaaggaacatgagggcgctatctaccctgacaacacaacagattttcagcgtgccgacgacaaggtgtatcccggggaacagtacacctacatgttgctagcaacggaagaacagtctcccggcgagggtgacggcaattgtgtgactcgaatctaccattcccacattgatgcacccaaggatattgcttcggggctgattgggcccctgatcatctgtaaaaaggacagtctggataaagagaaagaaaagcatattgaccgggagtttgtcgtgatgttcagcgtggtggatgagaacttttcttggtacctcgaggacaatataaaaacttactgttccgagccggagaaagtggataaagataatgaggacttccaggagagcaacaggatgtattccgtaaacggctacacctttggatccctgccaggcctgagcatgtgcgccgaagaccgcgtcaaatggtacctatttggtatgggcaacgaggtggacgtccacgccgctttttttcacgggcaagccctcaccaacaagaactacagaattgataccatcaatctgtttcctgctaccctctttgatgcctacatggtagctcaaaaccccggagagtggatgctgtcatgccagaacctaaaccaccttaaagccggtctgcaagccttcttccaagtgcaggagtgcaataaaagcagttccaaggataacattagggggaaacacgttagacattattacatcgccgccgaagagatcatttggaactacgcgccatccggcattgatatattcactaaagagaacttgactgcgccaggttcagatagcgccgtctttttcgaacaaggtaccaccaggattggagggtcttacaaaaagctggtctacagagagtacaccgatgcctcttttacaaatagaaaagagcgcggcccagaagaggagcacctcggaattctcgggcctgtgatttgggccgaagtaggtgacactattagggtgacctttcacaacaagggtgcctatcccctaagtatcgagcccattggcgtgagattcaacaaaaataacgagggcacctattattcgcctaactacaatccacagtctagaagtgtgcctccttctgcatctcatgtggccccaacggagacattcacttacgaatggacagtgcctaaggaagtggggcctactaacgctgaccctgtctgtcttgccaaaatgtactattcagcggttgatccaactaaagatattttcaccgggctgattgggcctatgaagatttgtaagaagggtagtcttcatgcaaacgggcggcaaaaagatgtggataaggagttctatctcttcccaactgtgttcgacgagaacgagagcttactgctcgaggataacatccggatgttcaccaccgcgcccgatcaggtggataaagaggacgaggattttcaggagagcaataaaatgcacagtatgaacggtttcatgtacggtaatcaacccggactcactatgtgcaaaggtgactcagtggtttggtatctcttctctgctgggaatgaggccgacgtgcacggaatctacttttccgggaatacttatctttggagaggcgagcgtagggacacagcgaacctcttccctcagacctctctgactctgcacatgtggcctgatacggaggggacgttcaacgtggaatgtctcactaccgaccactatacagggggaatgaaacagaagtacactgtcaatcagtgtagacgccaaagtgaagatagcacattctacttgggagagagaacatattacatagccgccgtcgaagtggaatgggattactcaccccagagggaatgggaaaaggaactgcaccatctccaggagcagaatgtgagtaacgcatttctagacaaaggagaattctatatcgggtctaagtacaagaaggtagtgtatcgtcagtataccgactccactttcagggtacccgtggagcgaaaagccgaagaagagcatctggggattttggggcctcaattgcacgccgatgtgggggataaagtcaaaatcattttcaagaacatggctacccgtccatactctattcacgcccatggagtccagacagaatcaagtaccgtgactcccacacttcccggagagacattgacctacgtgtggaaaatacctgagcgctctggtgccggcacggaggacagtgcctgcattccatgggcctactactcaaccgtggaccaggttaaggacctctattctggtctaatagggccgcttatagtgtgtagacggccctatttgaaggtcttcaaccctagacggaaactcgagtttgcacttttgttcctagttttcgacgagaatgaaagttggtacctggacgacaacataaagacttattccgaccatcccgaaaaggtgaacaaggacgatgaggagtttattgagtcaaataaaatgcacgctattaacggaagaatgttcggcaatctgcagggactgacgatgcatgtgggcgatgaagttaactggtacctgatggggatggggaatgagattgacctccacaccgtacattttcacgggcattcttttcaatataaacaccgcggagtgtacagcagcgacgtgttcgacatttttccaggaacctatcagacgcttgagatgttccctagaacccctgggatctggctgctgcattgccatgttactgaccacattcatgctggcatggagacaacatatacagtgttgcagaatgaagataccaagagtgga

SEQ ID NO: 1614 - DNA, 3195 bp, Artificial Sequence
  derived and/or modified sequence
atgaagatattgattctaggtatcttcctctttctgtgctccacaccggcatgggctaaggaaaaacactactatatcggaatcattgaaaccacatgggattacgcaagtgatcatggggagaaaaagttgattagtgtggacaccgaacatagtaacatttacctgcagaacggccctgatcgcatcgggcgactttataaaaaagctctgtacctgcagtataccgacgaaactttccgaactaccattgagaagcctgtctggttggggtttcttgggcctatcatcaaagctgaaacgggtgataaggtatatgttcatttgaagaatttggcttctaggccatacactttccatagccatggcatcacctactacaaggagcatgaaggcgcaatatatcccgacaacacgacggacttccagagggccgatgacaaagtctaccctggagagcagtatacctatatgctactggctaccgaggaacagtcccccggtgagggagacggcaactgcgtgaccaggatataccactcacacatcgacgccccaaaggacattgcctcaggactgattgggcccctgatcatctgcaagaaggactcccttgacaaggagaaggagaagcacatcgaccgggagttcgtggtcatgtttagcgttgttgatgagaacttctcttggtatttggaagacaatataaaaacctattgttcagagcccgagaaggtagacaaggataatgaagattttcaggaaagcaacagaatgtattccgtaaatggctacactttcggcagcctccctggcttatcaatgtgtgccgaggacagggtgaagtggtatctctttggtatggggaatgaggtagatgtgcacgcggccttttttcacggccaagcactcactaacaaaaattatcgcatcgacacaatcaatctgttcccggccactctgtttgacgcatatatggtggcccagaacccaggagaatggatgttgagctgccagaatttaaatcacctgaaagcaggtcttcaggcctttttccaggtgcaggagtgtaacaaaagcagctcaaaggataatattcgaggcaaacacgtgcgacattactacatcgccgcagaggagatcatttggaactacgctccatcaggcattgacatcttcacaaaggagaacctcactgctcccggatccgattccgcagtatttttcgaacaaggcacgacacgaatcggcggtagctacaaaaagctagtttatcgtgaatacaccgatgcgtcatttacaaacaggaaggaaaggggacccgaggaagagcacctcgggatactgggtccagtcatctgggcagaggtgggcgatacgatccgggtgacattccacaacaagggggcttacccactcagtattgagcctattggagtgcggtttaacaaaaataacgagggcacttattactccccaaattacaatccccagtctaggagcgtgcccccttccgcctcacatgttgctcctaccgagacatttacatatgagtggactgtcccaaaagaagttggcccaacgaacgctgaccctgtatgtctcgctaagatgtattatagcgctgttgaccccaccaaggatatcttcaccgggctgattggccccatgaagatctgtaagaaggggtcactgcatgccaacggccgccaaaaagacgtggacaaggagttctatttgtttcctaccgtgtttgatgagaacgagtcactgttgctggaggataacatcaggatgtttactacggctcccgaccaggtcgacaaagaggacgaagatttccaggaatccaataaaatgcacagcatgaatggcttcatgtacggcaatcagcctggcctcaccatgtgtaaaggtgatagcgttgtgtggtacttgttcagcgcgggaaacgaggcagacgtgcacggtatctacttcagtggaaatacatacctgtggagaggagaaaggcgcgacacggcaaatcttttccctcaaaccagcctgacgctacacatgtggcccgacaccgagggcacgttcaatgtggaatgtcttaccacagatcactacacaggcggaatgaagcagaaatatacagtgaatcaatgtcgccggcaaagcgaggactcaacattttatctcggagaacgtacttattatatcgccgcagtcgaagtcgaatgggactattcgccacaacgggaatgggagaaagagctgcaccatctacaagaacagaatgtcagcaatgcctttctggacaagggagagttttacatcggctccaaatacaaaaaagtagtttatcgtcagtacactgatagcacgtttcgggtacccgtggagcgtaaagcagaagaagaacacctgggaattctaggaccccagttgcacgcggatgtaggcgataaggttaaaatcatatttaagaatatggctaccagaccgtactctatccatgcccatggagttcagaccgagagcagtacggtgaccccgaccctacctggggagactttaacatacgtttggaagatacccgagcgctccggcgctggcaccgaggactccgcatgtatcccctgggcctactactccacagtagaccaggtgaaggatctgtacagcggactcataggaccactcatagtttgtagaaggccatatcttaaagtgtttaatcctaggcggaaattagagttcgcgctcctcttcctagtttttgatgaaaatgagtcatggtacctagatgacaacatcaaaacatacagtgaccaccccgagaaagtaaacaaggatgatgaggaattcatagaaagtaacaagatgcatgctatcaatggccggatgttcgggaatcttcaggggctcaccatgcatgtgggcgatgaagtgaattggtatctgatgggaatgggaaacgaaatcgacttgcacaccgttcactttcacggacatagtttccagtacaagcaccgtggcgtctatagtagtgacgtgttcgatatctttccaggcacataccagactcttgagatgttcccccgaactcctggcatttggctcctgcattgtcatgtgactgatcacatccatgctgggatggaaaccacttatactgtcttacagaacgaggacaccaagtccgga

SEQ ID NO: 1615 - DNA, 3195 bp, Artificial Sequence
  derived and/or modified sequence
atgaaaattctgattctcggaatctttctgttcctgtgttccacgccagcttgggcaaaagagaaacattactacatcgggatcatcgagaccacctgggattatgcttcagatcatggtgagaagaaacttatctccgtcgacaccgagcactcaaatatatacctgcaaaacggccctgataggatcggccggctgtataagaaggcgctgtacctccagtatacagatgaaactttcagaactaccatcgagaaacccgtttggctaggattcctgggccccattatcaaggcggaaacaggcgacaaagtgtacgtccaccttaagaaccttgcgtccaggccgtacacattccattcccacggaataacctattacaaggaacatgaaggagccatctaccctgataacaccaccgatttccaaagggcggacgacaaagtttatccaggcgagcagtacacctatatgctacttgccacagaagagcaatcgcccggtgagggcgacggcaactgcgtgacccgcatataccattcccatattgacgcaccaaaggacatcgcaagtggtctgatcggcccattaatcatttgcaagaaggattccctagataaggagaaagagaaacacatcgatagggagtttgtggtcatgttcagcgtggtggacgagaacttcagctggtacctagaggacaacatcaagacatactgctccgagcccgaaaaagtggataaagataacgaagacttccaggaatccaaccgtatgtatagcgtcaacggatacacctttgggtctctaccagggctgagcatgtgcgccgaggatagagtgaagtggtatctctttggtatgggcaacgaggtcgacgtgcatgccgcctttttccacggacaggctctcaccaacaagaactatcgcattgacacaattaacctcttccctgctaccttgtttgatgcctacatggtggcccagaatcccggggagtggatgttgagctgccagaacctgaaccacctgaaggcaggcctgcaggctttctttcaagtccaggaatgcaataaatcatcctccaaagacaacattagagggaaacacgtgcggcattactacattgcagctgaggagatcatttggaactatgccccatccgggattgacatatttaccaaggagaacctgacagctccaggttctgacagcgctgtgttcttcgagcagggtactacaagaattggtggctcttacaaaaaactagtgtaccgcgagtacaccgacgcttcctttaccaatcggaaggagaggggcccggaggaggagcacctgggaatactcggaccagtcatatgggccgaggtcggagatacgattcgagtaaccttccataataagggggcgtaccccctgagcatcgagcccattggagtccgcttcaacaagaacaatgagggcacctactactcccccaactataacccacagtcaaggagcgtgcccccatcggctagccacgtcgcgcctactgagactttcacatacgagtggacagtgcccaaagaagttggacctaccaatgctgatccagtgtgtctcgcaaaaatgtactactctgcggtggaccctacaaaggatatctttaccgggctgatcggtcccatgaaaatctgcaagaaaggtagtctacacgccaatggccggcagaaggatgtggataaagagttttacctatttcctaccgtcttcgacgaaaatgaatcgctgctgctcgaggataacatcaggatgttcactaccgcaccggaccaggtggacaaagaagacgaggattttcaggaatcaaacaagatgcattccatgaatggattcatgtatggcaaccagccaggtctcactatgtgcaaaggggacagcgtcgtgtggtacctgttctccgccggcaacgaagccgatgttcacggcatttatttctctggaaacacgtacctctggagaggtgagaggagagataccgcaaacctttttccacaaacctccctaacactccatatgtggcctgatactgaagggacctttaatgtcgagtgcctgactaccgatcattacactggcggcatgaaacagaagtacaccgtaaaccaatgccgccggcagagcgaggattcgaccttctatctgggcgaacgcacctactatatcgccgcagtggaggtggaatgggactattcgccgcagcgcgagtgggagaaggagcttcaccacctgcaggaacagaatgtctccaacgctttcctggacaaaggcgaattctatattggatcaaagtacaagaaggtcgtgtatagacagtatacagactccaccttccgcgtgcccgtcgagcgcaaggctgaagaggagcatctgggcatcttaggtccgcagctccacgccgatgttggcgacaaggtcaagattatcttcaagaacatggctacgagaccgtactctattcatgctcacggagtccagacagagtcatcaacggtgactcctaccttgccaggagaaacattaacgtacgtctggaagattcccgagagaagcggagcagggacggaggactccgcttgtattccctgggcttactattccactgttgaccaggtgaaagacctgtattccggcctgatcggcccgctgattgtgtgcagacgaccatatctgaaggttttcaatcctagacgcaagttggaattcgctttattgttcctagtgtttgatgagaacgagtcttggtacctggatgataacatcaagacctactcggaccaccctgagaaggttaataaagacgacgaggagttcattgagtcaaacaagatgcacgccatcaacggccgcatgtttgggaatctgcagggtctaaccatgcacgttggagacgaagttaattggtacctgatggggatgggaaacgagatcgaccttcacacagtgcacttccatggacactccttccaatataagcatcgaggcgtctactccagcgatgtcttcgacatcttccccggcacatatcagacactcgagatgttccccagaacccccggtatatggttgctgcactgtcacgttactgaccatattcacgcaggcatggagaccacttacactgtcctgcaaaacgaagacacaaagtctggg

SEQ ID NO: 1616 - DNA, 3195 bp, Artificial Sequence
  derived and/or modified sequence
atgaagattttgatcctgggaatcttcctctttctgtgcagcacccccgcctgggcgaaggaaaagcactactacattggtatcattgaaacgacctgggactacgcatcggaccatggtgaaaagaagctcatctcggtggatacggaacattcgaatatctacctccagaacggccctgatcggattggtcgcctttacaaaaaggcactgtacctgcaatacacggacgaaacgtttagaactacgattgagaaacccgtctggctcggatttctcggccccattatcaaggccgaaaccggtgacaaagtgtacgtccaccttaagaatcttgcatcccggccctacacgttccattcgcacggtataacctactacaaagaacatgagggggcaatctaccctgacaatactaccgattttcagcgtgcagacgataaggtatacccaggggaacagtacacttacatgcttctggcgaccgaggagcaatcacctggagaaggtgatggaaactgcgtcacgcgcatctaccatagccatattgacgctccgaaagacatagcatctggacttatcggacctctcatcatatgcaaaaaggactccctggacaaggagaaagagaagcacattgatagagaatttgtggtgatgttttcagtggtcgacgaaaacttctcctggtaccttgaagataacatcaaaacgtattgttccgaaccagaaaaggtggataaggataatgaagattttcaagaaagtaaccgtatgtactcggtgaatggatacacttttggaagccttcccggtctgtcgatgtgtgcagaggacagagtgaaatggtacctgtttgggatgggaaatgaagtggacgttcatgcagcttttttccatggtcaggctcttaccaataagaattaccggattgacaccatcaacctctttccggccaccctgttcgacgcatacatggtggcccaaaatcccggtgagtggatgctctcctgtcaaaacctgaaccatcttaaggcaggtttgcaagcatttttccaggtgcaagaatgtaacaaaagctcgtccaaggacaacattagaggaaagcatgtcagacattactatatcgcagcagaggagatcatttggaactacgctcctagcggaattgacatctttacgaaggagaaccttactgcacccggatcggatagcgcggtcttttttgagcagggtactactagaattggaggctcttacaagaagctggtctacagagagtacactgatgcatccttcaccaaccgcaaggagcgaggaccggaagaggagcatctgggaatacttggaccagtgatttgggcagaggtgggagataccatacgcgttacctttcataacaagggtgcatacccactctccattgaacctataggtgtcagatttaacaaaaacaacgagggtacctactacagcccaaactataacccccaaagcaggagcgtgccaccatcggcgtcccatgtggctcctaccgagacttttacctacgaatggactgtccctaaggaagtcggccccactaacgccgatccagtgtgtctggccaaaatgtactactccgcagtggatccgactaaagacatctttaccggtcttattggacctatgaagatctgtaagaagggttcccttcatgccaacggaaggcagaaggatgtggataaggaattctatctgtttccaactgtctttgatgagaatgagagcttgcttctcgaggataacattagaatgttcaccaccgcccccgaccaagtggacaaagaagatgaggacttccaagagtctaacaagatgcattcgatgaatggatttatgtacggaaaccaacccggactgactatgtgtaagggtgattcggtggtctggtacttgttttctgcgggaaatgaagccgatgtccatggtatctatttcagcggaaatacttacctctggagaggagaacgccgtgataccgcaaacctgtttccgcagacgtcacttaccctccatatgtggcctgacaccgagggcactttcaatgtggaatgtctcaccactgatcattataccggcggaatgaagcaaaagtacaccgtgaaccaatgtagacgccagtcggaggacagcactttctaccttggtgaaaggacttactacatagcagccgtagaggtcgagtgggattactcccctcagcgcgaatgggagaaagaactgcaccacctccaagaacagaatgtgtcgaacgcatttcttgataagggcgaattctacattggaagcaaatacaagaaagtggtctaccggcagtacaccgacagcacttttagagtgcctgtggagcggaaagcagaagaagaacatcttggcatactgggaccgcaacttcacgcggacgtcggagataaggtcaagattatctttaagaatatggcaacccggccatactccattcatgcacacggggtccagaccgagtcaagcactgtcacccctaccctcccaggagaaaccctcacttacgtctggaagatccccgaacgctcgggagcaggtactgaagattcggcctgcatcccttgggcatattactccaccgtggatcaagtgaaggacttgtactcagggcttattggtccattgattgtgtgtcggcgcccctacttgaaagtgtttaacccgaggcgcaaactggaatttgcacttctttttctcgtgttcgatgaaaatgaatcgtggtacctcgatgacaacattaagacgtatagcgaccacccagagaaagtcaataaggatgacgaggagtttattgagagcaataagatgcatgcaattaacggtaggatgtttgggaaccttcagggactgaccatgcacgtgggggatgaagtgaactggtacctgatgggtatgggaaatgagattgatcttcacacggtgcattttcacggccattcgtttcaatacaaacaccggggtgtgtatagtagcgacgtgtttgatatcttcccaggaacttaccagactctggaaatgtttccaagaactcctggaatatggctgcttcattgccacgtcaccgatcatatccacgccgggatggagactacctacaccgtgctccaaaacgaggatactaagagcgga

SEQ ID NO: 1617 - DNA, 3195 bp, Artificial Sequence
  derived and/or modified sequence
atgaagattcttattctgggcattttcttattcctctgcagcacacccgcatgggccaaggagaagcactactacatcggcataattgaaaccacatgggactatgcttctgaccatggagaaaaaaagctcatctccgtagacaccgaacactccaacatctatctgcaaaatggacctgaccgcataggtaggctgtacaagaaggcactgtatctgcagtatacggatgaaacatttcgcactacaatcgagaagccggtttggctgggatttctagggcccattattaaggcagagaccggcgacaaagtgtacgtgcatctcaagaacctggcaagcagaccttatacattccacagccacggaattacatactacaaggaacacgagggcgccatctatccagacaatacgacagatttccagcgagcagatgataaagtgtacccaggtgaacagtatacctatatgctgctggcaacagaagagcaatcccccggcgagggggatggcaactgcgtcacaagaatctaccacagccacatagatgctcccaaagatatcgcctcaggccttatcggtcctctcattatctgtaagaaggactctttggataaggagaaggaaaaacatatcgatcgggagttcgtggtgatgtttagtgtggtcgacgagaatttctcttggtatctggaggacaacattaaaacttattgttcagaaccagagaaggtggataaggacaacgaagattttcaggagtcaaatcgcatgtactctgtcaatggatacacattcgggagtctgccaggattatctatgtgcgcagaagacagagtgaaatggtatctgttcgggatgggaaatgaggtagatgtacacgctgctttcttccacggtcaggcactaaccaataagaattaccgcatagatacaattaacttgttccccgctacactgttcgacgcttacatggtggcccaaaacccgggggagtggatgctctcttgtcagaacctcaaccacttgaaggcagggctgcaggccttctttcaagtgcaagagtgcaataagtcatccagcaaggataacatccgcggaaagcatgtacgccactactatatcgctgctgaagagatcatctggaattacgccccatcgggaatagacatatttacaaaggagaatttgacagccccaggatctgattcagcggtgttttttgaacagggaaccaccagaatcggaggcagctacaaaaaattggtgtacagagaatatacggatgcatccttcactaacagaaaagagcggggccctgaggaggaacacctgggaattctgggccctgttatttgggccgaggtcggtgatactatcagggtgaccttccataataagggggcctacccgctgagcatcgagcctataggggtgcggtttaacaagaacaatgagggcacatattacagccccaattacaacccgcagtctcggtccgtgccaccctccgcctcccatgtggcaccaaccgagacttttacctacgagtggacagtgccaaaagaagtcgggccgacaaatgcagatccagtctgtctcgctaagatgtattacagcgcagtagaccctactaaagatatttttaccggactaataggtccgatgaagatttgtaaaaagggtagcctgcacgctaatggtcgacagaaggacgtggacaaggagttttacctcttcccgacagtgtttgatgaaaatgagagtttgttgctagaggataacatcagaatgttcacaaccgcccccgaccaggtggataaggaagatgaggactttcaagagagcaataaaatgcactccatgaatgggttcatgtatggcaatcaaccaggcctgacaatgtgcaagggagactccgttgtgtggtatctgttttctgcaggtaacgaggccgatgtgcatggcatttattttagcggaaatacatacctgtggcgcggtgagaggcgcgataccgccaatctgtttccgcagacatccctcaccctccatatgtggccagatacagaaggcacattcaatgtggaatgtctgacaaccgatcattataccggggggatgaagcagaagtacaccgtgaatcagtgcaggagacaaagtgaagacagtacattctatctgggcgaacggacatactatattgccgcggttgaagtagagtgggactattcccctcaacgcgagtgggagaaggaacttcaccacttgcaggagcaaaacgtcagtaatgccttcttagacaaaggtgagttctacatcggctcaaagtacaaaaaggtggtgtatcggcaatacaccgattcgacttttcgggttcctgttgagaggaaggcagaagaagaacacttggggatcctaggaccccagctgcacgctgacgtcggggacaaggtgaaaattatattcaagaacatggccacccggccgtatagcatccatgcccatggcgtgcaaacagaatcctcaacagtgacaccaaccctcccgggagaaactcttacctacgtgtggaaaattcctgagcgctctggcgcaggcacggaggacagcgcctgcatcccatgggcgtactactcgacggtggaccaggttaaagacctttatagcggacttatcgggccactgatcgtttgtaggcggccctacctcaaggtctttaatccccgacgcaaactggagttcgccctgctctttctcgtgttcgatgaaaatgagtcttggtacctggacgacaacatcaagacctattcagaccatccggagaaggttaacaaagacgatgaagaattcatcgaatctaataaaatgcacgccattaacggacgaatgtttgggaatcttcagggattaaccatgcatgtgggggacgaggtcaactggtatctaatgggaatgggaaatgaaattgatctgcacacagtgcatttccacggccattcctttcagtacaaacatagaggtgtgtactcatctgacgtttttgatattttcccaggcacataccagactttagaaatgttcccacgtacacccggcatctggctgctccattgtcacgtcaccgatcatatccacgctggcatggagacaacctataccgtgttgcagaacgaagacactaagagcggc

SEQ ID NO: 1618 - DNA, 3195 bp, Artificial Sequence
  derived and/or modified sequence
atgaagatactgatcttgggaatctttctctttctgtgctctaccccggcctgggctaaagagaaacactactacatcggcatcatcgaaacgacttgggactacgctagtgaccacggagagaagaaactcatcagcgtggataccgaacattcaaacatttaccttcagaacggacccgatcgcattggacgcctctacaagaaagcactgtacctgcagtatacggacgaaactttccgcactactatcgagaagcctgtatggttgggttttctcggcccaattatcaaggccgagacgggcgataaggtctatgtgcatttgaaaaacctggctagtcggccgtacactttccattcacacggcattacgtactacaaggaacatgagggagccatctaccccgacaacactactgacttccaaagagccgacgataaggtgtacccgggagaacagtatacttatatgctgctggcgacggaagaacagtcgcctggagagggagacggaaattgcgtgacccgcatctaccattcgcacatcgacgcgccgaaggacattgcctccggattgatcggtccactgatcatttgcaaaaaagattcattggacaaagagaaggagaaacacatcgacagagaattcgtggtgatgttttcggttgtcgacgagaatttctcatggtacctggaggacaatatcaagacttactgttccgagccagagaaagtggataaggacaacgaggacttccaggaatcgaaccgcatgtattcggtgaacggttacaccttcgggtcactgcccggattgtcgatgtgcgcggaagatcgcgtgaagtggtacctgttcggaatggggaatgaagtggacgtgcatgctgcctttttccacggtcaggctctgactaataagaattaccgcatcgatactattaacctgttcccggcaaccttgttcgacgcgtacatggtcgcccaaaaccccggggagtggatgctttcctgccagaatcttaaccacctgaaggcgggattgcaggcattcttccaagtgcaagaatgcaacaaatcctcttcgaaggataacatcagaggaaaacatgtgcgccactactatatcgccgcagaggagatcatttggaattacgccccatcgggaatcgatatcttcactaaggagaatcttaccgctccgggatcggactcggctgtattctttgaacaaggaaccactcggatcggcggttcgtacaagaaactggtgtacagggaatacacggacgcgagctttacgaacagaaaagagcggggcccagaggaagagcatctgggaatcctggggccggtgatctgggcggaagtcggcgacaccatccgcgtgactttccacaacaagggagcttacccattgtccatcgaaccgatcggcgtgcgcttcaacaaaaacaacgaaggaacctactactccccgaactacaatcctcagagcagatctgtgccgccgtcggcctcgcacgtcgcccccactgaaaccttcacttacgaatggactgtgccaaaggaagtgggcccgaccaacgccgacccggtctgcctcgccaagatgtactactcggccgtggatcctaccaaagacatattcaccggtctgatcggaccgatgaagatatgcaagaagggatcactgcatgcaaacggacggcagaaggacgtcgataaggagttctacctgtttccgaccgtgtttgatgagaatgagtccctgttgctggaggacaacatcaggatgtttaccactgccccagaccaggtggacaaggaagatgaagatttccaggagtcaaataagatgcattccatgaacgggttcatgtacgggaatcagccagggctcaccatgtgtaagggtgacagcgtggtgtggtatctcttctccgcgggaaatgaggccgatgtccatggaatctacttctctggcaatacctacctctggcgtggcgaacgacgcgataccgcgaacctgtttccgcaaacctcccttaccttgcacatgtggccggatacggaaggcaccttcaacgtggaatgtctgaccaccgaccactatactggaggaatgaagcaaaagtacactgtgaatcagtgccgacgccaatccgaagatagcacgttttacttgggagaaagaacctactatattgctgccgtcgaagtggagtgggactacagcccccaacgcgaatgggagaaggagctccaccacctgcaggaacagaatgtctcgaatgctttcctggacaaaggcgagttctacatcggcagtaagtacaagaaggtcgtgtacagacagtatactgacagcaccttcagggtccctgtcgaaagaaaggcagaggaggaacacttgggcatcctgggaccacaactgcacgctgatgtgggcgacaaggtgaagatcattttcaagaacatggccacccgcccatactccattcatgcgcacggcgtccaaactgaatcctccactgtgactcccaccctcccgggggaaactcttacctacgtgtggaagatcccagagcgctccggggcaggaaccgaggattctgcgtgcatcccctgggcctattacagcactgtggaccaagtcaaagacctctactcaggactcatcgggccactgatcgtgtgcaggcgaccctacctcaaagtgttcaacccgcgtcggaagttggagtttgcgctcctgttcctcgtattcgatgaaaacgagtcctggtacctggatgacaacatcaagacctactcagatcaccctgaaaaagtcaataaggatgacgaagaattcatcgaaagcaacaaaatgcatgcaatcaacgggcggatgttcggaaatctgcagggccttactatgcacgtgggggacgaagtgaactggtacctcatgggcatgggaaatgaaattgacctgcacaccgtccactttcatggccacagcttccagtacaagcatcggggagtttacagctcggacgtgttcgatatcttcccaggaacctaccagaccctggagatgttcccgagaactccgggaatctggttgctgcattgtcatgtcaccgaccatattcacgcaggaatggagactacttacactgtgctccagaacgaagatactaagtccgga

SEQ ID NO: 1619 - DNA, 3195 bp, Artificial Sequence
  derived and/or modified sequence
atgaagatcctgatactgggcatctttctttttctatgcagtaccccggcatgggctaaggagaaacactattatattggcatcatcgaaaccacttgggactatgctagcgaccatggtgagaagaaactgatcagtgtggatacagagcatagcaacatctacctacagaacgggccagacaggataggcagactatataagaaagccctgtacctccagtacaccgacgaaaccttccgaacaacaatagaaaagcctgtgtggctgggttttttgggccccatcattaaagccgagactggagataaagtttatgtacacctgaaaaatctagccagccgcccatatacatttcatagccatggtatcacttactacaaggaacacgagggagctatatacccagataacaccacagactttcagagggctgatgacaaagtgtatcctggagagcagtatacatacatgctgctggcaacagaggagcaatctccaggagagggcgacggcaactgcgtgacccgtatttatcacagtcatattgatgcccccaaggacatcgcttctggtctgattggccctctgattatatgtaaaaaagacagcctggacaaagaaaaggaaaaacacatcgatcgggaatttgtggtcatgtttagcgttgtggatgagaatttctcttggtacctagaggataatataaagacctattgtagtgagccagagaaggtggacaaagacaatgaggactttcaagagtctaacaggatgtatagtgtgaatggatacacattcggctcactccctggcctgtcaatgtgtgccgaggatcgcgttaagtggtacctctttgggatgggaaacgaggttgatgtgcatgccgcctttttccacggccaggctctaacaaataaaaattatcggattgacacaataaatttatttcctgcaaccctatttgatgcatatatggttgcccagaaccccggagagtggatgttatcttgtcagaatctgaatcatctgaaggccggacttcaggccttcttccaagtgcaagaatgtaacaagagtagctccaaagataatatcagaggtaaacacgtacgtcattattacattgccgccgaagagattatatggaactacgcccctagtggtatcgacatctttactaaagaaaatctcacagcaccaggctcagattcagccgttttctttgaacagggcacaactaggatcggcggctcctacaagaagctagtgtatagggagtatactgacgcctccttcaccaaccggaaggagcgcggtccagaggaggagcacctgggcatcctgggccctgtcatttgggctgaggtgggagacaccatccgagtgacatttcacaataaaggagcttatccactgtccatagagcccatcggcgtgagatttaacaaaaataatgagggaacatactactccccaaactataacccccagtcacgaagcgtcccacccagcgcctctcacgtggcacctacagaaacctttacctatgagtggaccgtgccaaaagaagtgggcccaaccaacgctgacccagtttgcctggccaaaatgtactatagtgctgtggatcctaccaaggacatattcaccgggctgattggccccatgaagatttgcaagaagggcagtctgcacgcaaatggtcgccagaaggatgtcgacaaagaattttatctttttcctacagtgttcgatgaaaacgagtccttgcttctggaagataacatcaggatgttcactacagcccccgatcaggtggataaggaagatgaagactttcaagaatctaataagatgcattctatgaatggcttcatgtacggcaatcagccagggctgaccatgtgtaagggcgattcagtggtgtggtatctgtttagtgctgggaacgaggcagacgtccacggtatttacttcagtgggaacacatacttgtggagaggcgaacgacgcgataccgccaacctatttccccagacttcactgacattacacatgtggcctgacactgaagggacatttaacgtggaatgtcttactactgaccactataccgggggaatgaaacaaaagtataccgtcaaccaatgtcggcggcaaagcgaggattccaccttctacctgggtgagagaacctactatattgccgcagtcgaggttgagtgggactatagtccacagagggagtgggaaaaagaactgcatcacctgcaggaacagaacgtgagcaacgccttcctggacaaaggggagttttatattggaagtaaatataagaaggtggtgtacagacagtacactgacagcacctttcgcgtgccagtcgagcggaaagctgaggaggagcacctgggcattctgggcccacagctccacgccgatgtgggcgataaggttaaaattatttttaagaatatggccacccgcccttactccattcacgcccacggggtccagaccgaatccagcactgtgactcccactctgcccggggagactctgacctatgtgtggaaaataccagaaaggagtggagccggaaccgaggacagcgcctgcattccatgggcctactatagtaccgttgaccaggttaaagacctatattctggactgataggccctctaattgtgtgtagaaggccatacctaaaggtctttaacccaaggaggaagctcgagtttgcactgctattcctggtcttcgacgagaatgagagttggtatctggatgacaacatcaaaacttattctgatcaccctgagaaagtcaacaaggacgatgaagagttcatagaaagcaataagatgcacgccatcaacggtagaatgttcggcaatttacaagggctaacaatgcacgttggcgacgaggtcaactggtatctaatgggcatgggcaatgaaattgacctgcacaccgttcattttcatgggcattcttttcaatataaacaccgaggagtgtacagttccgatgtgtttgatatattccctggaacctaccagacccttgaaatgttccctcgcacccccggcatctggctactacattgtcacgtcacagaccatatccacgccggcatggagacaacctataccgttctacagaatgaagacaccaagagcggc

SEQ ID NO: 1620 - DNA, 3195 bp, Artificial Sequence
  derived and/or modified sequence
atgaagattttaatcttgggcatttttctgttcctgtgtagtaccccagcttgggccaaggagaaacactactatatcgggattatcgaaaccacctgggattacgcttcagaccacggggagaagaagctgatttccgtggacaccgagcattccaacatttatttgcagaatgggcccgatcgcattggacgactgtacaaaaaggctctgtatctgcaatacaccgacgagaccttcagaactacaatcgagaagcccgtgtggctaggatttttggggccaattattaaggctgaaaccggtgataaggtgtatgtccacctgaaaaatttggcaagccgaccgtacacattccactcacacggtataacatactacaaagagcatgagggggctatctaccctgacaacacaaccgacttccagagagccgacgacaaagtttaccccggagaacagtacacctacatgcttctggccacagaagaacagtcccctggcgaaggcgatgggaactgcgttaccagaatctatcattcacacatcgatgcccctaaggacatcgcctccggattaattggtccgctgatcatctgcaaaaaagacagtttagacaaagagaaggaaaagcatattgacagagaattcgtcgttatgttctctgtggtggacgaaaacttctcctggtacctcgaagacaacatcaagacgtattgttccgaacccgagaaggtggacaaggacaacgaagattttcaagagtcaaatagaatgtattccgtgaacggatatactttcggcagcttacccggtctcagtatgtgtgcggaggatcgtgtgaagtggtatttatttgggatgggtaatgaagtggatgtccacgcagcctttttccatggtcaggccttgactaacaagaactaccggatagataccatcaatctgttccctgccacactgttcgacgcatacatggtcgctcagaatcctggcgaatggatgctgtcttgtcaaaacctgaaccatctcaaagctgggctgcaagcattcttccaggtgcaggaatgcaataagtcttcaagcaaggataatatccgcggaaagcacgttcgtcactattacatcgcagcagaagaaatcatctggaattacgcaccgagcggcatagacatttttaccaaagagaatctgacggcccctggaagcgatagcgcggtcttcttcgaacaggggaccacgagaattggcggctcctacaaaaagttagtgtatcgagaatacactgatgcttcatttacaaatcggaaggagcgcggtccagaagaagaacatttgggcatactgggaccagtgatctgggccgaggttggcgatactatccgcgtaacttttcacaacaagggagcctaccctctgtcaatagaacctatcggcgtgagatttaacaaaaacaacgagggtacgtactatagcccaaactataacccacagagcagatccgtgcctccctccgcatcacatgtagcgccaacggaaacgttcacatacgagtggaccgtgcccaaggaggtgggacccactaacgctgatccggtgtgccttgcaaagatgtactattccgcggttgacccaaccaaagatattttcaccgggttgatcggacccatgaaaatttgcaaaaaaggaagcttgcacgccaacggccggcagaaggacgttgacaaggaattctacttgtttccgaccgtgtttgatgagaacgagtctttgctgctagaagataatatacgaatgttcacgacagctcccgaccaggtcgataaggaagatgaggatttccaggagagcaacaaaatgcatagcatgaatggtttcatgtatggaaatcagccagggctcaccatgtgtaagggggacagcgtggtgtggtaccttttctccgcagggaatgaggcagatgtgcacggcatctacttttctgggaacacttacttgtggcgcggggagaggcgggatactgccaacctattccctcaaactagtctgaccctgcacatgtggcctgacacagagggtaccttcaacgttgagtgcctgacaacggaccactataccggagggatgaaacaaaagtatactgttaaccagtgcaggcgccagtctgaagactccactttctacctgggtgagcgcacatattacattgccgcagtggaggtcgagtgggattatagcccacagcgggaatgggagaaagagttgcatcatttacaggagcagaatgttagcaacgcattcttggacaagggcgagttttatatcggttctaaatacaaaaaggtggtgtaccgtcaatatacagacagcacattccgagtgcctgtggagcggaaggcggaggaagagcacttggggatcctgggtcctcagctgcacgcggatgttggtgacaaggttaagatcattttcaagaacatggctacccggccatattccatacacgcacatggagtgcaaactgaatcctcaaccgtgacgccgacgctgcccggcgaaacgctgacttacgtgtggaaaattccagaaaggagcggggcaggtacagaagactctgcctgtatcccctgggcatattactcaacagtggatcaagtcaaagacctctatagcggcctcatcgggcccctcattgtgtgcaggcgaccctatctgaaggtgtttaatcctcgaagaaagctggagttcgcactcctctttttagtttttgatgagaatgagtcctggtatctggatgataatattaaaacctacagcgatcaccccgaaaaggtgaacaaagacgacgaagagttcatcgaatccaacaaaatgcatgccatcaatggacgaatgttcggcaaccttcagggcctcaccatgcacgtaggcgatgaggtcaactggtacctgatgggcatgggcaatgagattgacctacatacagttcacttccatggtcacagctttcagtacaaacatagaggagtttactccagtgatgtgtttgacatcttccccggcacgtaccagaccctggagatgttccctaggaccccaggaatctggctcctccattgccacgtgacggaccacatccacgctggcatggaaacaacttatacggtgctgcagaacgaggacaccaagagcgga

SEQ ID NO: 1621 - DNA, 3195 bp, Artificial Sequence
  derived and/or modified sequence
atgaaaatcctgatccttgggatcttcctgtttttatgctctacccctgcctgggcaaaagagaagcattattacatcggtatcatcgaaactacctgggactatgccagcgaccacggtgaaaaaaagctaatctctgttgatactgaacacagcaacatctacctccagaacggcccagacagaattggtaggttatataaaaaggctctgtatttgcagtacacggatgagacatttcgcaccacgatcgagaagcccgtgtggctaggattcttgggccccatcataaaggcagaaaccggtgataaagtgtacgtccacctgaagaatcttgcatcccggccatacacattccatagccacgggattacctactataaggaacatgagggcgctatttaccctgacaatacaactgacttccaaagagctgacgataaggtctaccccggtgagcagtatacatacatgcttttagcaacagaagaacagtcccccggggagggagacggtaactgcgtgactcgcatctaccactctcacatagacgcaccaaaggatatagccagcgggctgatagggcccctgatcatctgcaaaaaggattccctggacaaagagaaagagaagcacatagacagggagttcgtcgttatgttcagtgtcgtggatgagaacttcagctggtatcttgaggacaatatcaaaacttattgctccgagccggaaaaagtcgacaaagataacgaggattttcaggagtctaatcggatgtacagtgttaatggatacacctttggatctctgcctggcctctcaatgtgcgccgaggatagggtgaagtggtacctgttcgggatggggaacgaggttgacgtccatgccgcatttttccacggccaggccctcactaataaaaattaccgtatcgatacaattaacctctttcctgcgacgctcttcgatgcttatatggtggctcagaacccgggggagtggatgttatcatgtcagaatcttaatcacctgaaggccgggctacaggccttctttcaggtgcaggagtgtaataaatccagtagcaaagataacatccgcggcaagcatgtgcgccactactatatcgctgccgaggagatcatatggaattacgcgccctcagggatcgacatttttaccaaagagaatctgacagcacctgggtcagattccgccgtattttttgaacagggtacaacccggatcggcggatcctacaagaaactggtgtaccgagagtatactgatgcctctttcaccaatagaaaagaacgcggcccagaggaagaacatctgggtattcttggacccgtgatctgggcagaggtaggtgacacaatccgagtcactttccacaacaaaggcgcgtatcctctcagcatagagcccattggggtgcgtttcaacaagaacaacgagggcacttattattccccaaattataatccgcaatcgagaagcgttcctcccagcgcctcccacgtcgcccccaccgaaacattcacatacgagtggaccgtcccaaaagaggttggtcctaccaacgctgaccccgtgtgtttagccaaaatgtactactcagctgtcgatcccacgaaagatatcttcaccggactcatcggccctatgaaaatatgcaaaaagggcagcctacacgcgaacggcagacaaaaagacgttgacaaggaattttaccttttccccacagtgtttgacgagaatgaatctctgctgttagaagataacatacgtatgtttactacagcccccgaccaggtggataaggaagacgaggacttccaggagtccaacaagatgcatagtatgaacggatttatgtatggtaatcagcctgggctgacgatgtgcaagggagactctgtggtgtggtatctgttttccgcggggaacgaggccgatgtgcacgggatctatttctcgggaaatacctacctgtggagaggagagaggcgagacaccgctaatctttttccccagacatcactgaccctgcacatgtggcccgatactgaaggaacatttaatgttgagtgtctcactacagatcactatactggagggatgaaacagaagtatactgtcaatcagtgccgaagacagtctgaggacagcactttctaccttggagagcggacctactatatcgcagccgtggaagtagaatgggactactctccccaacgagagtgggagaaggaactccaccatctccaggaacagaacgtctctaatgctttcttggacaagggagagttttacataggaagtaagtataagaaggttgtctaccgacagtacacggattccaccttcagggtccccgtggaacggaaggccgaggaggaacacttggggattctggggccacagctgcacgcagatgtgggcgataaggtcaagattattttcaagaacatggcaacccgcccatactccattcacgctcacggagtgcagaccgagtcaagcacagtgacacctaccctgcctggggaaacattgacgtacgtatggaagattccggagagaagcggagccgggacagaggatagtgcctgcatcccgtgggcttattacagtactgttgaccaggttaaagacttgtattcaggcctcatcgggccattgatcgtatgccgccgtccatatctcaaggtttttaatcctcggcgcaagcttgaatttgctctgctatttctggtgttcgatgaaaatgaaagctggtatctcgacgacaacattaagacatactctgatcatccggagaaggtgaacaaagatgacgaggagtttatcgagagtaacaagatgcacgccattaacggccggatgtttggaaatctgcaagggctgactatgcatgtaggagacgaagtcaactggtaccttatgggaatggggaatgagatagaccttcacaccgttcattttcacggccactcattccaatacaagcatcgcggcgtctattcttctgatgtgtttgacatcttcccagggacttatcagaccctggaaatgtttccccggacccctggaatctggctgttacattgccacgtgacggaccatatccacgccgggatggagacgacttacacagtgctacaaaatgaggatacaaaatccggg

SEQ ID NO: 1622 - DNA, 3195 bp, Artificial Sequence
  derived and/or modified sequence
atgaagatcctgatccttggaatcttcctgtttctctgcagcacaccagcgtgggcaaaggagaagcactactacattggtattatcgaaacaacatgggactacgcctcggatcacggggagaagaaattgatctcggtggacactgagcatagcaacatttacctccagaatgggcccgacaggatcggaaggttgtataagaaagctctgtatcttcagtacacagacgagacattccgaaccactatcgagaaaccagtgtggctggggttccttggaccgatcattaaggccgaaaccggcgacaaagtgtatgttcacctaaagaacctagcttcaagaccttacacttttcactctcatggcatcacatactataaagagcacgaaggcgccatataccctgacaataccaccgactttcagagagccgatgataaggtttatccaggcgaacagtacacttacatgctcctggctactgaggagcaaagcccaggcgaaggggacggaaattgcgtcacacgtatctaccattctcacatagacgctccgaaagacattgcgtccggactgatcggtcccctgatcatctgtaagaaagattccttggacaaggaaaaggagaaacatattgaccgggaattcgtagtcatgttttctgtagtggacgaaaactttagttggtatctcgaggataatatcaagacatactgttctgaacccgagaaagtcgacaaggacaacgaagactttcaagagtcgaataggatgtattccgttaatgggtacacgtttggcagcctcccgggactgagcatgtgcgcggaagatcgagtcaaatggtacctttttggcatgggcaatgaggtggacgttcacgccgcattctttcatggtcaggcccttactaacaaaaattataggattgataccataaatctctttcctgcgaccctcttcgatgcttatatggtcgcgcaaaacccaggagaatggatgctgagctgccagaacctgaaccatctaaaggccggcctgcaggcgttcttccaggtccaagagtgcaataaaagcagtagtaaagataatattcgtgggaagcacgtgaggcactactacatcgccgccgaagaaatcatttggaactacgctcccagcggaattgacatctttacgaaggagaaccttactgccccagggtcagactctgccgtctttttcgagcaaggcactacccggatcggcggtagttacaaaaagctcgtctaccgtgaatatacagacgcctcttttacaaatagaaaggagcgtggcccagaggaggagcatctgggcattctgggaccggtcatctgggccgaggtgggggacaccattcgtgtcaccttccacaataagggcgcttaccccctgagtattgagcctatcggggtgcggtttaacaaaaataatgagggcacctattactccccaaactataacccacagagtcgctccgtccctccctcagcatctcatgtggccccaacagaaactttcacctatgaatggaccgtgccaaaggaagttggacctacaaatgctgaccctgtgtgtctcgctaaaatgtactactcagccgtggaccccaccaaggatatcttcaccggattgatcggtcccatgaagatatgcaagaaggggtcgctccacgccaacggcagacagaaggatgtagacaaggagttctacctatttcctaccgttttcgatgagaatgaatcactattgctcgaggacaacattcgcatgtttacaactgccccagaccaggtcgacaaagaggacgaggactttcaggaatcaaacaagatgcacagtatgaatggctttatgtacggaaaccagcccgggctgaccatgtgcaaaggtgattcagttgtgtggtatctgtttagcgcaggcaatgaggccgatgtgcatggtatctacttcagcggcaatacctatttgtggcgaggtgagcggcgcgacaccgccaacctgttcccacagacttctctgactctacacatgtggcctgataccgagggaacgtttaatgtggaatgcctcacaactgatcattataccggaggcatgaagcagaaatacaccgtaaatcagtgcaggagacagtccgaggattccacattttacctcggggagcggacctattacatcgcagcggttgaggtggagtgggactactcaccacagagggaatgggaaaaagagctccaccacttgcaggagcaaaatgtaagcaacgcctttttggataaaggcgagttttatattggcagcaagtacaagaaagtcgtatatcggcagtacactgactctacattcagagtccctgttgagaggaaagccgaggaagagcacctagggatcctgggaccacaactccacgccgacgtgggcgataaagtcaaaatcatattcaagaatatggcaacacgcccatacagcatccatgcacacggagtacaaacagagtcttcgacagtgacgcccacactccccggagaaactctgacgtatgtgtggaaaattcctgagcgctctggagctggcaccgaggactcagcctgtatcccctgggcttattactccacggtggatcaggtgaaagatctttatagcggccttattggccctctgattgtttgccggcgcccttaccttaaggttttcaacccacgacgcaaactcgaattcgctctgctgttcctagttttcgatgagaatgaatcctggtatctggatgataacataaaaacctatagcgatcacccagagaaagtgaacaaggacgacgaggagttcattgagtccaataagatgcatgccatcaacggcagaatgtttggtaatctgcagggattgacaatgcacgtcggcgatgaagtgaattggtacttgatgggcatgggaaacgagatcgatctgcatactgtccatttccatggccactcattccagtacaaacatagaggagtttacagctccgatgtgtttgacatctttccaggaacctaccaaacactagaaatgtttccgagaacgcctggtatttggctacttcattgccatgtgactgatcatatccatgctggcatggaaacgacttatacagtactgcagaatgaagatactaagtccgga

SEQ ID NO: 1623 - DNA, 3195 bp, Artificial Sequence
  derived and/or modified sequence
atgaagatcctcattctcgggatctttctttttctctgtagcacaccggcctgggcgaaggagaaacactattatatagggattatagagaccacctgggattacgctagcgatcacggggagaaaaagctgataagtgtggataccgagcattccaatatatatttgcaaaacggccctgacaggattggcagactgtacaagaaggcattatatcttcagtataccgacgaaacgtttagaacaaccattgagaaaccagtttggctgggttttttgggacccattattaaggcagaaaccggtgataaggtgtacgtccatctgaagaatcttgcttccaggccatacacgtttcacagccacgggatcacttactacaaggagcacgagggcgccatttacccagataatacgactgatttccagcgagccgatgacaaggtgtatccaggcgagcagtacacctacatgctgctggccacggaggaacagtctccgggggaaggagatggcaactgtgttacccggatctaccacagccatattgacgctccaaaagatatagccagtggcctgatcggccctctgatcatttgtaagaaagatagtctcgataaggaaaaggaaaagcatatcgacagagagtttgtggtgatgttttccgtcgtggatgagaacttttcttggtatctcgaagacaacataaaaacctattgctccgaacctgaaaaggtggataaagataacgaagacttccaggaaagcaaccgcatgtacagcgttaatggatacaccttcggaagtctgcctgggctatccatgtgcgccgaggacagggtcaagtggtaccttttcggaatgggtaatgaagtcgatgtgcacgctgcgttcttccacggtcaggcccttactaataaaaattaccggatcgatacaatcaacttgttccccgccaccttattcgacgcttatatggtcgctcaaaacccgggcgagtggatgctcagctgtcaaaatctcaatcaccttaaggcgggccttcaggctttctttcaagtgcaagaatgcaacaagtcttctagcaaagataatatcagaggcaagcatgtcaggcattattatatcgcagccgaggagattatctggaactacgcaccctcaggcattgacatattcaccaaagaaaatctgactgcacctggatccgactctgccgtcttcttcgagcagggcactaccagaattggagggtcgtacaagaagttggtgtaccgcgagtatacggacgcttccttcactaataggaaagagcgcggccccgaagaggagcatcttggaatactagggccagtgatctgggccgaggtgggagatacgatccgggttaccttccataataaaggtgcctaccctctctccattgagcccatcggagttcgtttcaataagaacaatgagggcacctattattccccgaactacaatcctcagagccgctccgttccaccatccgcatctcacgtggcgccaacagagaccttcacttatgagtggaccgtcccaaaggaggttggcccgacgaacgccgatcccgtgtgcctggccaagatgtattactcagccgttgaccctaccaaggacattttcacaggtttaatagggccaatgaaaatctgcaagaagggctctctccacgccaatggtagacagaaagacgtggataaagagttttacctgttccctacagtgttcgacgaaaacgaatctctgctgctggaagataatattcgcatgtttactacagctcctgaccaggtggataaagaggatgaggatttccaggaaagtaacaaaatgcactctatgaacgggtttatgtacggcaatcagcctggtctaacaatgtgtaagggggactcggtggtgtggtaccttttcagtgccgggaatgaagctgacgtccacggtatatatttcagcgggaacacctatttgtggagaggcgagaggcgggataccgccaacctctttccgcagaccagccttactttacacatgtggcctgacaccgagggtacttttaacgtggaatgtctaacaaccgatcactacacggggggaatgaagcaaaagtatacggtgaaccagtgcaggcgccaatctgaggactccacattttatttaggggagcgcacttactacatagccgccgtcgaggtggagtgggactacagcccccagcgggaatgggaaaaagagctccaccatttgcaggaacaaaacgtttccaacgcctttcttgacaagggcgaattctacatcggaagcaagtataagaaggtagtataccgccagtacacagattccacattccgggtgccggtggaaagaaaggccgaggaggagcatctgggcatactggggccccaattacatgcggacgttggggataaagtgaaaatcatctttaagaatatggccacaagaccatactccatccacgcccacggcgtccagaccgaaagctctacagtgactccaaccttgcccggcgagacccttacgtatgtgtggaagatccctgagcggagtggtgcaggcaccgaggatagtgcttgcataccttgggcctattactcaaccgtcgatcaggtgaaagatctctacagtgggctgattgggcccctcatcgtgtgcaggcggccctatcttaaggtgtttaacccgagaaggaagctcgaatttgccttgctgttcctggtgttcgatgagaacgaatcatggtatctggacgataacatcaagacctactctgatcacccagagaaagtcaataaagatgatgaagagttcatcgaaagcaacaaaatgcacgcaataaacgggagaatgttcggaaacttacagggacttacgatgcacgtgggagacgaggttaattggtaccttatggggatgggaaatgaaattgacttgcacacagtgcacttccacggacacagcttccagtacaaacaccgtggggtctactcctctgacgtattcgatatattcccagggacctaccaaacactggagatgttccccagaactccaggcatatggctgttgcattgtcacgtgactgaccacatccacgccggtatggagaccacatacacagtgctgcaaaatgaggacacaaaatctgga

SEQ ID NO: 1624 - DNA, 3195 bp, Artificial Sequence
  derived and/or modified sequence
atgaaaatcctgatactcgggatctttctgtttctttgctccacccccgcgtgggccaaggaaaaacactactatattggcattatcgaaacaacttgggactatgcgtccgaccacggggaaaagaaacttatatctgtggatacggaacacagcaacatctacttgcagaacggccccgaccgcatcggacgcctgtataaaaaggccctgtacctccagtacaccgacgagaccttccggacgacaattgagaagcccgtgtggctggggttcctgggaccgattatcaaggcggagactggagataaggtgtacgtccatctgaagaacctggcctctcgcccatatacttttcactcacacgggattacctattataaggagcatgagggggctatttaccctgacaatactaccgattttcagcgggcagatgataaagtatatcccggcgaacagtatacatacatgcttctcgcaactgaggaacagtcccccggggagggagacggtaactgcgtgaccagaatataccactcacatattgacgcccccaaagatatagcatccggcctcattgggccacttattatttgtaagaaggatagccttgataaggagaaggagaaacatattgacagggagttcgtggtgatgtttagtgtggtcgacgagaacttttcttggtatctggaagacaacataaaaacctactgtagcgaacctgaaaaagttgacaaagacaatgaagatttccaggagtccaaccgaatgtacagtgtgaacgggtacacgtttgggtcccttccaggcctgagcatgtgcgcagaagatcgggttaagtggtatttgtttggtatggggaatgaggtggatgtacacgcggcatttttccacggtcaggccctgacaaataaaaattacagaatcgatacgatcaatcttttcccggctaccctgttcgatgcttacatggtcgcacagaatcccggcgagtggatgttgtcatgccaaaacctgaatcatctcaaggccggactgcaagcttttttccaggttcaagagtgtaacaaatcatcttcaaaagacaacatacggggaaagcacgtccgccactactatatcgcagcagaggaaattatttggaactacgctccctcaggcatcgacatcttcacaaaagaaaaccttacagcccctggcagcgacagcgctgtcttcttcgaacaagggaccactaggatcggagggagctacaaaaaattggtgtacagggagtacacggatgcctccttcactaaccggaaggaacggggtcccgaagaagagcatctgggtattctcgggcccgtcatatgggctgaggtcggagacaccatccgggtgaccttccacaacaaaggcgcctatcccctctccatcgagcccattggagtcagattcaataaaaataatgaagggacttactatagccccaattataacccccagagccggtccgtgccacctagcgcctcccacgtggctccaacagaaacatttacttatgagtggacggtacccaaggaggtgggacccacaaatgcagacccagtgtgtctggccaaaatgtattactcagcggtcgatccaacaaaggatattttcactggtctgatcgggcctatgaaaatatgcaagaagggaagcctgcatgccaatggacgccaaaaggatgtcgacaaggaattttacctgttccccacagtcttcgatgagaacgaatcattgctcctggaggacaacattagaatgtttactactgccccagaccaggtcgacaaggaagacgaggactttcaggagagcaataagatgcactctatgaacggcttcatgtacgggaatcagcccggcctcacaatgtgtaagggtgacagcgtcgtgtggtacctcttcagcgcaggcaatgaggccgatgttcacggcatctatttctccggaaatacgtacctctggaggggggagcggcgagacaccgcaaacctcttcccgcagacatctctcacacttcacatgtggcccgataccgaaggcaccttcaacgtggaatgtttgaccactgatcattacacaggcggaatgaaacagaaatatactgtgaaccagtgcaggaggcagagcgaagatagcacattttacctgggtgaacggacttattacattgcagccgttgaagtggaatgggattattcacctcaaagagagtgggagaaagaattgcatcacctccaagagcagaatgtctccaatgccttcctggacaaaggggaattttatattggttcaaagtataagaaggtggtatacaggcagtataccgacagcactttcagggtgcccgtagagaggaaggccgaggaagagcatcttggtattctcggcccccagctccacgccgatgttggcgacaaagtcaagatcatcttcaagaacatggctactcgaccttatagcattcacgcccatggggtccagacagagagttccaccgtcaccccgactctcccaggggaaaccctgacctatgtttggaagatccccgaaagatccggagctgggactgaagattccgcttgcatcccttgggcgtattattccaccgtggatcaggtgaaggacctgtactctggattgattggcccacttattgtttgccgacggccttacctgaaagtttttaacccccgacgcaaacttgagttcgctcttctcttcctcgtgtttgacgagaacgagtcttggtatctggacgataacataaaaacttattccgaccatcctgagaaggtgaacaaagacgacgaggaattcattgagagtaataagatgcacgccattaatggcagaatgttcgggaaccttcagggactgacgatgcatgtgggtgatgaggtcaactggtacctgatgggaatggggaatgagatcgacctgcataccgtgcacttccatggccactcatttcagtacaaacacaggggggtgtactcaagtgacgtcttcgacatcttccccggcacgtatcaaaccctggagatgttcccgagaactccaggaatatggctgctgcactgccacgttactgatcatattcatgctggcatggagacaacctatacagtactgcagaatgaggacacaaagtctggg

SEQ ID NO: 1625 - DNA, 3195 bp, Artificial Sequence
  derived and/or modified sequence
atgaagatcctcatcctgggaatcttccttttcttgtgtagcacacctgcctgggccaaggaaaagcactattatatcggaatcatcgagacaacctgggactacgccagcgatcatggcgagaagaagctgatttctgtggacacagaacattccaatatatatctgcaaaacggccccgatcgtattggaaggctgtacaagaaggccctgtatcttcaatacaccgacgagactttcaggaccactattgagaaacccgtctggctgggtttcttgggtcccatcatcaaggcagagaccggtgacaaagtctacgtccatcttaagaatctggctagtagaccctatacattccattcccacggcattacatattataaggagcacgaaggtgccatataccctgacaacactactgactttcagagagctgacgataaggtgtacccaggcgaacagtacacctacatgctcctggcaaccgaggaacagagtcccggagagggtgatggaaactgtgtgaccagaatttaccacagccatatagatgcacccaaagacatcgctagcggcctcataggacccctcatcatatgtaagaaggacagtttggacaaggaaaaagaaaagcacattgatagggaattcgtggtgatgttctccgtagtcgacgaaaatttctcctggtacctggaggacaacattaagacatattgttccgaacccgagaaggtggacaaggataatgaggattttcaggaaagtaaccgcatgtactcagtgaatggatatactttcggatctttgcctggactttctatgtgtgctgaagacagggtaaaatggtatcttttcggaatgggtaatgaagtggacgtgcacgcagccttcttccatggccaggcactcacaaacaaaaactacaggatcgacactataaatctgtttcctgccacactctttgatgcatacatggttgcacaaaatcccggcgagtggatgctgtcatgtcagaacctgaaccacctgaaagccggactgcaggccttcttccaggtacaggagtgcaataagtcttcatctaaggacaacatcaggggtaagcacgtccgtcactactatatcgccgctgaggagatcatctggaattacgccccaagcggcatcgacatctttacaaaggagaacttgactgctcctggcagcgactctgctgttttctttgaacagggaactacccgtatcggaggatcatacaagaagttggtgtacagagaatataccgatgcttccttcaccaataggaaggaaaggggacccgaggaagagcacctcggaattctcggtcccgtgatttgggcagaagtgggagataccattcgtgtgacatttcacaataaaggagcttaccctttgtccatcgagccaataggtgtgaggtttaacaagaataacgagggtacctactattctccaaactacaacccacagagccgctccgtcccccccagtgctagtcatgtggctcccaccgagactttcacatacgagtggaccgtacccaaagaggtaggtcccacaaacgcagatcctgtctgtctcgccaagatgtattatagcgccgtcgaccccaccaaagatatcttcacaggcctcattggtcctatgaagatctgcaagaagggaagcctgcatgctaatggtcgccagaaggacgtggataaagagttctatttgtttccaactgtgtttgacgagaatgagtctttgctgctggaagataacatccgcatgttcaccactgctcccgaccaggtcgataaggaggatgaagatttccaggagagtaacaaaatgcactctatgaacggttttatgtacggaaatcaacctggattgaccatgtgcaagggtgactcagtcgtgtggtatctttttagcgccggcaatgaggctgatgtgcacggcatctatttttccggaaatacttatttgtggcgtggcgagcgtcgcgataccgccaacctcttcccacagaccagtttgacacttcacatgtggcctgacacagagggtaccttcaacgtagagtgtcttacaacagaccattataccggaggcatgaaacagaaatataccgtgaaccagtgcaggaggcagtctgaggattccacattctatcttggcgagcgtacctattacattgccgctgtcgaagtagagtgggactactctccacagcgtgagtgggaaaaagaactccatcatctgcaagagcaaaacgtatctaatgcatttctcgacaagggcgagttctacatcggcagtaagtataagaaggtcgtctacaggcaatacaccgactccacattcagagtgcctgtggaaaggaaggctgaggaagagcaccttggtattttgggaccccaactgcatgctgacgtgggcgacaaggttaaaatcatcttcaagaacatggcaactaggccctactccatacacgctcatggtgtccaaacagagtctagcactgtgactccaaccctgccaggcgagacactcacctacgtgtggaaaattccagaaaggtctggtgctggcactgaagattccgcttgtatcccatgggcctactactcaaccgtggatcaggtgaaggatctgtattcaggtttgatcggaccactcattgtttgtaggaggccctacctgaaagtgttcaaccctcgcaggaaacttgagtttgcactgttgtttctcgtgttcgatgagaacgagagctggtatctggatgacaacatcaaaacatactctgaccaccctgagaaggtgaataaggacgatgaggagttcattgaaagcaataagatgcatgctattaatggtcgcatgtttggcaatctgcaaggactcaccatgcatgttggtgacgaagttaactggtacctgatgggtatgggcaatgaaattgatctccatactgtgcattttcacggccattcattccagtacaagcacaggggcgtgtactccagtgatgttttcgatatcttccccggaacctaccagacccttgagatgttcccaaggacccccggcatatggctgcttcactgtcacgtgaccgatcacattcacgccggcatggaaaccacatacaccgtgttgcaaaacgaagatactaagtccggc

SEQ ID NO: 1626 - DNA, 3195 bp, Artificial Sequence
  derived and/or modified sequence
atgaagattctgattcttggtattttcctattcctatgttctactccagcatgggcaaaggagaagcactattatatcggtataattgaaactacgtgggattacgcatcagaccatggcgagaagaaattaatcagcgtagatacagagcactctaatatctacctccagaatggtccagaccgcatcggtcgactgtataagaaggctttgtatttgcaatatacagacgaaacatttcgcacgaccatcgagaagccggtgtggttgggcttcctggggcctattattaaggcagaaaccggcgataaggtgtacgtccatttaaaaaatctggcttcaaggccatacacgttccacagtcatggcattacatactacaaggaacacgagggtgcgatataccccgataatacaaccgattttcagcgggcagacgataaggtgtaccctggtgagcagtatacttatatgttgctggctactgaagagcagtcccctggtgagggtgatgggaactgcgtgaccagaatctaccactctcacatcgacgccccgaaagatatcgcatctggcctaatcggtcccctgataatctgcaaaaaagatagcctggataaggaaaaggaaaagcacatcgatagggagttcgtggtcatgttctctgtggtggatgagaacttcagctggtatctggaggacaacatcaaaacatactgctccgagcccgagaaagtggataaagataatgaggacttccaggaatccaaccgtatgtattcagtgaacggatatacattcgggagcttaccaggtctctccatgtgtgcagaagatcgcgtcaaatggtatctgttcggtatgggaaacgaagtagatgtgcacgctgcattttttcacgggcaggcattaacgaataagaattaccggattgacacaattaacttattccctgctaccctgttcgatgcatatatggtggctcagaacccgggggaatggatgctgtcctgccagaacctgaaccatctaaaggcaggtctgcaggctttcttccaggtgcaggagtgcaataaaagcagctcaaaggacaacatccggggtaagcatgtccgtcactactatatcgctgcagaggagatcatctggaactacgccccaagtggaatcgatatttttactaaggagaacctcaccgctcccggaagcgactccgccgtgttctttgagcaaggcaccaccaggatcggaggaagctataaaaagctcgtgtaccgggagtacactgatgcttcctttaccaaccgtaaggagcggggacctgaagaggaacacttaggaatcttgggtccggtgatctgggcggaggttggcgataccatccgcgtgacattccataataagggagcttaccccctgtccattgagcccatcggggttagatttaacaaaaataacgaggggacatattattccccgaattataatccgcagtcccgatctgtgccgcctagtgcatcccacgttgcacccaccgagacctttacctacgagtggactgtgcctaaagaagtcggccccaccaatgccgatccagtctgtcttgcaaagatgtattactcagccgtggaccccacaaaggatatctttacggggctcatcgggccaatgaagatttgtaagaaggggagcctgcacgccaatggacgccaaaaggatgtggacaaggagttttatctattccctactgtatttgatgaaaacgagtccttactgctggaggataacattaggatgttcaccacagcgcccgatcaggtggacaaagaggacgaagacttccaggaaagcaataaaatgcactccatgaatggcttcatgtacggaaatcagcccggccttacaatgtgcaagggggatagtgtggtctggtacctgttcagcgccgggaacgaagcggacgtccacgggatctacttttctggcaacacctacctatggcgcggcgaacgacgtgacaccgctaacttattccctcagacatcactgacgctgcatatgtggccagatacagaggggacattcaatgtggagtgccttactactgaccactacaccggcgggatgaaacagaaatacacggtcaatcagtgcaggcgccagtcagaggattcaactttctacctcggagaacggacctactacatcgctgcagtagaggtggagtgggattacagtccacagcgcgagtgggagaaagagctgcaccatctgcaagagcagaacgtgtcaaatgcgttcctagacaaaggagagttctacattggcagcaagtataaaaaggtggtgtacagacagtacacagactctacctttagagtgccagtggaacgaaaagccgaagaggagcaccttggtatcttgggcccccagctacacgccgatgtaggggataaggtcaagataatctttaaaaatatggccactaggccctactctattcatgcccacggagtgcagactgagtcatcaaccgtcacacccaccctgcctggggagaccctgacatacgtgtggaagatccctgagcgctctggagccggtactgaggactccgcctgcatcccctgggcatattatagcacggtcgaccaagttaaggatctgtattccggtttgattggacctctgatagtctgccggcgaccatatctgaaggttttcaaccccagacgtaaacttgaattcgcgctgctgtttctcgtgtttgatgaaaacgaaagctggtatttggacgacaatattaagacttactcagatcatccagaaaaagttaacaaggatgacgaagaattcattgaatctaacaagatgcatgccataaatggtagaatgttcggcaacctgcagggcctgactatgcacgttggagacgaggtgaattggtatcttatgggtatggggaatgagattgacctgcacacagtacactttcacgggcatagctttcagtataagcaccgcggagtgtatagctccgatgtgttcgacatctttcctggcacctaccagaccctggagatgtttcctaggactcccggtatatggctcctgcattgccacgtgaccgaccacattcatgccggcatggagacaacttacaccgtgctgcagaatgaggatacgaagtcaggg

SEQ ID NO: 1627 - DNA, 3195 bp, Artificial Sequence
  derived and/or modified sequence
atgaagatcctcattctggggatatttctcttcttatgtagcacccccgcgtgggccaaagaaaagcattactatattgggataattgagacaacctgggactacgccagcgatcacggagaaaagaagctgatcagcgtggatacggaacacagtaatatctatctgcagaatggccccgacagaattggtcggctgtacaaaaaggcgctgtacctgcagtacacagacgagacctttcgaactaccatcgagaagcccgtctggctcggctttttgggtccgataattaaggctgagaccggagataaagtgtacgtgcacttgaagaacctcgcctctaggccctacactttccattcccatgggatcacctactacaaagagcacgagggagctatctacccggataatacaacagattttcagcgtgctgacgataaggtgtacccaggtgaacagtatacttacatgctgctggcgacagaggagcagtcacccggtgagggcgatggcaactgcgtgactcggatctatcactcccacatcgacgcgccgaaggacatcgcaagcgggctgatcggccctttaattatttgcaagaaagatagcctggataaggaaaaagaaaagcatatcgacagggaattcgttgttatgttttctgtcgtagatgaaaacttttcctggtacctggaggataacataaaaacttactgttccgagcccgaaaaagtggacaaggacaacgaggactttcaggagagtaatcgcatgtactcggtgaatgggtacacattcggttctctccctgggctcagcatgtgcgctgaggaccgggtgaaatggtatctgttcgggatggggaatgaggtcgacgtgcacgctgcgttctttcacggtcaggcactgaccaataagaactaccgcatcgatacaattaacctgtttcccgctacacttttcgatgcctacatggttgcacagaatcctggtgaatggatgctatcgtgccagaatctgaaccatttgaaggcaggtctgcaagcgttctttcaagttcaggagtgcaataagtcaagctctaaagacaacatccgagggaagcacgtgagacattattacattgccgccgaagagatcatatggaactatgccccctccggcatcgacatttttactaaagagaatctcactgcccctggaagcgactcggccgtgttcttcgaacaggggacgacacggattggcggttcctacaaaaagttggtgtatcgcgaatacaccgatgcctcattcactaacagaaaggaacgcggcccggaagaggaacatcttggcattctgggtccagtgatctgggctgaggtgggcgatacgattcgagtcaccttccacaacaaaggagcatacccactgagtatagagcctattggagtgagatttaacaagaacaacgagggcacatattatagccccaactataatcctcagagtagatccgtaccccccagcgcaagccatgtggcaccaactgagacattcacctacgagtggacggtcccaaaggaggtcggccccaccaacgcggatcccgtgtgtctggcaaaaatgtactatagcgctgtggacccaaccaaggatattttcacaggcctcatcggccccatgaaaatttgcaagaaagggtctttacacgctaacgggagacagaaggacgtggacaaggagttttacctgtttcctacggttttcgacgaaaatgagtccttgctccttgaagacaacattcgcatgtttacaaccgccccggatcaggtggataaagaagacgaggattttcaagagtctaataaaatgcatagcatgaatggctttatgtatggcaatcaacctggtttgacaatgtgcaaaggagactctgtggtttggtatttgttcagcgcagggaacgaggccgatgttcatggcatctatttcagtgggaacacctatctatggcgaggcgagaggagagacaccgccaacctgttcccacagacctccttaactctacacatgtggcctgacaccgagggcaccttcaatgtagagtgcctgaccactgatcattacaccggaggtatgaagcagaagtacaccgtaaatcaatgccgccgccagtcagaggatagtacattctaccttggggaacggacctattacattgcagctgtcgaagtcgagtgggattacagccctcagagagagtgggaaaaggaactgcaccatttgcaggagcaaaacgtctccaatgccttcctggataaaggcgagttttacataggatctaaatacaaaaaagtcgtctatcggcaatacacagactccacgtttcgggtgcccgtggagcggaaagctgaggaggaacatttgggaatactgggccctcagctacatgctgatgttggggacaaagtcaagatcattttcaagaatatggccaccagaccctacagcattcatgcgcatggggtgcagacagaaagtagcaccgtgaccccgacgctgccaggggagaccctcacatatgtttggaagatcccagagagatctggcgcaggcactgaagattctgcatgtattccctgggcttattattccaccgtggatcaggtcaaagacttatactcaggtctcatcgggccgctaatagtgtgtagaaggccctatctgaaagtgtttaatcccaggcggaaactcgaatttgccctcctgtttctggtcttcgacgaaaatgaatcttggtacctcgacgacaatatcaagacatattcagatcacccagagaaggtcaacaaagatgacgaagagtttatagaaagtaataagatgcacgccattaatgggcgaatgttcggcaacctgcagggactgaccatgcatgttggcgacgaggtgaattggtacctaatgggtatggggaacgagatagaccttcacaccgtccatttccacggccattcttttcaatacaagcatcggggagtctattctagcgacgtgtttgatatttttcccggaacctaccaaactcttgaaatgttcccccgaaccccaggaatatggcttctgcactgccacgtgactgatcacatccatgcaggcatggagacaacttacacagtcctgcagaacgaagacaccaagagcgga

SEQ ID NO: 1628 - DNA, 3195 bp, Artificial Sequence
  derived and/or modified sequence
atgaagatcctgatcttgggcatcttcttgttcctgtgttccactccagcttgggctaaggagaaacattactacattgggattattgagactacctgggattacgcctccgaccacggagaaaagaagctgatctcagttgacaccgaacattcgaatatctacttgcagaatggacctgatagaattgggagattgtacaagaaggccttgtacctgcagtacacggatgagacatttcgcacaaccattgagaagccagtgtggctggggttccttgggcctatcattaaagcggagactggggacaaagtgtatgtgcatctcaagaacctcgcttcccgcccgtacactttccattcccacgggatcacctattacaaggaacatgagggcgctatctatcccgacaacactaccgatttccagcgtgcagatgataaggtctatccaggagagcaatatacctatatgctcctggccacagaagaacagagcccaggggaaggagacgggaactgtgtgacacggatctatcactcgcatatagatgctcccaaggacattgcttcgggtctgattggacccctgatcatttgcaaaaaagactccctggacaaggagaaagagaagcatatcgacagagaattcgtggttatgttctctgttgttgacgaaaacttttcttggtaccttgaagacaacattaagacctactgttccgagcccgaaaaggtcgataaggacaatgaagattttcaggaatcgaatcggatgtatagcgtgaacggatatactttcgggtccctgccaggactgagtatgtgcgccgaggatagggtgaaatggtatttgtttggtatggggaacgaagtagatgttcatgccgcatttttccatgggcaggctctaaccaataagaactaccgaatcgacaccataaatctattccccgccaccctgtttgacgcgtatatggtggctcagaaccccggggagtggatgctatcctgtcaaaatctaaaccatctgaaggcggggctgcaagcgttttttcaggtacaggaatgtaacaagtcatcctcgaaagacaatattcgagggaagcacgtgaggcattactatattgcagctgaggagatcatttggaactacgcaccaagcggcatagacatcttcaccaaggaaaatcttactgctcccggttctgacagcgccgtgttttttgagcagggcacgacccgtatcgggggctcgtataagaagctggtataccgtgagtatacggatgcgagctttaccaatcgcaaagaaagagggcctgaggaagagcaccttggaatccttggccctgtcatatgggcagaagtcggcgacaccatccgagtcacgtttcacaacaagggagcctaccccctgagcatcgaaccgattggagtgagatttaacaagaataatgaaggtacttactatagtccaaattataatcctcagtctagatctgtgccaccttccgcttcccacgtagctcccactgaaaccttcacatacgagtggacagtacccaaagaagttggccctaccaacgccgatcccgtctgtctggctaaaatgtattattctgctgtggatcccactaaggatatctttaccgggctgatcggacctatgaaaatatgcaaaaagggaagtctgcacgccaatggccggcaaaaggacgtagacaaagagttttaccttttccctaccgtgttcgacgaaaatgaatccctgctcctggaggataatatccgcatgtttaccacagcccccgaccaagtggacaaagaggatgaagattttcaagaatccaacaaaatgcattcgatgaatggtttcatgtacggcaaccagccaggcctgactatgtgtaagggggattcagtcgtctggtacctgttttcagcaggcaacgaggcggatgttcacggtatctacttttctggtaatacttatctgtggagaggtgagcggcgtgacactgctaacctgttcccccagaccagtttgaccctccacatgtggccggatacagaggggacatttaatgttgaatgcttgacaacggatcactatactggtgggatgaaacagaaatatacagtcaatcagtgcaggagacaatcggaggattctaccttttatctaggcgagaggacttactatatagcagcagttgaagtggagtgggactactcaccgcagcgcgagtgggaaaaagaattacaccatctacaggagcagaatgtgagcaacgccttcctcgacaagggggagttttatatcggtagtaagtataagaaggtcgtgtatcggcaatacacagattctacatttcgagtccccgtagagcgcaaggccgaggaagagcacctaggaatcttaggtcctcagctgcacgctgatgtcggcgacaaagtcaaaattatctttaagaatatggctacgcgaccctattcgattcatgctcatggcgttcagacagagtccagtacagtcaccccgactcttccaggtgagacactgacatatgtgtggaagatacccgagcggtccggagccggtacggaagacagcgcctgcattccctgggcatactattctacagtggaccaagtcaaggacctctattccggtttgattggcccgttaattgtgtgccgccggccatatcttaaagtgtttaacccccgccgcaagctggaatttgcgctcctgttcctggtgttcgacgaaaatgaaagctggtacttggacgataacatcaaaacatattctgaccatccggaaaaggtcaataaggacgatgaggagttcatcgaaagcaataaaatgcacgcaattaacggtcgtatgttcggcaatcttcagggacttactatgcacgttggagacgaagtcaattggtatctgatgggtatgggcaatgagatcgatttgcataccgttcatttccatggccattcctttcagtacaagcatagaggcgtatactcctcagacgtgttcgatattttcccgggaacgtaccaaactctggagatgttcccccgtacccccgggatatggcttctgcactgtcacgtgactgaccacatccacgccggcatggagactacctacaccgtgctgcagaacgaggacacaaaatcaggc

SEQ ID NO: 1629 - DNA, 3195 bp, Artificial Sequence
  derived and/or modified sequence
atgaagattcttattttaggaatctttctttttttatgttcaacaccagcatgggctaaagaaaaacattattatataggaattattgaaacaacatgggattatgcatcagatcatggagaaaaaaaattaatatcagtagatactgagcattctaatatatatcttcaaaatggtccagacagaattggaagactttataaaaaagctttatatttacaatatactgacgaaacttttagaactactattgaaaaaccagtttggttaggatttttaggtccaattattaaagcagaaactggagataaagtttatgttcatcttaaaaatttagcaagtagaccatatacatttcattcacatggtataacttattataaagaacatgaaggagctatctatccagataataccacagattttcaacgtgcagatgacaaagtttatccaggtgaacaatatacatacatgttattagctacagaagaacagtctccaggagaaggagatggtaattgtgtaacaagaatttatcattcacatattgatgctccaaaagatattgcttctggtttaattggtcctttaattatttgtaaaaaggacagtttagataaagaaaaagaaaaacatattgatcgagaatttgttgtaatgttctctgttgtagatgaaaatttttcttggtatttagaagataatattaagacatattgttcagaaccagaaaaagtagataaagacaatgaagattttcaagaatctaatagaatgtattctgttaatggttatacgtttggttctcttccaggattaagtatgtgtgctgaagatagagttaagtggtatctttttggaatgggaaatgaagttgatgttcatgctgcattctttcatggacaagctctaacaaataaaaattacagaattgatacaattaatctttttcctgctacattatttgatgcttatatggttgcacaaaatccaggagaatggatgttatcttgtcaaaatttaaatcatttaaaagcaggattacaagcattttttcaagttcaagaatgtaataaatcttcatctaaagataatataagaggaaaacatgttagacattattatattgcagctgaagaaataatatggaattatgctccttcagggattgatatttttacaaaagaaaaccttactgcacctggaagtgattctgctgtatttttcgaacaaggaactacaagaattggaggtagttataaaaaattagtttatagagaatatactgatgcatcatttacaaatagaaaagaaaggggaccagaagaagaacatttaggaattttgggaccagtaatttgggctgaagtaggtgatactattagagttacatttcataataaaggagcttatcctttaagtattgaacctattggtgtaagatttaataagaataacgaaggtacttattattctccaaattataatccacaatcacgatcagttccacctagtgcaagtcatgtagctccaactgaaacattcacttatgaatggactgtaccaaaagaagtagggccaacaaatgctgacccagtttgtttagcaaaaatgtattattctgctgttgacccaactaaagatatatttactggattaattggaccaatgaaaatttgtaaaaaaggatcattacatgcaaatggtagacaaaaagatgtcgataaagaattttatctatttccaacagttttcgacgaaaatgagtcattattattagaagataatattagaatgtttacaacagcaccagatcaagtagataaggaagacgaagatttccaggaatcaaacaaaatgcatagtatgaatggatttatgtacggtaaccaacctggtttaacaatgtgtaaaggtgatagtgttgtttggtacttattcagtgcaggtaatgaagctgatgtacatggaatatattttagtggtaacacttatttatggagaggggaaagacgtgatactgctaatctttttccacaaacatcacttactttacatatgtggccagataccgagggtacttttaatgtagaatgtcttactaccgatcattatacaggtggtatgaaacaaaaatatactgtaaatcaatgtagacgtcaatcagaagattctactttttatcttggtgaaaggacttattatattgctgcagttgaagttgaatgggattatagtccacaaagagaatgggaaaaggagttacatcatcttcaagaacaaaatgtttcaaatgcatttttagataaaggagaattttatataggatcaaaatataaaaaagttgtttacagacaatatactgattcaacatttagagttccagttgaacgtaaagctgaagaagaacatttaggtattcttggaccacaattgcatgcagatgtaggagataaagttaaaattatttttaaaaatatggctactagaccatattcaattcatgctcatggagttcaaacagaatcttcaactgttacaccaactttaccaggagaaactcttacatatgtttggaagattccagaaagaagtggtgctggaactgaagatagtgcttgtataccatgggcatattactcaactgttgaccaagttaaagatttatattcaggtttaattggaccattgattgtttgtagaagaccatatcttaaagttttcaatccaagacgtaaacttgaatttgctcttttattccttgtttttgatgaaaatgaatcatggtatttagatgataatattaaaacatattctgatcatccagaaaaagttaataaggatgatgaggaattcatagaatctaacaaaatgcatgcaattaatggtagaatgttcggtaatttgcaaggattaacaatgcatgtaggagatgaagtaaattggtatttaatgggaatgggaaatgaaatcgatttacatactgtacattttcatggtcattctttccaatacaaacatagaggagtttattcttcagatgtttttgacatttttcctggaacttatcaaactttagaaatgtttccacgtactcctggaatttggcttttacattgtcatgttacagatcatattcacgctggtatggagacaacatatactgttcttcaaaatgaggatacaaaatcagga

SEQ ID NO: 1630 - DNA, 3195 bp, Artificial Sequence
  derived and/or modified sequence
atgaagatcctcatcctcgggatctttctctttttgtgctccactccggcctgggccaaggagaagcattactacatcggaatcatcgaaactacgtgggactacgcttccgaccacggagagaaaaagctgatctcagtcgacactgagcatagtaacatctatctccagaacggaccggatcgcatcggaaggttgtacaagaaggctctgtacctccagtataccgacgaaaccttcagaaccaccatcgagaagccggtttggttgggattcttggggcccatcatcaaggccgaaactggcgataaagtttacgtgcatttgaagaatctcgcttcgcgaccatacaccttccacagccacggtatcacctactacaaggaacacgagggagccatctacccagacaacactaccgatttccagcgcgcggatgacaaggtgtacccgggcgagcagtacacttatatgttgcttgccaccgaagaacaaagcccgggagagggcgatgggaattgcgtcacccggatctaccacagccacatcgacgcgccaaaggatatcgcgtcaggactgattggacctctgatcatctgcaagaaggactcgctggataaggaaaaggaaaaacacattgatcgggaatttgtggtcatgttctccgtggtggacgagaatttctcatggtacttggaggataacattaagacgtactgctcggagccagagaaggtcgacaaggataacgaagattttcaagaaagcaaccgcatgtactccgtaaacggttacacctttggttcgctgccggggctgagcatgtgcgccgaggacagagtgaaatggtacctcttcgggatgggcaatgaagtggatgtgcacgcagcttttttccatggccaggctctgaccaacaagaactaccggattgataccatcaacctcttccccgccacgctgtttgatgcatacatggtggcgcagaacccaggagagtggatgctgagctgtcagaatctgaaccacctgaaggccgggttgcaggcattcttccaggtccaggaatgtaacaagtcatcgagcaaggacaatattcggggaaagcacgtcaggcactactacatcgccgcggaggagattatctggaattacgcccctagcggaatcgatatcttcactaaggagaacctcacggcacccggatcggattctgcggtgttcttcgagcaaggaactactagaatcggaggatcctacaagaaactcgtctaccgcgaatacaccgacgcgtcgttcactaatcggaaggaaagaggaccggaagaggaacacctcggtatactcggcccggtgatctgggccgaagtgggagatactatcagagtgacttttcataacaaaggagcctacccgctgtcaatcgaacccatcggagtgagattcaacaagaacaatgaaggaacgtattactcccccaactacaacccacaatcccgcagcgtcccgccatccgcatcacatgtcgcgcctactgaaacttttacttacgagtggactgtgcctaaggaggtgggaccaactaacgcggaccctgtctgcttggctaagatgtactacagcgcggtggacccgaccaaggacatcttcaccggactcatcggtccaatgaaaatctgtaagaaggggtccctgcacgccaacggacgacagaaggacgtcgataaggaattctaccttttcccaaccgtgtttgacgagaacgaatcactcctgctcgaggacaacataagaatgttcaccaccgcgccggatcaagtggacaaggaggatgaagatttccaagagtcaaacaagatgcactcaatgaacggattcatgtacggcaatcagccgggactcaccatgtgtaagggtgactccgtggtgtggtatctgttctcagcaggtaacgaagccgacgttcatgggatctacttcagcggcaatacgtacctttggcgcggcgaacgccgcgacaccgcgaacttgtttccgcagacctcactgaccctgcatatgtggccggacaccgagggcacctttaacgtcgaatgcttgactaccgaccattacactgggggaatgaaacagaagtacaccgtgaaccagtgccgtcggcaatctgaagattccaccttctacctgggtgaacgcacttactacattgctgctgtggaggtggagtgggattactcaccacaaagagaatgggaaaaagagctgcatcacctgcaagagcagaatgtgagcaacgctttcttggataagggagagttctatatcggatccaagtacaaaaaagtcgtgtatcgccaatacaccgactccacctttcgggtgccggtcgaacggaaggcagaggaggagcacctgggcatcctgggcccgcagctgcacgcagacgtgggagataaggtgaagatcatcttcaagaacatggccactcggccatactccatccatgctcatggtgtgcagaccgaatcatctaccgttactcccactctgccgggcgagacgctgacctacgtgtggaagatccccgaacgaagcggggccggaaccgaagattcggcctgcatcccttgggcatactactcaaccgtggaccaggttaaggatctgtactccggactgatcggaccactgatcgtgtgtcggcgaccgtatcttaaagtctttaacccgagacgcaagttggagttcgctctgctcttcctggtctttgacgaaaacgaatcctggtatcttgacgacaacattaagacttactccgatcatccagaaaaggtgaataaggatgatgaggagtttatcgagagcaacaagatgcatgccattaacggccggatgttcggcaacctccaaggactcactatgcacgtgggagacgaggtgaattggtacctgatgggtatgggaaacgaaatcgacctccacaccgtgcacttccatggacactccttccaatacaagcacagaggagtgtattcctcggacgttttcgacatcttcccaggaacttaccaaaccttggagatgttcccgcggaccccaggaatctggctgctccattgtcacgtgaccgaccacatccacgcaggaatggaaactacttacaccgtgcttcaaaacgaggatactaaatccggt

SEQ ID NO: 1631 - DNA, 3195 bp, Artificial Sequence
  derived and/or modified sequence
atgaaaatactcatcttgggaatattcctgtttttatgctcaacgccagcgtgggcgaaggaaaagcattactatatcggcatcatcgaaactacatgggattatgcatcggatcatggggaaaagaagcttatttccgtcgacacagaacattctaatatctaccttcagaatggtccagaccgtataggacgtctgtacaagaaagcattatatttacagtatacagatgaaacatttagaacgacgatcgaaaaacctgtatggctgggctttcttggcccgatcataaaagccgagacgggcgataaagtttatgtccacttgaaaaatcttgcgtccagaccttatacatttcatagccatggaattacgtattataaagaacatgaaggcgctatttatccggataacactacagattttcaaagggcagatgacaaggtttatcctggagaacaatatacgtatatgctgttagccaccgaagaacagtctcctggcgagggtgacggcaattgtgtaacacggatttatcatagccatattgacgctccgaaggacatagcaagtgggctgattggcccccttattatttgtaagaaagattcattagataaagagaaagaaaagcatatagatagggagtttgttgtcatgttttcggttgtagatgaaaatttcagctggtacctggaagataatatcaagacatattgctctgaaccggaaaaagtcgataaagacaacgaggactttcaagaaagcaatcggatgtattccgtaaacggttatacattcggctcattaccgggtctttccatgtgcgccgaagatcgagttaaatggtatctttttggaatgggaaacgaagttgatgttcatgccgccttcttccatggtcaggcattaacaaataagaactatcgcattgatacaataaatctttttcctgcgacattatttgacgcgtatatggtggcccaaaatccgggtgagtggatgctctcatgccaaaatcttaaccatttaaaggcggggttgcaagcattttttcaagtacaggaatgtaacaaatcttcatccaaagataacatccggggcaagcatgtccgacattattatatcgcagcagaggaaatcatctggaactatgcaccttcgggcattgatatctttacgaaagaaaacctgactgcgccaggatcagactcggccgtgttttttgaacaaggtacaacgcgaattggcggaagctataaaaaacttgtttacagggagtacacagatgcgagcttcacgaatcgaaaggaacgtggcccagaagaagaacatctgggaatactaggtccggtgatttgggccgaggtgggagatacaattagagtgacgttccacaataagggggcttatcccttgtccattgaacctatcggagtacgatttaataaaaataatgagggcacttactatagcccaaactataacccgcaaagtcgctccgtaccaccttcagcgtctcatgtcgcgccgacagagacattcacatacgaatggacggttcctaaagaagtgggtccgactaacgcggaccctgtctgcctggccaaaatgtattactcggcagtagatccaacaaaagatatcttcacggggctgatcggccccatgaaaatctgtaaaaaaggctccttgcatgcgaatggccgtcagaaagatgtggacaaagaattttacctgtttccgactgttttcgatgagaatgagagcctattattagaagataacatacgcatgttcacgacagctcctgaccaagtggataaggaagatgaggattttcaagaatctaataaaatgcactctatgaacggatttatgtatggtaatcagcccggtctgacgatgtgtaagggtgactcagttgtttggtacctattttccgcaggcaacgaggcggatgtgcacgggatttatttttcaggcaatacatatctctggcgtggcgagcgtcgggatactgctaacctttttccgcagacaagtttaacgcttcatatgtggccagataccgaaggaacattcaatgtcgaatgccttaccacagaccactatactggggggatgaaacaaaaatacacagtgaaccaatgtcgcagacagagcgaggattcaacattttatttaggcgagagaacttactacatcgcagcagtggaagtcgaatgggattactcacctcagagagaatgggaaaaagagttgcatcacctgcaggagcagaacgtctccaatgcattcctcgataaaggagaattctatattgggtctaaatataaaaaagtggtctatagacagtataccgattcaacgtttcgtgtgccggttgaacggaaagcggaagaggagcatttgggtatccttggaccacagcttcatgcagatgttggcgacaaagtgaaaattatttttaagaatatggcaacaaggccgtactctattcatgcacatggcgtccaaacagaatcatcgactgtgacccctacactcccaggcgaaacacttacatatgtttggaaaattccagaacgctccggagcaggcacagaagactcagcatgtatcccgtgggcttattacagcaccgtagatcaagtcaaggatctttattcgggattaattggtcctctaattgtctgtagacgtccgtatctgaaagtctttaaccctcgtagaaaactcgaatttgcgttactgttcctggtatttgatgaaaatgagagttggtatctggatgataatatcaagacatattccgaccaccctgaaaaagttaacaaagatgatgaagaatttattgaaagtaataagatgcatgctattaatggccgcatgtttggcaatctgcagggccttacaatgcacgtgggcgatgaagtcaactggtacctcatgggaatgggaaatgaaattgacttgcacacggttcactttcatgggcacagttttcaatataaacaccgtggagtctattcttctgatgtatttgatattttcccgggaacttatcaaacattagagatgtttccgcgcactcccgggatctggctgcttcactgtcacgtgaccgaccatatccatgcgggtatggaaactacatacacggtcctccagaacgaagacacgaagtcaggt

SEQ ID NO: 1632 - DNA, 3195 bp, Artificial Sequence
  derived and/or modified sequence
atgaagatcttaattctgggcatatttctatttctgtgttccacgcccgcttgggccaaggaaaaacactattacatcggcattattgagacgacatgggactatgcttcagatcatggggagaagaaactcatctctgtggatacagaacacagcaacatctacctgcaaaatggcccagatcgcatcggacggttatacaagaaggcactatatctacagtacaccgacgaaaccttccggaccacaattgaaaagcccgtctggctgggattcctcggccctatcattaaagccgaaacaggcgacaaggtgtacgtacacctcaagaacctggcgtctaggccctacaccttccattcgcatgggataacatattataaagagcatgagggagccatatatcctgacaacacaacagatttccagcgcgcggacgataaagtttacccaggcgaacagtatacatatatgctgttagccaccgaggaacagtctcccggagagggagacggcaactgtgttacacgcatttatcactcccacattgatgcccctaaagacatagccagcggcctgattggtcctctgataatatgcaaaaaagattccctggacaaggaaaaggaaaaacacatcgatagagagttcgtagtcatgttcagcgtggtggacgagaacttctcttggtatttggaagataacatcaaaacatattgttccgaacccgaaaaagtggataaagacaacgaagatttccaggaatccaataggatgtactccgtgaacgggtatacctttggtagcttacctggtctgtctatgtgtgccgaggatcgagtcaaatggtatctgtttggaatgggaaatgaggtcgatgtgcacgctgccttcttccacgggcaggccctgacgaataagaattacagaatagacactataaatcttttccccgcgacactgttcgatgcttacatggtcgctcaaaatcccggtgagtggatgctctcctgccagaacctgaatcacctgaaagccgggctgcaagcctttttccaagtgcaggaatgtaacaagtcttccagcaaggataatattcggggaaaacatgtgcgacactactatatcgcagctgaggagatcatctggaactacgcacctagcggaattgatatattcaccaaagagaaccttaccgcgcctggttctgacagcgcggtgtttttcgagcagggaacgacgcgaataggaggctcttacaagaaactagtttaccgtgaatacacagacgcttccttcacaaatagaaaggagcggggacctgaagaggaacaccttggaattctggggcccgttatctgggccgaagtcggcgacactattagggtgacctttcacaacaaaggagcatatcctctctcaattgagcccatcggggtgagattcaataagaacaacgagggcacatactacagtcccaactataatccacagtccaggtccgtccccccgagcgcttcccacgtcgctcccaccgaaacgttcacctatgaatggactgtgcccaaggaggtgggacctaccaatgcagacccagtgtgtttagccaagatgtattattccgccgtggatcccaccaaggacatcttcaccggtcttatcggccccatgaagatctgcaagaagggctcactgcacgcaaatgggcggcagaaggacgttgataaagaattttatctcttccccacagtgtttgacgagaacgaaagtctcctgctggaagataacatccggatgttcacaaccgcgcctgaccaggttgataaagaagatgaggatttccaggaaagcaacaaaatgcacagtatgaacggctttatgtacggtaatcaaccgggattaaccatgtgtaagggggatagcgtcgtgtggtatctcttctctgccggtaacgaagctgacgtacatggtatctacttctctggaaacacatatctgtggagaggggaaaggcgtgatacagccaacttgttcccgcaaacttcactcacactgcacatgtggccagataccgaaggaacattcaacgtcgagtgtctgactaccgaccattataccggcggtatgaaacagaaatatactgtaaaccaatgccgcaggcagagtgaagacagtaccttttatctcggggagaggacctattacattgcagctgtggaggtcgagtgggactactcccctcagcgagagtgggaaaaggagctgcatcatctgcaagagcagaacgttagtaacgcctttttggacaaaggcgagttttacatcgggtccaagtacaagaaggtagtctatcgtcaatatacagattcaacctttcgggtgcccgtagaaaggaaagccgaggaagagcacctgggtatattgggaccgcaattgcacgcagacgtgggtgataaggtcaagatcatctttaaaaacatggccaccagaccctatagtatccacgcccacggcgtgcagactgagagtagtaccgttacccccactcttcctggtgagactctaacatatgtttggaagataccagagcgcagtggagcaggcactgaggactcagcctgtattccttgggcatactattccacggtggaccaggtgaaagatctttacagcggactaattggacctctcattgtatgtcggcgaccctacctcaaggttttcaacccgagacggaaactggagttcgccctgctctttttggtcttcgacgagaatgagagctggtatctggatgacaacattaagacgtactcagatcatcctgagaaggttaacaaggacgatgaagagtttatcgagagtaataagatgcacgcgatcaacggaaggatgtttgggaacttgcagggactgacaatgcatgtcggcgacgaggtcaattggtatcttatgggaatggggaatgagatcgacctgcacacggtgcactttcacggtcactcctttcagtataagcaccgcggagtttatagttctgacgtttttgacatctttcccggcacttatcagacattggagatgttccctcggacacctggcatctggctcctgcattgccatgtaactgatcacatacacgccgggatggagactacctacacggtgcttcagaatgaggatacaaagagcggg

SEQ ID NO: 1633 - DNA, 3195 bp, Artificial Sequence
  derived and/or modified sequence
atgaagatcttgattctgggtatcttcctgttcctctgttcaaccccagcctgggctaaggaaaaacactactacatcgggattatcgagacgacctgggactacgcttccgaccacggtgaaaagaagttgataagcgtggataccgaacactcgaacatttatctgcagaacgggccggataggatcgggcgcctctacaagaaagcactgtacctgcagtacaccgatgagacttttcgcactaccattgagaagccggtctggctgggattcctcgggccaattatcaaagcagaaactggagataaagtctacgtgcatctgaaaaacctcgcatctcgcccttatactttccacagccacgggatcacgtactataaagaacacgagggcgctatctacccagataatacgactgattttcaacgggccgatgacaaggtgtacccgggcgaacagtacacttacatgcttctggcgaccgaggagcagtcaccgggagagggcgacggcaattgcgttactcgcatttaccattcacacatcgatgccccgaaggacatcgcttcggggcttatcggacccctgataatctgcaagaaggattccctcgacaaggaaaaggaaaagcatattgaccgggagttcgtggttatgtttagcgtggtggacgagaacttctcctggtacctcgaagataacatcaagacctattgctcagaaccagagaaagtcgataaggataacgaggactttcaagaatctaaccggatgtactcagtgaatggttatacctttggaagcctcccgggactgtcaatgtgcgccgaggatagagtgaagtggtacttgttcggcatgggtaacgaggtggatgtgcatgccgctttctttcacggacaggccctcacgaacaagaattatcggatcgataccatcaacctgtttccagcgacgctgtttgacgcctacatggtcgcccagaacccaggcgaatggatgctgtcatgccaaaacctcaaccacttgaaggcgggacttcaggccttttttcaagtccaagagtgcaataagtcctcgagcaaagacaacatccgcggaaagcatgttcggcactactacattgccgcagaggagatcatctggaactacgctcctagcggcattgacatctttaccaaggagaatctcactgcgccggggagcgactccgccgtctttttcgagcagggaacgacccgcatcggaggatcctacaagaagctcgtgtacagggagtacaccgacgcgtcattcactaaccggaaggaacggggaccggaagaggaacatcttggaatcctcggccccgtcatctgggcggaagtgggcgacactatccgggtcaccttccacaataagggagcctacccgctgtccatcgagccaatcggagtgcgcttcaataagaacaacgagggcacttactactctcccaattacaacccgcagtcacgctcggtgccaccgtcggcgtcgcatgtggcccctactgagacttttacctacgaatggaccgtgccgaaagaagtgggaccaaccaacgcggatccagtgtgtcttgccaagatgtattactcagcggtggatcctaccaaggacatcttcactggcctgatcgggcctatgaaaatctgcaaaaagggatctctgcatgcaaatggaaggcagaaggacgtggacaaggagttttacctgttccccacggtctttgacgaaaacgaatcacttctgctggaggacaatatcaggatgttcactaccgccccggaccaggtggataaggaggacgaagatttccaagaatccaacaaaatgcacagcatgaatggtttcatgtacggaaaccagcctggactgacgatgtgcaaaggcgactccgtggtgtggtacctcttttccgccggaaacgaagccgacgtgcacggaatttacttctcgggaaatacctacctctggaggggagagagacgcgacaccgcgaacctcttcccgcagaccagcctgactcttcacatgtggccagatacggaaggaacttttaacgtcgaatgcctgaccaccgaccattacactggcgggatgaaacaaaagtacaccgtcaatcagtgccggagacaaagcgaggatagcacgttctacctcggagaacggacttactacattgcggcggtcgaagtcgaatgggattactcgccccagagggaatgggagaaggagcttcaccatttgcaagagcaaaacgtcagcaacgcattcctcgacaagggtgaattctacattggctcgaagtacaaaaaagtggtgtaccgccagtacactgactccacttttcgcgtgccggtggagagaaaagctgaagaagaacatttgggtatactgggaccacagctgcacgctgatgtgggcgataaggtgaaaatcatcttcaagaatatggcgaccagaccttactcgatccacgcgcatggagtccagaccgaaagctccaccgtgactccgaccctgcctggcgagactcttacctacgtgtggaagatcccggagcgttcgggcgccggtactgaagattccgcatgcatcccttgggcgtactactcaacggtggaccaagtcaaagatctttactcgggattgatcggtccactgatcgtctgtagacgcccgtacctcaaggtctttaaccctcggagaaaactggagtttgccctcctgtttttggtgttcgacgagaacgaatcatggtatctggacgacaacattaagacttactccgaccatccggaaaaagtgaataaggatgacgaagagttcatcgaaagcaacaagatgcatgctatcaatggaagaatgttcggaaatctgcaaggtctgactatgcacgtcggggacgaagtcaattggtacctgatgggtatgggcaacgaaatcgacctgcacactgtgcactttcacggtcactccttccagtacaagcatcgtggagtctactcgtcggacgtgtttgacatttttccgggcacctaccagaccctcgaaatgtttcccagaaccccgggaatctggctgctgcactgtcacgttactgaccatatccacgccgggatggagactacttacaccgtgctgcagaacgaagatactaagtcggga

SEQ ID NO: 1634 - DNA, 3195 bp, Artificial Sequence
  derived and/or modified sequence
atgaaaatcttgatcctcgggatcttcctcttcctgtgctcgacccccgcttgggccaaggagaaacactactacataggaatcatcgagactacttgggactacgcatccgaccatggagagaagaaacttatttcggttgacactgaacactccaacatctacctccaaaacggcccagataggatcggacgcctctacaagaaggcactgtacctccaatacacggatgaaacctttaggaccaccatcgagaagccagtgtggctgggattcctgggtcccatcatcaaggcggaaaccggcgacaaagtgtatgtgcacctgaagaacctggccagccgtccttacaccttccattcgcacgggatcacctactacaaagaacatgaaggagctatctacccggataataccaccgatttccaacgggccgacgacaaggtgtaccccggtgaacagtacacctacatgcttttggccaccgaagagcagagcccgggagaaggtgatggcaactgcgtgacccggatctatcactcccacatcgacgcgccaaaggatatcgcatcggggcttatcggaccacttatcatctgtaagaaagactccttggacaaggagaaggagaagcatatcgatcgcgagttcgtggtcatgttctcggtggtggatgagaacttttcctggtacttggaagataacatcaagacttactgctcagagcccgaaaaggtggacaaagataacgaagattttcaagagagcaaccgcatgtacagcgtgaatggttacactttcggctctctcccgggcctcagcatgtgcgcggaggaccgcgtgaaatggtacctgttcggaatgggcaatgaagtggatgtgcacgccgccttctttcacgggcaggcattgactaacaaaaactaccgcatcgatactatcaacctgttccccgcaacccttttcgacgcgtacatggtggcacagaatccgggtgagtggatgctgtcgtgtcaaaatctgaatcatttgaaggcggggctgcaggccttcttccaggtccaggaatgcaacaagtccagttcgaaggacaatatcagagggaagcacgtccggcactactatatcgccgccgaggagatcatttggaattacgccccgtcggggatcgacatcttcacgaaggaaaatctgactgcgcccggaagcgacagcgcagtctttttcgaacagggtactacccgcatcggcggaagctacaagaagctggtgtacagagaatacacggacgcatcgttcaccaacagaaaagaacgcggtcctgaagaggaacaccttggtatcttgggaccggtgatctgggcagaagtgggcgataccatcagagtgacgttccataacaagggggcctacccactgagcatcgaacctatcggtgtgcgcttcaataagaacaacgaaggaacgtactactcaccaaactacaacccacagtcgcgcagcgtgccgccatcggcctcacatgtggcaccgaccgaaaccttcacctacgagtggacggtgccgaaagaagtgggtccaactaacgccgatccggtgtgtctggcaaagatgtactatagcgcggtggaccccaccaaggatatcttcacgggcctgatcggaccaatgaagatctgcaagaagggatccttgcacgccaatgggaggcagaaagacgtggacaaggaattctatctcttcccgacggtgttcgatgaaaacgaatctctgctgcttgaggacaatattcggatgttcaccaccgccccggaccaagtggataaagaggacgaggatttccaggagtccaacaagatgcattcgatgaacggattcatgtacggcaaccaaccgggactcaccatgtgcaagggagattccgtggtgtggtacctcttctcggcaggaaacgaggccgacgtccatggaatctacttttccggcaatacctacctgtggcggggagaacggagagataccgctaatctcttcccccagacctcgctcaccctccacatgtggccggacactgaaggaactttcaacgtggagtgtctgactactgaccactacaccggaggtatgaaacagaagtacaccgtgaaccagtgccgccgccaatctgaagattccactttctacctcggcgaaagaacgtactacatcgcggcggtcgaggtcgagtgggactactcgccgcagagggagtgggaaaaagaactgcatcatctccaagagcaaaatgtgtcgaacgcttttctggataagggagaattctatattggtagcaagtacaaaaaggttgtctaccgccagtacactgactcaacctttcgggtgccagtggaacgcaaggcagaagaagagcacctgggaatcctgggaccccagctgcacgccgacgtgggagacaaagttaagatcatcttcaagaatatggcgacccggccgtacagcatccacgcgcatggagtgcagactgaatccagcactgtcaccccgactctgccgggtgaaaccttgacttacgtgtggaagatccctgaaagatcaggagcgggcaccgaggactcagcgtgtatcccgtgggcgtactactcaactgtggatcaggtcaaagatctgtactccggacttatcggtccgctcatcgtgtgccggcgaccgtacctgaaagtctttaatccaagacgcaaactggaatttgctctgcttttcctcgtctttgacgaaaatgagtcctggtacctggatgataacattaagacttacagcgatcatccggagaaggtcaacaaggatgacgaagagttcattgagtctaataagatgcatgctatcaacggaagaatgttcggaaatcttcagggactgacgatgcacgtgggagacgaggtgaattggtacctcatgggcatgggtaatgaaatcgatctgcatacggtccacttccacgggcactcctttcagtacaagcatcgcggggtgtacagcagcgacgtgttcgacatttttccgggaacctaccagaccctggagatgttccccagaactccagggatctggctcctgcattgccacgtgactgaccatatccacgccggcatggaaactacctacaccgtgctgcagaacgaggacaccaaaagcgga

SEQ ID NO: 1635 - DNA, 3195 bp, Artificial Sequence
  derived and/or modified sequence
atgaagatcctgattttgggaattttcctgtttctatgtagtacaccggcctgggctaaggaaaagcattattatatagggattattgagacgacttgggattacgcctctgaccacggcgagaaaaagctaatctccgtggacaccgaacattcgaacatctacttgcagaatgggcccgatcgcatcggccgcctgtacaagaaggcactgtacttacagtatactgatgagacctttaggactactatagagaagccagtgtggctgggattcctgggtcccattattaaagctgaaacaggggacaaagtgtacgtccacctgaaaaacctcgctagcagaccgtacacatttcacagccacggaattacgtactataaggagcacgaaggggcgatctaccccgacaatacgacagactttcagcgcgcagacgacaaggtctatcccggggagcagtacacttacatgctcttagccaccgaggaacagtcaccaggtgagggagatggcaattgcgtgactaggatttatcactcccatattgacgcacccaaggacatcgctagtggtttgatcggacccctgattatctgtaaaaaggactcactggataaagaaaaagagaaacacatagatagagaatttgtcgtcatgttctccgtggtcgatgagaacttctcgtggtacttggaggataatatcaaaacctactgctcggaacctgagaaggtggacaaagacaacgaagatttccaagaatcaaatcgcatgtactccgtgaacgggtacacctttgggtctcttcctgggctctccatgtgcgcagaggatcgggtaaaatggtacctattcggtatgggcaatgaagtcgatgttcacgcagccttctttcatggtcaggcactgaccaataagaattacagaatcgatacaatcaatctctttcctgcaactctctttgatgcttatatggtggcccagaatcccggtgaatggatgttgtcatgccagaacctaaatcaccttaaagctggcctgcaggctttcttccaggtgcaagagtgcaacaaaagctctagcaaagacaatattcgaggcaaacacgtgcggcactactacattgctgccgaagagattatctggaattacgcgccgagtggtatcgacatttttaccaaagaaaaccttaccgcacccggatctgactctgccgtgttttttgagcaaggtaccactagaatcggaggatcctacaagaagctggtatacagggagtacactgatgcttctttcacaaacaggaaggaaagggggcccgaggaggagcatctgggaatcttaggtcccgtgatttgggcggaggtcggcgacaccatcagagtgacatttcacaataaaggggcctaccctttatctatagaacccatcggtgtgcgctttaacaagaacaatgaggggacatactacagccctaattacaacccacagtcacgtagcgtacctccctccgcgtcgcatgtggcaccaaccgagacctttacctacgaatggaccgtgcctaaggaagtggggcccactaatgcagaccccgtgtgcttggcaaagatgtactattccgccgtggaccctaccaaggatatatttaccggactgatcggcccaatgaagatttgcaagaaaggcagcctgcacgcaaacggaagacagaaggatgtagacaaagaattctacttgtttcccacagttttcgatgaaaacgagagtttgctgcttgaagacaatattcgcatgttcactactgcccccgaccaggtggataaggaggacgaggatttccaggagtcaaacaaaatgcatagcatgaatggctttatgtatggtaatcagccagggctcacaatgtgcaagggtgattctgtggtgtggtaccttttctctgcggggaatgaagccgacgtgcacggaatatacttctctggcaatacctacttgtggcggggcgagaggcgtgacaccgccaacttattccctcagaccagcctgactctgcatatgtggcccgatacagagggcaccttcaatgtggagtgcctgaccacagatcattataccggcggcatgaaacagaaatacactgttaaccagtgcagaaggcagtcagaggacagcacattttatttgggcgagcggacttattatattgccgccgtagaagtggaatgggactactctccgcagagagagtgggagaaggagctgcatcatttgcaagaacagaatgtctcgaacgcattcctggacaagggggaattctatatcggctccaaatacaagaaggtggtgtaccgacagtacactgattccaccttcagagttcctgtggagcgcaaggccgaggaggaacatctgggaattctgggtccccaactgcatgctgacgttggagacaaggttaagattatatttaagaatatggcgactagaccttactccatacacgctcacggggtccagaccgaatcttccacagttactccaactcttccaggcgagacactgacgtatgtgtggaagattcctgagagatcaggcgccggcacagaagatagtgcatgtatcccttgggcatactatagtacagtagatcaggtgaaggatctatatagcggccttatcggacccctgattgtttgcaggcggccttaccttaaagtattcaatccaaggcgaaagctcgagtttgctctgctatttctggttttcgatgaaaatgagagttggtacttagacgataacatcaagacttactctgaccaccccgagaaggtgaataaagacgatgaagagtttatcgagagcaataaaatgcatgcaatcaatggccggatgttcggcaaccttcaggggctcacgatgcatgtgggcgacgaagtcaattggtacttgatgggaatgggaaacgaaattgacctccacaccgtgcacttccatggtcacagcttccagtacaagcatcgcggtgtgtattcctcagacgtgttcgatatcttcccagggacttatcagacactggagatgttcccccggacccctggaatatggctcctgcactgccacgtgaccgatcacatccacgctggcatggagactacatataccgtgttgcaaaacgaagatacaaaaagtggc

SEQ ID NO: 1636 - DNA, 3195 bp, Artificial Sequence
  derived and/or modified sequence
atgaaaatcttgattcttgggatcttcctgttcctgtgctcaacccctgcatgggccaaggaaaaacactattatattggaatcatcgagacgacatgggactatgccagtgaccacggcgagaaaaagcttatctccgtagacacagagcacagcaacatctaccttcaaaacggccctgacagaatcggccgactgtacaagaaggccctttacctgcagtatacagatgaaactttccggaccactatcgaaaagcccgtctggctgggatttttgggaccgattatcaaagctgaaactggggacaaggtgtacgtgcacctgaaaaacctcgctagtcgcccatacaccttccattcccacggtattacatactacaaggagcacgaaggggcgatttatcccgataacaccaccgactttcagcgggccgacgataaggtataccccggcgaacagtacacctatatgctgttggctacggaggagcagtcccctggggaaggagacggcaactgtgttactaggatttaccacagtcacatcgatgctccaaaggacattgcgtctgggctgattggacccctgattatatgcaagaaggatagcctggataaggagaaggaaaaacatattgacagagagtttgttgttatgttctctgtggtggacgagaactttagctggtatctggaagacaatatcaaaacgtattgtagcgaacccgagaaagtggataaagataatgaggacttccaagagagcaacaggatgtacagtgtaaacggctatacctttggtagcctgcctggtctctcaatgtgcgccgaggacagagtcaaatggtatctcttcggaatgggcaacgaagtggacgtacatgcagcgtttttccacggtcaggcgctgacaaacaaaaactataggattgacacaattaacctgttccccgcaaccttgtttgacgcttatatggttgcccagaaccctggcgaatggatgctgtcctgtcagaatctgaatcatctcaaggccgggctgcaggctttcttccaagtgcaagagtgcaataaatcttctagcaaagataatataaggggcaaacatgtccggcactactatatcgcggccgaggaaatcatctggaactacgccccctccggcatagacatatttaccaaagaaaatttgactgcgccggggtctgatagcgctgtctttttcgagcaaggcactacccggatcggagggtcttacaagaagctggtgtaccgggaatatacggacgcttccttcaccaacaggaaggaacggggacccgaggaggaacatctgggcatcttgggtcccgttatatgggctgaagtaggtgatacaattcgagttaccttccacaacaagggcgcctatcccctctccatagagccgatcggcgtgaggttcaacaaaaataacgaaggaacttactactctccaaactacaatcctcagagccggtccgtgccacctagtgcctcccatgtcgcccctacagagacatttacgtatgagtggaccgtacccaaggaagtggggccaaccaatgctgatcccgtgtgcctggccaaaatgtactacagtgccgtcgatcctaccaaggacatcttcacagggttgatcggaccaatgaagatttgcaagaaggggtcactgcatgccaacggacggcagaaggatgtcgataaagagttctatctgttcccgacagtgttcgatgagaacgagtctcttctgttggaggataatattcggatgttcacaacagctccggaccaagtggacaaggaggatgaggactttcaagagtctaataagatgcatagcatgaatggcttcatgtacggaaatcagccgggcctgaccatgtgcaaaggagactcagttgtgtggtaccttttcagcgccggcaacgaagctgacgtccatggaatatacttttcagggaacacttacctttggcggggagaaagaagagatactgcaaatctgttcccacagaccagtttgacacttcacatgtggccagacacagaaggcaccttcaacgtggaatgcctcaccacggatcactatacaggcggaatgaagcagaagtatacagtaaatcaatgtcgaaggcagtctgaagattccactttctacctcggcgagcgaacgtattatatagccgcggtggaggtcgagtgggattactctccccaacgggagtgggagaaggaactgcaccaccttcaggagcagaacgtaagcaacgcgtttttggacaagggcgagttctacattggtagcaaatacaagaaggtggtgtaccgccagtacaccgacagtacatttcgggttccagtggagcgaaaggccgaagaggagcacctcggcatcctcgggccccagctgcatgccgatgtaggggataaggtcaagattatcttcaagaatatggccacgaggccttatagtatccatgcccacggcgttcaaacagagtcatctaccgttacgcccacacttccaggcgaaacattgacatatgtctggaaaatcccggagcgctcaggcgctggcaccgaggactcagcatgtatcccttgggcctactacagtacggtggaccaagtaaaggacctgtacagtggcctgatcggtcctctgattgtttgcaggcgaccctacctgaaagtattcaaccctagaaggaagctcgagttcgctctgctgttcttggtattcgacgagaatgaatcttggtacctggacgacaatattaagacatatagtgaccaccccgaaaaggtaaacaaggacgacgaggaatttatcgaatctaataagatgcatgcaattaacggaaggatgtttggaaacctccaaggtcttacgatgcacgtgggggatgaagtcaattggtatctcatgggtatgggcaacgagatcgaccttcatactgttcattttcatggccactcttttcagtacaaacatcggggagtgtattcaagtgatgtctttgacattttcccgggaacttatcagactctcgagatgttcccaagaacgcctggcatatggttgctccactgccacgttactgaccatattcatgcgggcatggaaaccacctatacagtgctgcaaaacgaagacacaaagtccggc

SEQ ID NO: 1637 - DNA, 3195 bp, Artificial Sequence
  derived and/or modified sequence
atgaagattttgatcctagggatcttcttatttctttgctccactccagcatgggccaaggaaaagcattactatattggcattatcgagaccacctgggattatgccagtgatcacggagagaagaagttaatttccgtagatactgaacactcaaatatatatctgcagaacggccccgatcgcataggcaggctgtataaaaaagcattgtacctgcagtatacggacgaaacattcaggacaaccatcgagaagccggtgtggctcggttttctcggtccgatcatcaaggccgagaccggagacaaggtgtatgtacatctcaagaatttggcctctagaccctatacgtttcactctcacggcataacctattataaggagcatgagggagctatctatcctgataatacgactgattttcagagggctgatgataaagtgtatccaggtgaacaatacacttatatgttacttgcaactgaagaacagagccctggcgagggagacggaaattgcgtgacccgaatctaccacagccatatcgatgcaccaaaagacatcgcaagcgggctgattggacccttaattatttgcaagaaagacagcctggataaagagaaagagaaacacatcgatcgagagttcgtggtgatgttttcggtagtggatgagaactttagttggtacctggaagacaatattaagacttattgcagcgaacccgaaaaagtggataaggacaatgaggatttccaggagagtaatagaatgtatagcgttaacgggtacaccttcgggtcactgcctgggctcagcatgtgcgctgaggaccgcgtgaaatggtacttattcgggatgggaaacgaagtagatgttcacgcagcgttcttccacggacaggcattaacgaataaaaactaccggattgatactattaacttatttcctgcgacactgtttgacgcatatatggtagcacaaaacccgggggagtggatgttgagctgtcagaatctcaaccacttaaaggccggattgcaggctttcttccaggtgcaagaatgtaataagtcttcctcaaaagacaatattagggggaagcacgtccgacactattatatagcggctgaggagatcatatggaattatgccccgagtggtatcgacatctttactaaggagaatcttactgcacctggttctgacagcgctgtgttctttgagcagggcaccaccagaattggcgggtcctataaaaagttagtgtatcgcgaatataccgatgcctccttcacaaacaggaaagaaagaggccccgaagaagagcacctcggcattctcggaccagtcatttgggctgaggtcggggacacgatcagggtcactttccataataaaggagcatatccactgtccatagaaccaatcggggtgaggttcaataagaacaatgaaggtacgtactactctcccaattacaaccctcagagcagaagtgtcccgccatctgctagccatgtcgctccgaccgaaacgttcacttatgagtggacggtgcccaaagaggttggacctaccaacgctgaccctgtctgtttggccaagatgtactacagtgccgtggatccaactaaagacatcttcacaggactaatcggaccaatgaaaatctgtaagaagggctcactccatgcaaatggccgacagaaagacgtcgacaaggaattttatctctttcctacggtgtttgacgagaacgaatccttactgcttgaggacaacatccgaatgttcactacagcccccgaccaggtcgataaggaagatgaagattttcaggaaagcaataaaatgcatagcatgaacggctttatgtacggcaatcagcctgggctaacaatgtgcaagggcgactctgttgtgtggtacttgttctcagcgggtaacgaggcagatgtgcatggtatatacttttcaggaaatacatatctgtggagaggggaaagacgcgacacagccaatttgttcccccagaccagtcttacgctgcatatgtggcctgacacagaagggacattcaacgtagaatgtctgacaaccgatcattacaccggcgggatgaaacagaagtataccgtgaaccagtgtcgacgacagtctgaagacagcactttttacctcggggagcgaacatactatatcgccgcggtggaggtagaatgggattacagtccgcagcgtgagtgggagaaagaacttcaccatttgcaggagcagaacgtatcaaacgccttcctggacaaaggagagttctacatcgggtccaaatacaaaaaggttgtctacaggcagtacactgattctacgttccgagttcctgtagagcgaaaagctgaggaggaacacctcggcattctgggtccccagcttcacgcagatgtgggcgataaagtcaagataatattcaaaaacatggcaacccgaccatatagcattcacgctcatggtgtgcagactgagtcatcaaccgtgacgcctaccctccccggagaaacactcacctatgtttggaagattccagaaaggagcggcgccggaactgaggattcagcgtgtattccctgggcctactactctaccgtggatcaagtgaaggacttgtatagtggactgattggtccactgattgtctgccgcaggccctacctgaaggtattcaatcctaggcgaaagctggaattcgctctcctgttcttagtgtttgacgaaaatgagagctggtacctagatgacaacataaaaacatactccgaccacccagagaaggtgaataaagacgatgaagaattcattgagagtaacaagatgcacgccataaacgggagaatgtttggtaaccttcagggattgacaatgcatgtgggggacgaggtgaattggtacttgatgggcatgggcaatgagattgatctgcacactgtgcactttcacggccacagcttccagtacaagcaccgtggtgtgtactccagcgatgtgttcgatatttttccaggaacctaccaaaccttggaaatgttccctagaacacctgggatatggctgctgcactgtcacgtcacagaccatattcacgctggaatggaaacaacttacacggtgttgcagaatgaggataccaaatccggg

SEQ ID NO: 1638 - DNA, 3195 bp, Artificial Sequence
  derived and/or modified sequence
atgaaaattctgatcttgggcatctttttgttcctttgcagtacgccggcctgggccaaggaaaagcactactacattggcattattgaaacaacttgggattacgcgtcggaccacggggaaaaaaagctcatctccgtcgacaccgagcacagcaacatctacctccagaacggcccggaccggatcggccgcttgtataaaaaggcgctgtatctgcagtacacggacgagaccttccgcactaccatagagaaacccgtatggctgggctttctggggccgattataaaagcggaaacgggtgacaaagtttatgtacacctgaaaaatctggcgagccgtccatataccttccactcccacggtattacctactacaaagagcatgagggtgctatttatccggataacacgaccgactttcaacgtgcggacgataaggtgtacccgggggagcagtacacttatatgctgctagcaaccgaagaacagagcccgggtgaaggggacggtaactgcgtgactcgcatctaccactctcacattgacgcgcctaaggatatagctagcgggcttatcggtccattaatcatctgtaagaaggattccctggacaaagaaaaggagaagcacattgatcgggaattcgttgtcatgttctctgttgtggacgaaaatttctcttggtatctggaggacaacatcaaaacatactgtagcgaaccagaaaaggtcgataaagataatgaggactttcaggagtcaaaccggatgtattcagtgaatggttataccttcggctccctgcccgggttaagcatgtgcgccgaagaccgggttaaatggtatctttttggtatggggaacgaggttgacgtccatgccgcgttctttcatggtcaggcactgaccaacaagaattatcggatcgacactatcaatttgttcccggcgaccctgttcgatgcttatatggtggcacagaatcccggcgagtggatgctgagctgccagaatctgaaccacctgaaggcgggtctgcaagccttcttccaggtgcaggagtgcaataagagctccagcaaagataatatacgtgggaaacacgtaaggcactactatattgctgcagaagagattatctggaattacgcgccgtccgggatcgatattttcaccaaagagaatctgacagcgcctggttccgacagcgctgtgttttttgagcagggcactacccgtatcggcggcagttataagaaactggtttatcgcgagtacacagacgccagctttactaaccgcaaggagcgaggcccagaagaggagcatctcggaattctgggaccggtcatatgggcagaagtgggtgacactattcgtgtcacctttcacaataagggcgcgtaccctctcagcatagagcctattggtgtacgtttcaacaaaaataacgagggcacctactacagcccaaactacaacccccaatcccgctccgttccgccgagcgcgagccatgtcgccccaaccgagaccttcacctacgaatggaccgtgccaaaagaagtgggtccaaccaatgcggatccagtttgcctggcaaagatgtactatagcgcggttgacccaactaaggatatcttcactggccttattgggcctatgaagatatgcaagaaagggtcactgcacgccaacggtaggcagaaagatgtggacaaggagttttatctgttccctaccgtgtttgatgagaacgagagccttcttctggaggataatattagaatgttcaccacagccccagatcaagtcgacaaagaagatgaggattttcaggagtctaataagatgcatagcatgaacggattcatgtatggcaaccagcctggcctgactatgtgtaagggtgatagcgtcgtgtggtacctgttcagcgcaggcaacgaagctgatgttcacggcatctatttctccggtaacacctatctttggcgcggggagcgtcgtgatactgcaaatctgtttccgcagacgagcctaacgcttcacatgtggccggacactgaaggtacctttaatgtggaatgcctgacgactgaccattacaccggcggcatgaagcagaaatataccgtgaatcaatgccgtcgtcaaagtgaggacagcaccttctacctcggcgaacgcacctactacattgccgctgttgaagttgagtgggattatagccctcagcgggagtgggagaaagagctacaccacttgcaggagcagaatgtctctaatgcattcctggataaaggcgaattttatatcggttctaagtacaaaaaggttgtctacaggcagtacacagattccaccttccgcgtccctgtagaacgtaaagcggaggaagagcacctgggtattctgggcccgcagttgcatgcggatgtaggggacaaggtgaagatcattttcaagaacatggcaacccgtccatacagcattcacgctcacggtgtgcagaccgaatcttccactgttaccccaactttgcctggcgagaccttgacatatgtgtggaaaatacctgaacgcagcggtgcaggaaccgaggacagcgcctgcatcccgtgggcctattatagcaccgtagatcaagtgaaagacttgtacagcggccttattgggccgctgattgtgtgcagaaggccatatctgaaagttttcaacccacgccgcaagctggaatttgcgctgctcttcttggtttttgacgaaaacgagtcctggtatctggatgataatattaagacctacagcgatcacccggagaaagttaataaggacgacgaggagtttattgaaagcaataaaatgcatgccatcaatggtcgcatgttcggcaacctgcagggcctgaccatgcacgtgggagacgaggtcaattggtacctgatgggtatgggtaatgagatcgacctgcatacggttcacttccacgggcatagtttccagtataaacatcgcggcgtctactccagcgatgtctttgatatcttccctgggacttaccaaaccctcgagatgtttccgcgtaccccaggaatttggctgctccactgccatgttacggatcatatacatgcgggcatggagacgacctataccgttctgcagaacgaggacactaagtctggt

SEQ ID NO: 1639 - DNA, 3195 bp, Artificial Sequence
  derived and/or modified sequence
atgaaaatcctgattctagggatcttcctattcttatgttctacacctgcgtgggccaaagagaaacactattacatcgggataatagaaacgacatgggactatgcctctgaccacggggaaaaaaaacttatttccgttgatacagaacatagtaacatatatttgcagaacgggcctgatcgtattggacgactgtataaaaaggccttatacttacagtatacagatgaaacttttagaactactatcgagaaacccgtttggctggggtttctgggaccaatcatcaaagccgaaacaggagataaagtgtatgtccacctgaaaaatctggcatctcggccatatacattccattcccatggaattacttattacaaagaacatgaaggagccatatatcctgacaacacaacagacttccagcgcgccgatgataaagtttaccccggagagcagtatacatacatgctattagcaacagaagaacaatcacctggagagggggacggaaactgcgtaacgaggatctatcactcccatatcgatgctccaaaagatatagcttctgggctgattggacccctgattatatgcaaaaaagattctctggacaaagaaaaagagaaacatattgatcgggagtttgtagttatgttcagtgttgtagatgagaatttttcctggtatctggaggataatatcaagacttattgctctgaacccgagaaagtcgataaggataacgaagatttccaggaatcgaaccggatgtattcagtgaatggatatacttttggatcattgccagggctcagtatgtgtgcagaggatagagtaaaatggtacctctttggaatgggaaatgaagtggatgttcatgctgccttctttcacggacaggctctaacaaacaaaaattatcgcattgatactatcaacctgttccccgcaacacttttcgatgcctacatggtggcacagaatccaggagagtggatgctctcttgccaaaatctcaaccatctcaaggctggactccaggcttttttccaggtccaggaatgcaacaaatcctcttcgaaggataatatacgtgggaaacatgtgcggcactattacatagcagctgaagagatcatatggaactacgccccatctgggatagatatatttactaaagaaaacctgactgcccccggatccgattctgccgtgttcttcgagcagggaactacaaggattggagggtcttacaaaaaactcgtgtatcgggaatatacggatgcttcctttactaaccgcaaagaaaggggaccagaggaagaacacctgggaatactcggacctgtaatttgggccgaggtgggagatacgatcagagtgacattccacaataaaggggcctaccctctttcaatagaacctatcggagtaagattcaataaaaacaatgaggggacttattactctcccaattataatcctcagtcacgatccgtgcctccaagtgctagtcacgtggcccccactgagacttttacatatgaatggacagtgcctaaagaagtggggcccacaaatgcagatcccgtttgtcttgccaagatgtactattctgcagtggatcctacaaaagatatcttcactgggcttatcggacctatgaagatatgtaaaaaaggatcactgcacgccaacggacgacagaaagatgttgataaagaattctatctatttcctacagtattcgatgaaaatgaaagtctactactggaagataacatacgaatgttcactactgcccccgatcaggtagataaagaagatgaggatttccaggaatcaaataagatgcattctatgaacgggtttatgtatggaaatcagcctgggttgactatgtgcaagggagattcagtcgtctggtatctattctctgcggggaatgaagctgatgtacatgggatatatttttcggggaacacatatctttggcgcggggagagacgcgatacagccaatctcttccctcagacatccttaactctgcacatgtggcccgatactgaagggacattcaatgtggaatgtctcactactgatcattacacagggggaatgaaacagaaatatactgttaatcagtgtcgcaggcagtctgaggacagtacgttctacttgggagaaaggacttactacattgcagctgtggaagttgagtgggattattctccccagcgggaatgggaaaaggaattacaccatttgcaggaacagaacgtgtccaacgccttcctcgataagggggaattctatatcggatccaaatataaaaaggtggtttacagacagtatacagactctacattcagggtaccagtggaacggaaagccgaagaagaacatcttgggatccttggaccacagctccacgccgatgtcggggataaagtaaaaatcatattcaaaaatatggcaacacgaccatattctattcatgcacacggggttcagactgaatcctcaactgtgacaccaactctacctggagaaacactaacttacgtttggaaaataccagagcggtctggggccggaacagaagatagtgcctgtataccgtgggcatattactcaacagtcgatcaggtgaaagatctctattcagggttaatcggaccgctaatagtttgcaggcggccctatctcaaagtgtttaatccccggagaaaactcgaatttgcacttctcttcttagtgtttgatgaaaatgaatcttggtacctggatgacaatattaaaacatattctgatcaccctgaaaaagtcaataaagacgatgaagaattcatagaatctaacaaaatgcacgcaataaatggaagaatgttcggaaatctccaggggttgacaatgcatgttggggatgaagtaaattggtatctgatgggaatgggaaacgaaatcgatctacacacggtgcacttccacggacacagttttcagtataaacatcgcggggtatattccagtgatgtgtttgacatatttcccgggacatatcagacactagaaatgttcccgagaacaccaggaatctggctcctccactgtcatgtgacagatcatatacacgccggaatggaaacaacttatacagtgctgcagaatgaggatactaagtccgga

SEQ ID NO: 1640 - DNA, 3195 bp, Artificial Sequence
  derived and/or modified sequence
atgaagatccttatccttggaattttcctctttctctgttcgaccccagcctgggctaaggagaagcactattacatcggcatcatcgaaaccacctgggattacgcctcagaccacggcgaaaagaagctgatcagcgtcgacactgaacactccaacatctacttgcaaaatggaccggaccggatcgggcgcctctataagaaagctctttatctgcagtacaccgatgagactttccgaactaccatcgaaaaaccggtgtggctcggttttctggggccgatcattaaggccgaaacgggcgacaaagtgtatgttcatctgaaaaacctcgcctccagaccatacactttccactcgcatggaataacctactacaaagaacacgagggagcgatatacccagacaacactactgattttcagagggccgatgacaaggtgtaccctggtgagcaatacacctatatgttgcttgccaccgaggaacagtcgccaggagaaggcgacgggaattgcgtcactcgcatttaccactcgcacattgacgctcctaaagatatcgcctccggcttgatcggacctctcatcatttgtaagaaagattccctggataaagaaaaggaaaagcatatcgatcgcgaatttgtggtgatgtttagcgtcgtggacgagaacttctcctggtatctggaggataacatcaaaacctattgctccgagccggaaaaggtcgacaaggacaatgaggactttcaagagtcaaaccgcatgtactccgtcaacggatacacgttcggatccctgcccgggttgtctatgtgcgcggaggacagggtgaagtggtaccttttcggaatgggcaacgaagtcgatgtgcacgcagccttcttccacggtcaggcactcactaacaagaattacaggatcgatactatcaatctgttcccggcgactctgttcgacgcctacatggtggctcagaaccccggagagtggatgctctcctgccagaacttgaaccatctgaaggcggggttgcaagcattcttccaagtccaggaatgtaacaagagctcaagcaaagacaacatacggggaaagcatgtgcggcactactacatcgcagccgaggaaatcatctggaattacgccccctcgggaatagacatattcacgaaagaaaatctcaccgcgccaggatcagactctgcggtgttctttgaacaaggaactactagaatcggagggtcctacaagaaactcgtgtaccgggaatacaccgacgcgagcttcaccaatcggaaagagcggggcccggaggaggaacatctgggaattctgggacccgtgatctgggccgaggtcggagacaccatcagagtgacgttccacaacaagggggcatacccgctgagcatcgaaccgattggcgtccggttcaacaagaacaatgaggggacctactattcgcctaactacaatccacagagcagatctgtgccgccgagcgcctcgcacgtggcgccgaccgagacgttcacctacgaatggactgtgcctaaagaagtgggtcccaccaacgccgatcccgtctgcctcgccaaaatgtactactccgccgtggacccaacgaaggatatctttactggtctgatcggaccgatgaagatttgcaagaagggaagcctgcacgctaacggaaggcagaaggatgtggataaagagttctacctgtttcctaccgtgtttgatgagaatgagtccctgctgcttgaagataacatccgaatgttcaccaccgctcctgaccaagtcgacaaggaggacgaggacttccaagaatcgaacaaaatgcattccatgaatgggttcatgtacggaaatcaacctggtttgactatgtgcaagggtgattcggtggtctggtacctgttctcagccggtaacgaggccgacgtccacggaatttacttctcgggcaacacctatctctggcggggagaaagacgggacacggccaacctcttccctcagactagcctcactctgcatatgtggccggacaccgaaggcaccttcaacgtcgagtgcctgactaccgatcactacaccggaggtatgaagcagaagtacactgttaatcagtgccgcagacaatcagaggattcgaccttctacttgggcgagcgaacttactatatcgcggctgtggaagtggagtgggactactccccacaaagagagtgggaaaaggaactccaccatctgcaagaacagaacgtgtctaatgcattcctggataagggagaattctacattggttcaaagtacaaaaaggttgtgtaccggcagtacacggacagcaccttccgggtcccggtggaacgcaaggcagaagaagaacatttgggcatcctgggtccccagctgcatgcggacgtgggagacaaggttaagatcatcttcaagaatatggcaactcgcccctactcgatccacgcccacggcgtccagaccgaaagcagcaccgtgactccgaccctcccgggagaaaccctgacttatgtgtggaagattccagaaaggtccggagcaggaaccgaggactcagcttgcatcccgtgggcctattactcgactgtggaccaggtgaaggatctgtactcgggactgatcggcccgttgattgtgtgccgccggccttacctcaaagtctttaacccgaggcggaagctcgagttcgctctcctgttcctggtttttgacgaaaacgagtcatggtacctggatgacaatatcaaaacctactccgaccacccggagaaggtgaataaggacgacgaagaattcatcgagtcaaacaaaatgcacgcgatcaacgggagaatgttcggaaatctgcaagggcttactatgcacgtgggagacgaggttaactggtacctcatgggaatgggaaacgaaatcgatctgcacactgtccactttcatggccactcgttccagtacaagcatcgcggggtgtactcgtcggacgtgttcgacatctttccgggaacctaccagacgctggaaatgtttccgcgcactcccggaatctggctcctgcactgtcatgtcactgatcacatccatgccgggatggaaactacctacaccgtgctgcagaatgaggataccaagagcggc

SEQ ID NO: 1641 - DNA, 3195 bp, Artificial Sequence
  derived and/or modified sequence
atgaagattctaattcttggaatctttttgttcctgtgttccacccctgcctgggcaaaggaaaaacattattatatcggaataattgaaaccacctgggattatgcctcagatcacggtgaaaaaaagctaatctcagtcgacacagaacactcaaacatctaccttcaaaatggacctgatcgtattggtagactctacaaaaaagctttgtaccttcaatatactgatgaaacattccgaacaactattgaaaaaccagtttggctgggatttcttggacctattattaaagctgaaactggagacaaagtgtatgttcatttgaaaaaccttgcaagcagaccctatactttccatagccatggaattacttattataaggaacacgaaggagctatctacccagataacactacagatttccagagagcggacgataaagtgtatcctggagagcaatacacttacatgcttctggctacagaggaacaatcgccgggagaaggtgatggaaattgcgttacaagaatctatcatagtcatattgacgcaccgaaggatatagcgtctggacttatcggaccactgatcatctgcaagaaggattctcttgataaagagaaagaaaagcacatagatcgtgaatttgtggttatgttctccgtcgtagacgagaattttagttggtacttagaagataatataaaaacatattgtagcgagcctgaaaaagttgataaggataatgaagattttcaagagtcaaatcgaatgtattcggtgaatggatatacttttgggagtttgccaggactttccatgtgtgctgaggaccgtgttaagtggtatctctttggaatgggaaatgaagtcgatgttcatgctgctttcttccacggacaagctttaacgaacaagaactatcgtattgatactatcaatctcttccctgctactttgtttgacgcttacatggtcgcacaaaatcccggagaatggatgttgtcatgccagaatcttaatcacttgaaggctggtcttcaggccttctttcaagtccaggagtgtaataaatcatcaagtaaggataatattcgaggaaaacacgtgcgacattactacatagcagctgaagaaattatatggaactatgcaccatcaggaatcgatattttcactaaggagaatttgacggcaccgggatctgattcagctgtcttctttgagcaaggaactacccgaattggtggtagctacaaaaagctcgtttatcgagaatatactgatgcaagtttcactaatagaaaagaaaggggtccagaagaggagcaccttggaattctgggaccagttatttgggccgaagttggtgatacaatccgcgtgacatttcataacaaaggagcatacccgctttctatcgaaccgatcggagtaagattcaataaaaataatgagggaacttactattctccaaattataacccacagtctagatctgtgccaccatctgcgtcccacgtagccccaacagagacgtttacgtacgaatggaccgttcccaaagaggtgggcccaacaaacgccgacccggtttgtttggcaaaaatgtattactctgcagtcgatccaactaaggacatatttactggacttataggtccgatgaagatctgtaaaaagggtagtctgcatgccaacggacgtcaaaaggatgtggataaagaattttacctttttcctactgtcttcgatgagaatgaatctctacttttagaagataacataaggatgtttactacagcccctgatcaggttgataaagaagatgaagattttcaagaaagtaacaagatgcacagtatgaatggtttcatgtacggaaatcaaccaggtctgactatgtgtaaaggagatagtgtagtatggtatctgtttagcgctggaaatgaagcggatgttcatggaatttattttagcggtaatacatatctgtggcggggtgagaggcgcgatacggccaatctgtttccgcaaacatctctgactttgcatatgtggccagatactgagggcactttcaatgttgagtgccttaccacagatcattacacaggaggtatgaaacagaagtatacagtgaatcagtgtagacgacaatcagaagattcgactttctacttgggtgaaagaacctattacattgcagctgtggaagtcgagtgggactattccccacagcgagagtgggaaaaggaactacatcatctacaagaacagaatgtgtccaacgcgttcttggataaaggggagttctacatcggttcaaaatataaaaaagttgtctaccgtcaatacactgattctaccttccgcgttccagttgaacgtaaggctgaagaggaacaccttggaattcttggaccccagctgcatgctgatgtaggagataaggtgaaaattatctttaaaaacatggctacacgtccgtattccattcatgcacatggggttcaaacagaatcgtcaactgttacaccgaccctgccaggagaaacattgacgtatgtttggaaaatcccggaaaggtccggagccggcacagaggattctgcttgtatcccttgggcgtactattctacggtcgaccaagttaaagatctttacagcggattaataggaccgttgattgtttgtagacgtccttacttaaaggtattcaatccgcggcgaaagctggaatttgcattgttgtttttggtctttgacgaaaatgaatcatggtatcttgatgataacataaagacatactccgatcaccctgagaaggtcaataaggatgatgaagaattcattgagtctaataagatgcatgccatcaatggcagaatgtttggaaatctacagggattgacgatgcatgtaggtgacgaggttaattggtacttgatgggaatgggaaacgagatcgacctccatacagtacatttccacggacatagctttcaatataaacaccgtggggtttattcctcggacgtgtttgatatcttccccggaacgtatcagacattggagatgttccctcgcaccccaggcatctggctcttgcactgtcatgtcactgatcatatacatgcgggaatggaaactacctatacggtgttacaaaatgaggacactaagtcggga

SEQ ID NO: 1642 - DNA, 3195 bp, Artificial Sequence
  derived and/or modified sequence
atgaaaatactgatacttggtattttcctgttcctctgcagcacccccgcctgggcaaaggaaaagcattactatattggtatcattgaaacgacgtgggactacgcaagcgaccacggcgagaagaagctgatctccgttgatacggagcattccaacatttatcttcaaaacggtcctgatagaattggtcgattgtacaagaaggcactttatctgcaatataccgatgaaacctttcggaccaccattgagaagccagtctggcttgggtttctgggacctatcatcaaggcagaaaccggagataaggtgtacgtccatcttaagaatctcgcatctcgaccttacacttttcattcccacggcattacctactacaaggagcatgaaggagcgatttacccggataataccaccgattttcaacgagcggacgacaaggtttacccgggtgaacaatacacttacatgcttctggccaccgaagaacagtcgcccggtgagggagatggaaactgcgtgacccgaatctaccactcccatatcgatgcacccaaggacattgcatcgggtcttataggtcccttgattatctgtaaaaaggattcgcttgataaggaaaaagagaaacacattgatcgcgaatttgtcgttatgttttcggtggtggatgagaatttctcatggtatctcgaggacaacataaagacttattgttcggagcccgaaaaggtggacaaggataatgaagatttccaggaatcgaacagaatgtactccgtgaacggatacacttttggaagtttgcctggtctgtccatgtgtgcagaggatagagtcaaatggtacctcttcggaatgggaaatgaagtggatgtccacgcggcattctttcatggacaagctctcactaacaaaaactacaggatcgataccataaatctgtttcctgctacgctttttgatgcatacatggtggcacagaacccaggagaatggatgctctcatgtcagaacctgaatcatctgaaagcaggtctgcaggcgtttttccaagtgcaggaatgtaacaagtccagcagcaaggacaatattcgaggcaagcatgtccgccattactacatcgcagccgaagaaatcatatggaattacgccccctcaggcattgacattttcacgaaggaaaaccttaccgcacccggaagcgactctgcagtcttttttgaacagggaaccaccagaatcggggggtcgtacaaaaaactggtgtacagggagtacaccgatgcatccttcaccaacagaaaagagcgtggtcctgaggaggagcacctgggtattttgggaccagttatatgggcggaagtgggtgataccatcagagtcacctttcataacaagggtgcgtacccgctgtcaatcgaaccgattggtgtgagatttaacaagaacaacgagggtacgtattacagcccgaattacaatccacagtcgcgatccgtgcctccatcggcatcgcatgtggcccctaccgaaacctttacctacgaatggaccgtgccaaaggaagtgggaccaaccaacgccgatcctgtttgtctcgcaaaaatgtactattcagcagtcgatcccaccaaagatatcttcactggacttattggaccaatgaagatatgtaaaaagggtagcctccacgcaaacggacgccagaaggacgtggacaaggagttttacctgtttcccaccgtctttgatgaaaatgagagcctgcttctcgaagataacattagaatgtttaccactgcaccagaccaagtggataaagaggacgaagatttccaagaatcaaacaagatgcactcgatgaacggatttatgtacggaaaccaacctggattgaccatgtgtaagggagactctgtcgtgtggtacctgttctcagccgggaacgaagcagatgtgcacggtatatacttttccggtaacacctacttgtggcggggagaaagaagagataccgcaaatcttttcccacaaacctcccttaccctgcatatgtggcctgatactgagggtaccttcaacgtagaatgtctcaccaccgatcattacaccggcggaatgaagcagaagtacactgtgaatcagtgcaggaggcaatcagaagattcaacgttttaccttggagaaaggacctattacatcgcagctgtggaagtcgaatgggactactccccacaacgcgaatgggagaaggagctccatcatcttcaggagcagaatgtatcaaacgcattccttgataaaggcgagttctatataggctcaaagtacaagaaagtggtctaccgccaatacaccgactcgacctttagagtgccagtggagaggaaggccgaagaagaacaccttggtatactcggaccacagctgcatgcagatgtgggcgataaggtgaagatcatattcaagaacatggcaacccgtccatactcgattcatgctcacggcgtgcagactgaatcttccactgtcactccaaccctcccaggggaaacccttacttacgtgtggaaaatccctgaaaggagcggagcgggtaccgaggattcggcatgcattccgtgggcatactactcaactgtcgaccaggtgaaggacctctactctggtttgattggacctctgattgtgtgtagacgcccctaccttaaagtgttcaatccacggaggaagctcgaattcgctctgctctttcttgtctttgatgagaatgaatcctggtacctggacgataacattaagacttattcggaccatccagagaaggtgaataaagatgacgaagaattcattgaaagcaataagatgcatgccatcaatggaaggatgtttggtaacctccagggacttaccatgcatgtcggagatgaggtgaactggtacttgatggggatgggcaacgaaatcgacctgcacactgtgcactttcacggccactccttccaatacaaacacagaggggtgtactcgtcagacgtgtttgacatcttcccgggcacctaccaaactcttgaaatgtttcctcgtacccctggtatttggctgctgcattgccatgtcactgatcatatacatgcaggcatggagacgacttatactgtcctccagaatgaggatactaagtccgga

SEQ ID NO: 1643 - DNA, 3195 bp, Artificial Sequence
  derived and/or modified sequence
atgaaaattctgatcctagggatatttttgtttctatgttctactccagcttgggccaaagaaaaacattactacataggaattattgaaactacttgggattatgcatctgaccatggggaaaaaaaacttatctccgtggatactgaacactccaacatatacttgcagaatgggcctgatagaatcggacgcctttataaaaaggccctttatttgcagtacacagatgaaacattccgaactactatcgagaaacccgtttggttagggttcctcgggccaatcatcaaagccgagactggggataaagtgtacgtgcacctgaagaacctcgcctctcggccatacacgttccatagtcatggaatcacatattacaaggaacatgagggagccatatatcctgacaatacaactgatttccagcgagctgatgataaagtttatcccggggaacagtatacttatatgttactcgctacagaagaacagtcacctggagagggggatgggaactgcgttactaggatatatcactctcatatcgatgcaccaaaggacatcgcttccggactcatcggacctctcattatatgcaaaaaagattccttggataaagaaaaagaaaaacacatcgatcgggaattcgtggttatgttctcggtggttgatgaaaacttttcttggtatctcgaagataatatcaaaacttactgttccgagcccgaaaaagttgataaagataatgaagattttcaggaatccaaccgaatgtattcggttaacgggtacacttttggatctttgccaggactgtcgatgtgcgccgaagatcgggtaaagtggtatctctttggaatggggaacgaggtcgatgtgcacgcagcctttttccacgggcaggccctcactaataaaaactaccggatcgatactattaaccttttccccgctactctgttcgatgcttatatggtagcacagaatccaggggaatggatgctctcctgccaaaatctcaatcatttaaaagccggactgcaggctttcttccaggtacaggaatgtaataaaagttcttctaaagacaacattaggggaaaacatgttagacactattacatagcggccgaagagataatttggaactatgctccctcaggaatcgatatcttcactaaggaaaacctcacagctcctgggtccgattccgccgtctttttcgaacagggaactacaagaatcggagggtcctataaaaaactggtgtatcgagaatatacagacgcttcgttcactaaccgcaaggaaagaggacctgaagaggagcatttggggattttggggcctgttatctgggccgaggtgggagatactatacgagtgacatttcacaacaaaggggcctatcccctgtctatcgaaccaatcggagttaggtttaacaaaaacaacgaaggaacatattattctcccaattataacccacagtctaggtcagtacccccatctgcttcacacgtagcacccacagagacttttacgtatgaatggacagtgccaaaagaagtggggcccacaaacgccgatcccgtgtgtctggcaaaaatgtattatagtgccgtggatcccacaaaagatatatttactggactgatagggcctatgaaaatatgcaaaaaagggtccctgcacgccaacgggaggcagaaagatgttgataaagaattttatctgttccccactgtgtttgatgaaaatgaatcactcctcctggaagataatattcgaatgttcactacggcccccgatcaggtggataaagaagatgaagattttcaggagagtaataaaatgcactctatgaacggatttatgtatggaaaccagcccggactaacaatgtgtaaaggagattccgtggtctggtatttgttttccgccgggaacgaagccgatgtacacgggatatatttctccggaaacacatatctctggcgcggagaaaggcgggacacggctaacctcttcccccagactagtctcactctacacatgtggcccgatacagaagggactttcaatgtggaatgcttgacgacagatcattacacaggagggatgaagcaaaaatacacagtgaatcagtgtagacggcagtcggaagattccactttctatcttggggaacgcacttactatatagccgccgtggaagtcgagtgggattatagtcctcagcgggagtgggaaaaagaacttcaccatctccaggaacagaatgtgtctaatgcattcctagataaaggggaattctatatcgggtcgaaatacaagaaagtggtttacaggcagtatacagattctacttttagggtccctgtggaacgcaaagctgaggaagagcatcttgggatcctgggacctcagcttcatgctgatgtcggagataaagtaaaaattatcttcaagaatatggccacaaggccttactctatacatgctcatggggtccagacagagtcatcaacagtcacaccaactctgccaggggaaactctaacttatgtgtggaaaatacctgagcgatccggagccgggactgaagactctgcgtgtattccctgggcatattactctacggtggatcaggttaaagatttgtattctgggttaataggacccctgatagtgtgcagaagaccatacctgaaagtcttcaaccccagacggaagctggagtttgctcttctttttcttgtgtttgatgaaaacgaatcctggtatttagacgataatatcaaaacttattcagaccacccagaaaaagtcaacaaagatgacgaggagtttatcgagtcaaataaaatgcacgccataaacgggcggatgtttggaaatcttcaggggctcacaatgcacgttggagacgaagtcaactggtatcttatgggaatggggaatgaaatagacctccatacagtgcatttccacgggcactcattccagtataaacacaggggggtctattccagtgatgtctttgatatctttccagggacatatcagactctggaaatgtttccacgtacacctgggatatggctcctgcattgccatgtcactgatcacatacatgctgggatggaaacaacatatactgtattacagaacgaagatactaaatccggg

SEQ ID NO: 1644 - DNA, 3195 bp, Artificial Sequence
  derived and/or modified sequence
atgaagatcctgattcttggcatctttctgtttctttgcagcactcctgcttgggcaaaggaaaagcattactacataggtatcattgaaactacctgggattacgcatcggatcatggagagaagaagctcattagcgtcgatactgaacactcgaacatctaccttcagaacggaccagatcgaattgggagactgtacaagaaggcactgtacctgcaatacactgatgagacgttcaggactactattgaaaaacctgtgtggcttgggtttctcggtccaataatcaaggctgaaactggcgacaaggtgtacgtccatctgaagaatctcgccagcagaccttacaccttccatagccacggaatcacttactacaaggaacatgaaggtgcaatctaccctgacaacaccaccgactttcagcgagccgatgataaagtgtaccccggtgaacagtacacttacatgcttctggcgaccgaagaacagtcgccaggagaaggtgacggcaattgcgttactcgtatttaccactcgcatatagatgcaccaaaggacatcgcatccggactgatcgggccactgattatctgtaagaaggattccctcgataaggaaaaagaaaagcacattgatagagagttcgtggtgatgttttcggttgttgacgaaaacttttcatggtatctggaagataacatcaagacctactgttccgaacccgaaaaggtcgacaaggataacgaggatttccaagaaagcaacaggatgtattccgtcaacgggtacactttcggatctcttcctggactttccatgtgcgccgaggacagggtcaagtggtacctgttcggaatgggcaatgaggtggatgtgcatgccgcattctttcatggacaagcactgaccaacaagaactaccgaattgacacgattaatctgtttcctgcaactcttttcgacgcatacatggtggcacaaaatccgggcgagtggatgctgagctgtcagaacctcaaccatctcaaagccggtttgcaagccttctttcaagtgcaagaatgtaacaagtcctcctcaaaagataacattagagggaagcacgttcgtcactactacatcgcggccgaagagattatctggaattatgcgccatcgggaattgacatattcaccaaggaaaaccttactgccccaggtagcgactcagcggtctttttcgagcaaggtactactcgtattggaggatcatacaagaagctcgtctaccgggagtataccgacgcatcctttactaataggaaagagcgcggccccgaagaagaacatctcggaattctcggtcctgtgatatgggccgaagtgggtgataccataagagtgacctttcataacaaaggtgcataccccctgtccatagagccaataggcgtccggttcaataagaacaacgaaggaacctactattcccctaactacaaccctcagtccagatccgtgccgccttcagcctcacatgtggcacctactgaaacctttacctacgaatggacggttcctaaggaggtgggaccaactaatgctgatcctgtgtgcctggccaagatgtactatagcgccgtggatccgaccaaggatatcttcactggcctcatcggtccgatgaagatttgtaagaaagggtcgcttcacgcaaacggaaggcaaaaggatgtggacaaggagttttacctttttccaactgtgttcgatgagaacgaatcgctcctccttgaggataacatacgcatgtttacgaccgcccctgaccaagtcgataaggaagatgaagattttcaagagtcgaacaaaatgcattcgatgaatggtttcatgtacggtaatcagcctggtcttaccatgtgtaaaggagactccgtcgtttggtaccttttctcggcagggaacgaagcagacgtgcacggaatctacttctccggcaatacctacctgtggcgcggtgaaagacgggacaccgcaaatctgttccctcaaacgtcgctgaccttgcatatgtggccagatactgaaggcacctttaacgtggaatgtcttactactgatcactacaccggagggatgaaacagaaatacactgtcaatcaatgtaggagacagtcggaggattccactttctatcttggagagagaacgtactacatagcagcagtggaagtcgaatgggactactcccctcagagggaatgggagaaggaactgcatcatttgcaagaacagaacgtctccaatgcattcctcgataaaggtgaattctacattggatccaagtacaaaaaggtggtgtaccgccaatacaccgattccacttttagagttccagtggagaggaaagcagaagaagagcacctgggcatcctcggaccgcagcttcatgcggatgtcggagataaagtgaagatcatattcaaaaacatggcgaccagaccatattcgattcacgctcatggagtgcagaccgaaagctcgactgtcacgccgaccctgcctggcgaaaccttgacttatgtgtggaaaattcctgagcggtcgggcgcaggtacggaggactcagcctgcattccttgggcatactacagcaccgtggatcaggtgaaagacctttactccggactcatcggtccactcattgtttgtcgccgaccataccttaaggtctttaatcctcggcggaagctggagtttgccctgttgtttcttgtctttgatgagaatgagtcctggtacctggatgataacatcaaaacctattctgaccacccggagaaggtcaacaaggatgacgaggaattcatcgaatccaacaagatgcatgcaatcaacggaagaatgttcggaaatctgcaaggtctgactatgcatgtgggagatgaggtcaactggtaccttatgggcatggggaacgaaattgatctccatactgtgcattttcacgggcactcctttcaatacaaacatcgtggggtgtacagctccgatgtgttcgatatcttccccgggacttatcagacccttgaaatgtttcccagaactccaggtatttggttgctgcactgtcacgtgactgatcacattcatgccggaatggaaaccacctacactgtgctccaaaacgaagataccaagagcgga

SEQ ID NO: 1645 - DNA, 3195 bp, Artificial Sequence
  derived and/or modified sequence
atgaagattctcattctgggcatcttcctgtttctctgcagcaccccagcctgggccaaagaaaagcactattacatcggaatcatcgaaactacttgggactatgcgtccgaccatggagagaaaaagctgatctcggtcgataccgaacactccaatatctatcttcaaaacggccccgaccggatcggacgcctctacaagaaagcgctgtacttgcagtacaccgatgagacttttcggactactatcgaaaagccggtgtggttgggcttcctggggccgatcattaaggctgaaaccggagataaggtctacgtccatctgaagaatctggcaagccggccatacactttccacagccacggaatcacttattacaaggaacacgaaggtgctatttaccccgacaacaccactgacttccaaagagccgacgataaagtctaccctggggagcaatacacgtacatgctgttggcgacggaggagcagtccccgggcgagggtgacggcaactgcgtgacccgcatctaccattcgcatatcgacgcccctaaagatatcgcgtccgggctgataggaccacttatcatttgtaaaaaagattctttggataaggagaaggagaagcatatcgaccgcgagtttgtcgtgatgttttccgtcgtggacgaaaatttctcgtggtatctcgaggataatatcaagacctactgctcggagccagagaaggtggacaaggacaatgaggacttccaagaatcgaaccggatgtactcagtcaacggctacaccttcggatccctgcccggtctgtcgatgtgtgctgaagatcgcgtaaagtggtacctcttcgggatgggcaacgaagtggatgtgcacgccgcgttcttccatggacaggcgctgactaacaagaattacagaatcgacactataaacctgttcccggccactctgtttgatgcatacatggtggcccaaaatcctggggaatggatgctgagttgccagaatcttaaccacttgaaggcaggtcttcaagcgttttttcaggtccaggaatgcaataaatcatcaagcaaggacaacatccgcggcaagcacgtgcgacactactacatcgccgctgaagaaatcatctggaactacgccccctccggtatcgacatcttcaccaaggagaacctgactgcaccaggatcggacagcgctgtgttcttcgaacaagggaccaccaggattggaggctcgtacaaaaagctcgtgtaccgggaatacaccgatgcctcgtttaccaatagaaaggagcggggaccggaagaagagcacctcggaattctcggtcctgtcatctgggccgaggtcggagataccattagagttaccttccacaacaaaggagcctaccctttgagcatcgaaccgatcggcgttagattcaacaagaacaatgagggaacctactattcgccaaactacaacccccaaagccggtcggtgccgccatcagcaagccatgtggcaccgaccgaaacgtttacctacgagtggactgtgccgaaggaggtcggcccgaccaacgccgatccggtttgtcttgcgaagatgtactacagcgcagtggacccaactaaggacatctttactggccttatcggaccgatgaagatatgcaaaaaaggatcactgcacgccaacggcaggcagaaggacgtcgacaaggaattttaccttttcccgaccgtgtttgacgaaaacgagagcctgctgctggaagacaacatcaggatgtttactactgccccggaccaggtggataaggaggatgaagacttccaggaatcgaacaagatgcactcgatgaacggcttcatgtacggcaaccagccgggcctgactatgtgcaaaggagacagcgtagtgtggtacctgttcagcgcaggaaacgaagccgatgtgcatggtatctacttctcgggaaacacttacctctggcggggggaaaggcgtgacaccgcgaatcttttcccgcagaccagccttactctccacatgtggcccgataccgaaggaacctttaacgtggagtgtcttaccaccgaccactacaccggaggtatgaaacagaagtacactgtcaatcagtgccggcggcaaagcgaggatagcacgttctacctgggagaaagaacctattacatcgctgcggtggaagtggaatgggactattcacctcagcgcgaatgggaaaaggagctccaccatctgcaggagcagaacgtgagcaacgccttcctggacaagggcgagttctacatcggatcgaagtacaagaaggtcgtctaccgccagtacaccgactccactttcagggtacctgttgagcggaaggccgaggaagaacatctcggaatactcgggccacaactgcatgcagacgtgggggacaaagtgaaaatcatcttcaagaacatggccacccgaccgtactccatccacgcccacggtgttcagaccgagtcgtccaccgtgaccccgactctgccgggagaaactctgacttacgtttggaagatccctgaacggtcgggagcagggaccgaagattccgcgtgtatcccctgggcttactactcaactgtggaccaggtgaaggacctgtatagtggacttattgggccgctgattgtctgcaggcgcccgtatcttaaagtcttcaatccgcggcgcaagctggaatttgctctcctgttcctggtgttcgacgagaatgagtcctggtacttggacgataatatcaaaacctactcagaccatcctgagaaggtgaacaaggatgacgaggaatttatcgaatccaacaaaatgcatgctatcaacgggcgcatgttcggaaacctccaaggtttgaccatgcatgtgggcgacgaagttaattggtacctcatgggaatgggaaatgaaatcgaccttcacactgtgcatttccatggtcactcgtttcagtacaaacacagaggcgtgtacagcagcgacgtgttcgatatcttcccagggacctaccagaccctggaaatgttcccacggaccccgggaatttggctgctccactgccacgtgactgatcacatccacgctggaatggagactacgtataccgttttgcagaacgaagacactaaatccggg

SEQ ID NO: 1646 - DNA, 3195 bp, Artificial Sequence
  derived and/or modified sequence
atgaaaattctcattctggggatttttctttttctgtgctccacccccgcgtgggcgaaggagaaacattactacataggtatcatagaaaccacctgggactacgcttcggaccatggtgagaagaaactcatctcagtggatactgagcatagcaacatttacctccaaaatggtccagatagaattggacgcctttacaaaaaagccctttaccttcagtacaccgatgaaacttttcgaaccactattgagaaaccggtgtggcttggttttctcggtccaatcatcaaggcagaaaccggagacaaagtgtacgtgcacctgaagaacttggcctcacggccgtacacctttcatagccatggtattacttactacaaggaacacgagggggccatttacccagataacactaccgactttcaaagagccgatgataaggtttatcccggtgagcaatacacgtacatgcttctggcaaccgaagaacaatctcctggagaaggcgacggaaattgcgtcactcggatttaccactcccatattgatgcacctaaagatattgcaagcggtctgattggtccactgatcatctgtaagaaggattcccttgataaggaaaaggaaaagcatattgacagggaattcgtcgtgatgttttcagtggtcgatgaaaacttttcctggtaccttgaagataacattaagacttactgttcggagcctgaaaaggtggataaggataacgaggattttcaagaatccaacagaatgtactcagtgaatggctacaccttcggaagcctgccaggacttagcatgtgtgcagaagatcgggtgaagtggtacttgttcggcatgggcaacgaagtggatgtgcatgctgccttttttcacgggcaagcactgaccaataagaactaccgtattgataccattaaccttttcccagccacgctctttgatgcatacatggtggctcagaatccaggggaatggatgctttcgtgtcaaaacctcaatcacctcaaggctggactccaggcctttttccaagtgcaagaatgtaataagtcgtcgagcaaggataacataagaggcaagcacgtgcgtcattactacatcgctgcagaagaaatcatatggaactatgcaccttcgggaattgacatattcactaaagaaaatctcactgccccaggaagcgattcggcagtgttcttcgaacagggaaccacccggatcgggggatcgtacaagaagctcgtgtaccgtgagtatactgatgcatcgtttactaacaggaaggaaagaggaccagaagaggaacatctgggaatactggggccagtgatatgggctgaagtgggcgataccattcgagtgacctttcataacaaaggagcttacccactgtccatagagccaattggtgtcagatttaacaaaaacaacgaaggcacttactactcgcccaactacaacccccaatcaaggtccgttcctccctcggcgtcgcacgtcgcaccgactgaaactttcacttacgaatggactgtgcccaaggaagtcggacccaccaacgcggaccctgtgtgtctggcaaaaatgtactactcggcagtggatcctaccaaggatatcttcactggactgattggtcctatgaagatatgcaagaaaggaagcctccatgccaacggccgtcaaaaagacgtggataaggaattctacctcttcccaaccgtgtttgacgaaaacgagtccctccttctggaagataacatacggatgtttaccactgctcctgatcaagtggacaaggaggacgaggactttcaggagtcgaacaaaatgcactcgatgaacggcttcatgtatggtaaccagccaggccttaccatgtgtaagggcgacagcgtcgtctggtacctcttttccgcgggaaacgaagcagatgtgcatggaatctactttagcggaaatacgtacctgtggagaggagagcgacgggatactgcaaacctgttcccacaaactagcttgactctccatatgtggcctgacaccgaagggacctttaatgtggaatgccttaccactgatcactacactggtggtatgaaacaaaagtacacggtgaatcaatgtcggcgacaatccgaagattcaaccttttaccttggagaacggacgtattacatcgccgctgtggaagtggagtgggactactccccacaaagagaatgggaaaaggagctgcatcacctgcaggagcaaaacgtgtccaacgcattcctggataagggcgagttttacatcgggtcgaaatacaagaaagtggtgtacagacaatacaccgactcgacgttccgcgtgccggtggagaggaaggccgaggaggagcatcttggaattcttgggccccaactccatgccgatgtcggcgataaggtcaagatcattttcaagaacatggcaactcggccctactcgatccatgcacatggtgtgcagaccgagtcgtcgaccgtgaccccaactctgcctggagaaaccctcacctacgtgtggaagatccctgaacgctccggagcaggaaccgaggattcggcatgtattccctgggcgtattactccaccgtggatcaagtcaaagatctctactcgggtctgatcggtccgctcattgtttgcaggaggccatacctgaaagtgtttaatccaaggagaaaactcgaatttgctctgctgtttctcgtgttcgacgaaaatgaatcctggtacctggatgataacataaagacctactcagaccatcctgaaaaggtcaacaaggatgatgaagagttcattgagtcgaacaagatgcacgcgattaatggtcgcatgtttggcaacctgcagggactgaccatgcatgtgggagacgaggtcaactggtacctgatgggaatgggaaacgaaattgacttgcataccgtccattttcatggacacagcttccagtacaagcatagaggagtgtacagctccgacgtgtttgacattttccccggaacttaccaaacccttgaaatgtttccgcgcactcctggaatctggcttcttcactgtcacgttactgatcatatacatgcgggcatggaaaccacctacaccgtcctccagaatgaagatactaaatcggga

SEQ ID NO: 1647 - DNA, 3195 bp, Artificial Sequence
  derived and/or modified sequence
atgaagatccttattcttggcatcttcctgtttctgtgttccactccggcgtgggctaaggaaaaacactattacatcgggataattgaaactacctgggactacgcatcagaccacggcgagaaaaaacttatcagcgtggatactgagcactccaacatttacctccagaacgggccagatagaatcggacgcctgtacaagaaagcactctaccttcagtacacggacgaaacctttaggaccaccatcgaaaagccggtgtggcttggattcctggggcccatcatcaaggcagaaactggagacaaggtgtacgtgcacctcaaaaacctggcctctcgcccatacacttttcacagccacggcatcacctactataaggaacacgagggagcgatctacccagacaacactacggacttccagagagccgacgacaaggtatacccaggagaacaatacacttacatgctgctggccaccgaggaacagtctcctggtgaaggcgacggcaattgcgtgactaggatctatcactcacatatcgatgctccaaaggacattgcgagcgggctcattggaccgctgatcatctgtaaaaaggatagcctggacaaggaaaaggaaaagcacatcgatagagagttcgtggtgatgttctcagtcgtggacgagaacttctcgtggtacttggaagataacatcaaaacttattgctcggaaccggaaaaggtggataaagataacgaagatttccaggaaagtaacagaatgtacagcgtgaacggatacacctttgggtcactcccgggcctctccatgtgtgcagaagatcgggtcaaatggtaccttttcggaatgggtaatgaagtcgacgtccatgctgcattcttccatggtcaggcgctgaccaacaagaactaccgcatcgacaccatcaacctcttcccagcgactctgtttgacgcttacatggtggcgcagaatcctggggagtggatgctgtcctgccaaaatctcaaccatctgaaggcaggcctgcaggctttcttccaagtgcaagaatgtaacaagagcagtagcaaagacaacattcgcggaaagcacgtccggcattactatatcgcagccgaggaaatcatctggaattacgccccctcagggatcgacatctttactaaggaaaatctcaccgctccgggttcggactcggccgtgttctttgaacaaggcactacccgcatcggaggctcatacaagaagctggtctaccgcgagtacaccgatgcatcgttcactaacagaaaggagcgcggaccagaggaggagcacctgggcatcctggggccggtgatctgggccgaggttggagacactattcgggtcaccttccacaacaaaggggcgtatccacttagcatcgaaccgatcggagtgcggtttaacaagaataatgaaggcacttactacagcccaaactataacccgcaaagtcggtcggtgcccccttcggcctcccacgtggccccgaccgaaacctttacgtacgaatggacggtcccgaaggaagtcggccccaccaatgctgatccggtgtgcctcgccaaaatgtactactcggccgttgacccaacgaaggacatcttcactggattgatcggaccgatgaagatatgtaaaaaggggtcactgcatgccaatgggcgccagaaggatgtcgataaagaattctacttgtttccgactgtgtttgacgagaatgagagcctgctcctcgaggataacatacggatgttcactactgctccggaccaagttgacaaagaggacgaggattttcaggaatccaataagatgcactcgatgaatggattcatgtacggcaatcaaccaggactcactatgtgcaagggggatagcgttgtttggtacttgttctctgcgggaaacgaagccgatgtccatggaatttacttctcgggcaatacgtatctgtggcggggtgaacggagagataccgcgaatctgttcccacagactagcctgaccctccatatgtggcccgacaccgagggtactttcaacgtggaatgccttactaccgaccactacaccggcggaatgaagcagaagtacaccgtgaatcagtgcagacgacagtcggaggactccaccttttacttgggagagagaacttactacatcgcggcagtggaggtcgaatgggactactcaccgcaacgagagtgggagaaggaactgcaccacctccaggaacagaatgtgtcgaatgccttcttggataagggcgaattctacataggaagcaagtacaaaaaggtggtgtacaggcaatacaccgacagcactttccgcgtgccagtggagcgtaaagcggaagaagagcatctgggaattctgggacctcagctccatgccgacgtcggggacaaagtgaaaatcatctttaagaacatggccacccgtccgtactcgatccacgcccacggcgttcagaccgagtcgtcaacggtgacccctaccttgccgggagagactttgacctacgtgtggaagattccggaacgctcaggcgcaggcaccgaggacagcgcctgcatcccttgggcgtactacagcaccgtcgaccaagtgaaggacctgtactctggtctgatcggacctctgatcgtgtgccggaggccgtacctgaaggtctttaatccgcgacggaaactcgagttcgcgctgttgtttctggttttcgacgaaaacgaatcgtggtacctcgatgataacattaagacctactcagatcacccggagaaagtcaacaaagacgacgaagagttcatcgaatcaaacaagatgcatgccattaacggacggatgttcggtaatctgcagggtctgactatgcatgtgggcgacgaggtgaactggtacctcatggggatggggaacgagatcgatcttcacactgtccacttccacggacattccttccagtacaaacatcggggagtatactcatcagatgtgttcgacatcttccctggtacgtatcagactctggaaatgttcccccgcactccaggaatctggctgctccactgtcatgtgacggaccatatccacgctggtatggagactacgtacactgtgctgcaaaacgaggacaccaagtccggg

SEQ ID NO: 1648 - DNA, 3195 bp, Artificial Sequence
  derived and/or modified sequence
atgaagattttgattctcggaatcttcctttttctgtgttctaccccagcctgggcaaaagaaaagcattactacattggcatcatcgaaaccacctgggattacgcatcggatcatggagaaaagaagctgatttcagtggacaccgagcacagcaacatctaccttcagaatgggcctgatcgaattggacgcctctacaagaaggccctctaccttcagtacactgatgaaaccttccgtaccactattgaaaagcctgtctggttggggttccttggaccgattatcaaggcagaaaccggagataaggtgtacgtccatctcaaaaacctggcatcacggccttacacctttcatagccacgggattacctactacaaggaacatgaaggagctatctaccctgacaacactaccgattttcaacgagcagatgataaagtctacccaggtgaacaatatacttacatgctgcttgctactgaagaacagtcacctggtgaaggtgatgggaactgcgtgactagaatttaccattcccatatcgatgcccctaaggatattgcgtccggcctgatcggacctctgatcatctgtaaaaaggactcacttgataaagaaaaggagaagcatattgatcgagaattcgtcgttatgttctctgtcgtggacgagaactttagctggtaccttgaggacaacattaagacttactgttccgagcccgagaaggtggataaggataacgaagattttcaggagtccaatagaatgtactcggtgaacggatatacctttggtagccttcccggcctttccatgtgcgcagaagatagagtcaagtggtacctgttcggaatgggtaatgaagtggacgtgcatgcagcttttttccatggccaagcgctcactaacaaaaactaccgtattgataccattaatctgtttcctgcaaccctttttgatgcttacatggtcgcgcaaaatcccggggaatggatgctcagctgccagaacctgaaccaccttaaggccggcctgcaggcgttctttcaggtccaggagtgtaataagtcatcctcaaaggataacatccgggggaagcatgtgagacactattacattgccgcagaggagataatctggaactacgcgccatccgggatcgacatctttaccaaggagaacctcactgcaccaggatccgatagcgcagttttctttgaacagggaactacgagaatcggtggttcctacaagaagctcgtgtatagagagtatactgacgcatccttcactaatcggaaggaaaggggtccagaagaagaacatctgggcattctcggaccagtgatttgggcagaggttggcgacaccattagagtgaccttccataacaaaggcgcttacccgctgtcgatcgagcctattggcgtccggtttaacaagaacaacgaagggacttactactcaccaaactacaacccccaatcgaggtcggtgccacccagcgcatcgcacgttgccccaaccgagacttttacctacgagtggactgtgccaaaagaagtgggacctaccaacgcagatcctgtgtgtcttgcaaagatgtattactcagcagtggatccaactaaggacattttcactggtctgataggaccgatgaaaatctgtaagaagggatcgctgcacgccaacggcaggcaaaaagacgttgataaggagttctacctctttcccaccgtgtttgacgaaaacgagtcccttctgcttgaagataacatcaggatgtttaccactgcacctgaccaagtcgataaggaagatgaggattttcaagaatccaacaagatgcactcaatgaatggatttatgtacggtaatcagcccggacttaccatgtgcaagggagactcggtggtgtggtaccttttttcagcagggaacgaggcagatgtccatggaatttacttttccggaaatacctatctgtggagaggagagcgtagagatacggcgaatctctttcctcagacttccctgactctccatatgtggccggacactgagggcacttttaacgtcgaatgtctcaccactgaccattacaccggtggaatgaagcagaagtacaccgtgaaccagtgtaggcgacagtccgaagattcgaccttttacctcggcgaacgtacctactacatagccgcagtcgaagtggaatgggattattcgccacagcgggagtgggagaaggaacttcatcatctgcaagaacagaacgtctcgaacgcctttctcgataagggagagttctatattggatccaagtacaaaaaggtcgtctaccgccaatataccgattcaaccttcagagtccctgtggaaaggaaagcagaggaagaacaccttgggatacttggtcctcagcttcatgccgacgtgggcgataaggtgaagattatctttaagaatatggcaacccgaccatactcgatccacgcacatggggtccagaccgaatcttcgaccgtgactccgaccctgccaggtgaaaccctgacttacgtatggaagatccccgaaagaagcggggcaggtacggaggactccgcttgtattccttgggcatactatagcaccgtggaccaagtgaaggacctgtactcgggtcttattggccctctgatcgtctgccgcaggccctacctgaaggtgtttaatccccgtcggaagctggagtttgcacttctttttcttgtattcgacgagaacgaatcttggtacctggatgataacataaagacttactctgatcatcctgaaaaggtgaacaaggatgatgaggagttcatcgaatcgaataagatgcacgccatcaatggacgcatgttcggtaacctgcaaggccttactatgcatgtgggagacgaagtcaattggtacctcatgggcatgggtaatgagatagatctgcacactgtgcatttccacgggcattcattccaatacaaacataggggagtctacagttcggacgtattcgacatatttcctggaacctaccaaactctggaaatgtttcctaggaccccaggaatttggctcctccactgtcacgtgacggaccatatacatgctggcatggaaacgacctacaccgttctgcaaaacgaagataccaagtcggga

SEQ ID NO: 1649 - DNA, 3195 bp, Artificial Sequence
  derived and/or modified sequence
atgaaaatcttgatcctggggatatttttgttcctttgcagtacccctgcttgggcgaaagaaaagcactattacattggcataatcgaaaccacatgggactacgcctccgaccacggcgaaaagaagctcatttcggtcgacacggagcatagcaatatttatctacagaatggccccgacagaattgggcggctttacaaaaaggcgctctatctgcagtacacagatgagacctttagaactacaatcgagaaaccagtgtggctcggatttctcggcccgatcatcaaggctgaaacgggagacaaagtttacgtgcatttaaaaaacctcgcgagcagaccctacactttccattcgcatggtatcacatattacaaggaacacgaaggggcgatctacccagataatacgacggactttcaaagggccgatgacaaggtgtacccaggagaacagtatacttatatgctgctggcaacagaagaacagagtcctggagaaggtgacggtaattgcgtgacccgtatataccattcccacatcgatgccccaaaagatatagcctccgggttaatcggacctcttatcatttgtaaaaaggattcactggacaaagagaaggagaagcacatcgaccgcgagttcgttgttatgttttcagtcgttgatgagaacttctcttggtaccttgaggataacattaagacctactgttcggaaccagagaaggttgacaaggataatgaagactttcaggaatcgaataggatgtactcagtcaacggatacaccttcggatctcttccagggctatcaatgtgtgcagaggacagagtgaaatggtaccttttcggaatgggcaacgaggtggacgtgcatgctgcattctttcatggccaggctcttaccaacaagaattacagaatcgacacaatcaatctttttcctgccaccctgttcgatgcatacatggtggcccagaaccctggggagtggatgctgtcctgccagaatttaaatcacttgaaggccgggctgcaggctttttttcaggtgcaggaatgtaacaagtccagctcaaaggacaatattaggggaaaacacgtgaggcattactacattgctgcagaggaaatcatctggaactacgctccttctggaattgatatcttcactaaggaaaatttgacagcccccggatctgatagcgccgtgttcttcgaacagggcaccacccggatcggaggctcgtacaagaagctggtgtacagggagtatacagatgcctcttttactaatcgcaaggaaaggggccccgaagaagagcacctggggatactgggtccggtgatctgggcagaagtgggcgacaccatcagggttacgtttcacaataaaggagcctatccactgagcattgagcctatcggagtccgcttcaacaaaaacaacgaaggaacctattatagtcctaattacaacccacagagccgttcagtgcctccatcagcaagtcatgtcgctcctacagaaaccttcacttatgaatggacagtgcccaaggaggtaggccccacgaacgctgatcctgtgtgtctggcaaagatgtactactcagcagtggatcctacaaaagacatatttaccggactcatcggaccaatgaagatctgtaaaaaaggctctcttcacgcaaacggtcggcagaaggatgttgacaaagagttttatctgtttcccacagtattcgatgaaaacgaatctctgctgctggaagacaacattaggatgttcacgactgcaccggaccaggtagacaaagaggatgaggactttcaagagtcaaacaaaatgcactcaatgaacggcttcatgtacgggaatcagccaggactcaccatgtgtaagggggacagcgtagtgtggtatctgttctctgcgggtaatgaagcggatgtccacggcatctatttttccggcaatacctacctgtggagaggtgagcggcgagataccgcaaacctcttcccgcagacaagtttgactctccacatgtggcctgatactgaaggaaccttcaacgtggagtgcctaaccaccgaccactatactggcggcatgaaacaaaagtacacagtgaaccagtgcaggaggcagagcgaagactcaacgttttatttaggagaacgcacatattacattgccgctgtggaggtggaatgggactattccccacagcgggagtgggaaaaggagcttcatcatctacaggagcaaaacgtcagcaacgcgtttctcgataagggcgagttttacatcggttcgaagtacaaaaaggtggtttaccgccagtacaccgattccacctttcgcgttccagtggagagaaaggctgaagaagagcacctggggatcctgggacctcagctacacgccgatgtgggggacaaagtgaagataatcttcaaaaacatggctaccagaccatacagcatccatgcccacggagtgcaaaccgagagtagcacagtgacccctacgctgcctggcgagaccctgacttatgtgtggaagatccctgagcggtccggggccggaacggaagacagtgcctgtatcccctgggcctactacagcaccgtcgatcaggtcaaagacttgtactccggactgattgggcctttgatcgtttgccggagaccctacctaaaggtgttcaaccccaggaggaagttggaattcgccttactctttctggtttttgacgagaatgagagctggtacctggacgataatatcaaaacctattctgatcatcctgagaaggttaacaaggacgatgaggagttcatcgaatcaaacaagatgcacgccatcaacgggaggatgttcggcaacttgcagggcctcacgatgcacgtgggcgatgaggttaactggtatttaatgggaatgggtaacgaaatcgacctgcataccgtgcacttccatggacattcatttcagtacaagcatcggggtgtatatagttcagacgtcttcgatatctttcccggcacatatcagaccttggaaatgtttccacgcacacctggtatctggctcctgcactgtcacgtaaccgaccatatccatgctgggatggagactacttatacggtgctgcaaaatgaggacaccaaatctggc

SEQ ID NO: 1650 - DNA, 3195 bp, Artificial Sequence
  derived and/or modified sequence
atgaagatactcattcttgggatcttcttgttcctgtgctccactccggcatgggcgaaggagaaacactactatatagggatcatcgaaaccacctgggattacgccagcgaccacggagagaagaaattgatctcagtggacaccgaacactcgaatatctacctgcagaacggccctgacaggatcggacgactttacaagaaagcactctacctgcagtacactgacgaaaccttccgcaccaccatcgagaagccagtgtggctgggattcctgggaccgatcatcaaggcagagactggcgataaggtgtacgtccacttgaagaatctcgcctcccggccgtacaccttccattcacatggtatcacctactacaaggagcatgaaggagcaatctaccctgacaacaccactgacttccagcgggcggacgacaaagtgtaccctggagaacagtacacgtacatgctcctcgctactgaggagcagtccccaggtgaaggcgatggcaattgtgtgacccgcatctaccatagccatatcgatgccccaaaagacattgcatcaggcctcatagggcctctcatcatctgtaaaaaggactccttggataaggaaaaagagaagcacattgatcgcgagtttgtggtgatgttttccgtggtcgatgagaacttctcttggtacttggaggacaatatcaaaacttactgcagcgaaccggaaaaggtcgataaagataatgaggacttccaagagagcaatcggatgtactccgtgaacggatacacgttcggttccctgccgggactcagcatgtgcgctgaggatcgcgtgaaatggtatctcttcggaatggggaacgaagttgacgtgcacgcggccttttttcatggacaggcgctgactaataagaattaccggatcgacacgatcaacctgttcccagcaaccctcttcgacgcttacatggtggcccagaacccaggagaatggatgttgtcgtgccaaaatctgaaccacctcaaagcaggcttgcaggcctttttccaagtgcaagaatgcaacaagtccagcagcaaggataacatccgagggaagcacgtgcgtcactactacatcgcggctgaagaaatcatctggaattacgctccgtcggggattgacatcttcaccaaggaaaacctgaccgccccaggctccgattcggctgttttcttcgagcagggcacgacccggatcggaggcagctacaagaaactggtataccgcgaatatactgacgcctcgtttactaaccgcaaggagcggggtccggaggaggagcacttgggcatcctgggaccagtgatctgggcggaagtcggagacactatcagggtcactttccacaacaaaggagcctaccccctctccatcgaaccgattggtgtgcggttcaataagaacaatgaaggtacttactactccccaaattacaatccgcagagccggtcggtcccgccttccgcctctcacgtcgcccctactgagactttcacgtacgagtggactgtgccaaaagaggtcggcccgacgaacgccgacccggtgtgcttggccaagatgtactactcagcagtcgaccctactaaggacatcttcactggacttatcgggccaatgaaaatctgcaagaaggggtcgctgcacgccaacggacggcaaaaagatgtggacaaagagttttacctgttcccaaccgtgttcgatgagaacgagtcattgctcctggaagataacatcagaatgtttactactgcgccggaccaggtggataaggaagatgaggactttcaagaaagcaacaagatgcacagcatgaacggattcatgtacgggaatcagccaggactgaccatgtgcaagggagactcagtggtgtggtatctgttttcagccggaaatgaagccgacgtgcatgggatctacttttctggaaacacctacctgtggcgcggcgagagacgcgacaccgctaacctgtttccgcagacgtcgctgacgctgcatatgtggccggatactgaaggaactttcaacgtcgaatgtctgactaccgaccactacaccgggggaatgaagcagaaatacaccgtgaaccaatgcaggcgccagtcagaagatagcaccttctatctgggggaacgcacttactacatcgctgctgtcgaggtggaatgggactactcacctcagagggagtgggaaaaggagctgcaccatctccaggaacagaacgtgtctaatgccttcctggacaagggagaattctacatcggatccaagtacaagaaagtggtgtacaggcagtatactgatagcacctttagggtccccgtggaacggaaggcagaagaggagcatctgggaatcctcggaccgcagctgcacgccgatgtgggagataaggtcaagattatctttaagaacatggcaaccagaccgtactcaatccatgcccatggagtgcaaaccgagagctcaacggtgactcccacgctgcccggggaaaccctcacttatgtttggaagattccggaaaggtctggagccggaactgaagatagcgcttgcatcccatgggcgtactactccactgtggaccaagtgaaagatctgtacagcggacttatcggaccacttattgtgtgtcggcggccgtacctgaaagtctttaacccgcgccggaaactggagttcgcgctgctgttcctggtgttcgacgagaacgaatcatggtacctggatgacaacatcaaaacctacagcgatcaccctgaaaaagtcaacaaagatgacgaagaattcatcgagtccaataagatgcacgccatcaatggtcggatgttcgggaacctccagggactgactatgcatgtcggagacgaggtcaattggtacctcatgggaatgggaaacgaaatcgatttgcatactgtgcattttcatggtcactcatttcagtacaagcatcggggagtgtactcgtcggatgtgttcgatatcttcccggggacctaccagacgcttgaaatgtttccacgcactccgggaatctggctcctccactgtcatgtgaccgaccatatccatgcaggcatggaaactacctacacggtgctccagaatgaggatactaagtccgga

SEQ ID NO: 1651 - RNA, 3341 nt, Artificial Sequence
  derived and/or modified sequence
gggaaauaagagagaaaagaagaguaagaagaaauauaagagccaccaugaaaauccuuauucucgggauuuuccuguucuugugcucgacaccggcaugggccaaagaaaagcacuacuacauugggauuaucgagacaacgugggauuaugcgucggaccauggggagaaaaaguugaucucgguggacacggaacacucaaacaucuaccuccaaaauggaccggacagaaucggacggcucuacaagaaggcauuguaccuccaguacaccgaugaaacuuuucgaacaacaauugagaaaccugucuggcugggcuuucugggacccaucauuaaggcugagacuggggauaagguguauguccaccucaagaaucuugcguccaggccguauacuuuccauagccauggaaucacauauuacaaagaacaugagggggcgaucuacccagacaacacgacggacuuucagcgggcagacgacaaaguguacccgggugaacaguauacuuauaugcuccuggccacggaggaacagucaccgggcgagggcgacggaaauugcguaacgcggaucuaccacucccacauugacgcgccuaaagauaucgcgucgggauugauugguccgcucaucauuugcaaaaaggauucccuggacaaagagaaggaaaaacauaucgaucgcgaauuuguggucauguucagcguggucgaugaaaacuuuagcugguacuuggaggauaacaucaagacauacuguagcgagcccgaaaaaguggauaaggacaacgaagauuuccaagaguccaauagaauguacucggugaacgguuauacguucggcucccugccgggacuguccaugugcgcugaggaccgcgugaaaugguacuuguuugguauggggaacgaaguggaugugcacgcggcguucuuucacggccaagcguugacgaacaaaaacuacagaaucgauacgaucaauuuguuccccgcaacguuguuugaugcguacaugguggcgcagaacccgggagaguggaugcuuucgugucaaaaucucaaucaucuuaaagcagggcuucaagccuuuuuccaagugcaagaauguaauaagucaucauccaaagauaacauuagggguaaacacguacgccacuauuacauugcggcggaggagaucaucuggaauuacgcgccgucagggaucgacauuuucacaaaagagaacuugaccgcaccagggucagauucagcaguguuuuucgagcaggggacaaccagaaucggcggaagcuauaagaaacuuguguaccgggaguacacagacgccuccuuuacgaauaggaaggagagaggucccgaagaggagcacuuggggauucuugggccggugauuugggcggaaguaggggauacuauccgggucaccuuccacaacaagggggcguauccgcugucgaucgaacccauuggagugcgguucaauaagaauaaugagggaaccuacuauucgcccaacuauaacccccagucacgcucggugcccccuucggccucccauguggcucccacggaaacguucacguaugaauggacuguacccaaagaagugggaccaaccaacgcggaccccgugugucuggcgaagauguauuacuccgcgguggacccuacgaaggacaucuuuacgggacugauuggaccuaugaagauuuguaagaagggaucguugcacgccaacgguaggcagaaggaugucgacaaggaguucuacuuauuuccuacuguguuugaugagaaugagucacuucuccuugaggacaauauucggauguucaccacugcgccagaccagguagacaaagaagaugaggauuuucaagaaucaaauaagaugcacucgaugaaugguuucauguacggaaaccaacccggccugacaaugugcaagggggacagcguagucugguacuuauucucagcaggaaacgaggcugacguccacgggaucuacuuuagcggaaacaccuauuuguggaggggugaacggagggauaccgccaaccuuuucccgcagacuucccucacgcuucauauguggcccgacacagagggaacuuucaaugucgaaugccuuacaaccgaucauuauaccggugguaugaaacagaaguacacgguaaaccaaugucggaggcagucggaagauucgaccuucuacuugggggagaggacguacuauaucgcggcagucgaggucgaaugggauuacucgccccaacgggagugggaaaaggaacugcaccaucuccaagagcagaaugucagcaaugcguuccuugacaaaggagaguuuuacaucggaucgaaguauaagaaggucguauaucgccaauacacggauuccacguuccgggugccggucgaaaggaaggcagaggaggagcaccuuggaauccucggaccgcaguugcacgcggaugugggugacaaggugaagauuaucuucaagaauauggccacucggcccuauuccauucacgcccacggugugcagacagagagcucgacagucacgccaacacuucccggagagacucuuacguaugucuggaaaauuccagaacgcagcggagcaggaacggaggacucagccugcauccccugggccuacuacucaacgguagaccaaguaaaggacuuguacagcgggcucaucggucccuugauugucuguagacgaccguacuugaaagucuuuaacccccgacgcaaacuugaauuugcucuucucuuucuuguguucgacgagaacgagagcugguauuuggacgacaacauuaagacauacagcgaccaccccgagaaggucaauaaggacgacgaagaguuuaucgaaucaaacaaaaugcacgcgaucaauggucgcauguuugggaaucuucaaggucuuacaaugcacgugggcgaugaggugaacugguaucucaugggaaugggaaacgagaucgaccuccacacuguacacuuucauggacacucauuucaguauaagcaccggggagucuauucaucggauguauucgacaucuuucccgggacguaucagacgcuggaaauguucccgcggacgccgggaaucuggcuccuucacugccauguaacggaccacauccaugcagggauggaaacaacauacacuguacugcagaaugaggauacuaagagcgguuaaugagcugccuucugcggggcuugccuucuggccaugcccuucuucucucccuugcaccuguaccucuuggucuuugaauaaagccugaguaggaag

SEQ ID NO: 1652 - RNA, 3198 nt, Artificial Sequence
  derived and/or modified sequence
augaagauccucauucugggaauuuucuuauuccucugcucgacccccgccugggccaaagaaaaacacuauuauauuggaauaaucgagacaaccugggauuaugccucagaccacggagagaaaaagcugauaagcguugauacagaacauucaaacauuuaccugcagaaugggcccgauaggauuggccggcuguacaaaaaagcacuguaucugcaguauacagacgaaaccuuccggacuaccaucgagaagccuguauggcucggcuuucugggucccauaaucaaagccgaaacuggagauaaaguguacguacaucugaaaaacuuggcuucacguccuuacaccuuucacucucacggaauaaccuauuauaaagagcacgagggcgcaauauauccagacaacacgaccgacuuccaacgugcugacgauaagguauauccaggugaacaauacaccuacaugcugcuggccacagaggaacaaucaccaggcgagggugacggaaauuguguuacuaggaucuaccacucccauaucgaugcuccaaaggauaucgccucuggucugaucggccccuuaaucaucugcaagaaggacucgcuggauaaggagaaagagaaacacaucgacagggaguucguugucauguuuucaguggucgaugaaaacuuuagcugguaccucgaagauaauaucaaaaccuacuguagcgaaccagagaagguggauaaagacaacgaagacuuucaggaguccaaucggauguauagcgugaauggguauaccuuuggaagccuccccggacugaguaugugcgcugaagaucgggugaagugguaucucuuuggaaugggcaacgaagucgacguacacgccgccuucuuccaugggcaagcucuaacuaacaagaauuacagaaucgauacuaucaaccuuuucccagcaacccuauucgaugccuacaugguggcacagaauccaggcgaguggaugcuaucaugucagaaccuuaaucaucucaaagcugggcugcaggccuuuuuccaggugcaggagugcaacaaaucaagcucuaaagauaacaucagagggaagcacguucggcauuauuauaucgcagcugaggaaaucauauggaauuaugccccaagcggcauagacauuuuuacaaaggagaacuugaccgcucccggcucagauuccgccguguucuucgaacaggggacaacuaggaucgggggauccuauaagaaacugguguaucgagaauauaccgaugcaucguucacaaauagaaaggagagagggccagaagaggaacaucugggaauacuugggcccgugauuugggccgagguaggcgauaccauuagggugaccuuccacaacaagggagcguacccucuuuccauagaaccuaucggagugagauuuaauaaaaauaacgagggcaccuacuauuccccaaacuauaacccacaaagucggagugugccaccuuccgccucccauguggccccuacagaaaccuucacauaugaguggacggugccaaaagaagucggaccaacuaacgcagaucccguuugucuggccaaaauguauuacucugccguagagcccaccaaggauauauuuacuggacugaucgggccgaugaagaucuguaagaaagguucacuacaugccaauggucggcagaaagacguggacaaggaauucuaccuguucccaacaguuuuugaugagaacgagagccuucuguuagaggacaauaucaggauguuuaccacggcucccgaucagguagacaaggaggacgaagacuuucaggaguccaauaaaaugcauucgaugaacggauucauguacggcaaccagccagggcucacuauguguaaaggagacuccguagucugguaucuguuuucagcuggaaacgaagccgacgugcaugggauauacuuuaguggcaacacuuauuuauggcgcggagagcggagggacacugcgaaccuauuuccccagacaucccugacccuccauauguggccugacacagaagggacuuucaacguggagugccugacaacagaucacuauacuggcggaaugaaacagaaguacaccguaaaccagugucgacgacaguccgaagauucuacauucuacuugggggagaggacuuacuacaucgcugcagucgaaguagaaugggauuacucgccccagcgagaaugggagaaggagcuacaccaccuacaagaacagaacguuuccaaugccuuccuagacaaaggggaauucuacauuggaucaaaguauaagaaggugguguaccggcaguacaccgacuccacauuccgggugccuguggagcgaaaagcagaggaggaacaccugggcauuuugggaccucagcuucacgcagacgugggagacaaagugaaaauuauuuuuaaaaauauggcgacaagacccuacuccauucaugcacacggaguccagaccgagucuagcacaguuacgccuacacuuccaggcgagacccugacguacguguggaagauccccgagagaagcggggccggaaccgaagauucugcuugcauccccugggcuuauuacuccacugucgaccaggugaaagaucuauacuccggacucaucggcccauuaauagucugccggagacccuaucuuaaaguguucaauccccgucgcaagcuugaauucgcacugcuguucuugguguuugaugagaaugagagcugguaccuggacgauaauauuaaaaccuacucugaccacccagagaaagugaacaaagacgaugaggaauucauagaauccaauaaaaugcacgccauaaauggcaggauguucggcaaucuucagggacugacuaugcaugugggcgacgaaguuaacugguaucugaugggcaugggcaaugagauugauuugcacacgguccacuuucauggccauucguuccaguacaaacaccggggcguauauagcagcgauguguuugacauauuucccgggaccuaucagacucucgaaauguucccucgcacgccuggcauauggcuacuucacugccaugucacugaccacauucacgcuggaauggaaaccacauacacaguucuccagaacgaggauacgaaauccggcuag

SEQ ID NO: 1653 - RNA, 3198 nt, Artificial Sequence
  derived and/or modified sequence
augaaaaucuugauccuggguauauuccuauuuuuaugcaguacccccgcaugggcuaaagaaaagcacuauuauauuggaaucaucgagacaacgugggacuacgccagcgaccauggagagaaaaaacugaucagcguggauaccgaacacucaaacauuuaccugcagaaugguccugaucgcaucggccgacuguauaaaaaagcacucuaccuccaguacacugacgaaaccuucaggacgacgauugaaaaacccguguggcuuggcuuccuuggacccaucauuaaagcagaaaccggagacaaagucuacguccacuugaagaaucucgcuagccgcccauacaccuuccauucccacggcaucacauauuacaaggagcacgagggcgcaauauacccagacaacacaacugauuuccagagggcagaugauaaaguguacccaggcgaacaauauaccuacaugcucuuggccacugaggagcaauccccuggugagggugauggaaacugcguuacacggauuuaccauucccacauugaugcacccaaggacauugcuuccgggcuuauuggaccacugaucauuugcaagaaggacucacucgauaaagaaaaagaaaaacauauagauagggaauucgugguaauguuuucggucguggacgaaaauuucuccugguacuuggaggacaauauuaagacuuacugcucggaacccgagaaaguugacaaagacaacgaagauuuucaggagaguaacagaauguauuccgugaauggcuacacuuucggcagccuuccaggcuuaaguaugugcgccgaagaucggguaaagugguaucuauuugggauggggaacgaggucgaugugcacgcagcuuucuuccacggccaggcccugaccaauaaaaauuauagaaucgacacuaucaaucucuucccugcaacccucuucgaugccuacauggucgcccaaaauccaggggaguggaugcuuagcugccaaaauuuaaaucaucuuaaggccggccuccaggcuuuuuuccaagugcaagaaugcaacaagagcucgucuaaagauaacaucagagguaagcauguucgccauuacuauaucgccgcagaagaaauuauuuggaacuaugcgccuucggguaucgauaucuucacaaaagagaacuugacugcuccugggagcgacuccgccguguuuuuugagcaagguacuacgagaaucggcggcucauacaaaaaauuaguuuaccgggaguacacagaugcaaguuuuacgaaucgaaaggaaagggguccagaggaggaacaucuggguauccuuggaccuguuauuugggcggaaguuggagauacaauuagaguaacguuccacaauaaaggggcguacccucucagcauugagccaaucggagugcgauucaacaagaauaaugaaggcacauacuacucacccaauuacaacccgcagagucguuccguucccccauccgcuucacacgucgcuccaacugaaacuuuuacuuaugaguggacuguacccaaagaaguaggacccaccaacgccgauccugugugcuuggccaaaauguauuauucagcuguggagccaaccaaagacaucuuuacaggguugaucggaccaaugaagaucuguaaaaaagggagccuucacgcuaauggccgccagaaggacguggauaaagaguucuaucuguuuccaacuguauuugaugaaaaugagucuuuguugcuggaggacaacaucagaauguuuaccacagccccugaucagguggacaaggaggaugaagauuuucaggaaucaaauaaaaugcauuccaugaauggauuuauguauggaaaucaaccagguuugacuauguguaaaggagauucaguagucugguacuuguuuagugcugguaaugaagccgauguccacggaauauauuucagugggaauacuuauuuauggcggggggaaaggcgagacacugcuaacuuauuuccacagaccucacuaacucugcacauguggccagauacagaaggcacuuucaauguugagugucuuacaaccgaucacuauacaggcggaaugaaacaaaaguacaccguaaaucaaugucgacgccagucagaagacucuacguuuuauuugggggagcgcaccuacuacaucgcggccguagagguggaaugggauuacagcccacagcgggagugggaaaaagaacuacaucaucuccaagagcagaaugugucaaacgccuuccuggacaaaggggaauuuuacauagggagcaaauacaaaaaagucgucuaucgucaguacacggauucaaccuuucgcgugcccguagagagaaaagccgaggaggagcaccuggggauccucgguccacaacuucacgccgacgugggugacaaaguaaagauaauuuucaaaaacauggcuacacggccuuauagcauucaugcucacggaguccagacagagucaagcacaguuaccccuacacucccuggugaaacgcucacauacguauggaaaauccccgaaagauccggcgccgguacugaagacagugccugcaucccuugggcauauuauuccaccgucgaucaggugaaagaucuauauucaggucucaucgggccacucaucguuugcagacggccuuauuugaagguuuuuaauccuagaagaaaacucgaguuugcacuauuguuccuuguguucgaugaaaaugaaaguugguauuuagaugauaauaucaaaacauacucggaucaccccgaaaagguaaauaaagaugaugaggaguucaucgagagcaacaaaaugcaugcaauuaauggccggauguucgggaaccuccagggauugacuaugcauguuggggaugaggucaacugguacuuaaugggcaugggaaacgagaucgaucugcacacagugcauuuucacggacauuccuuccaauacaaacaccgaggcgucuauagcuccgacguauuugauauuuucccuggcacauaccaaacucuagagauguuucccagaacaccagguaucuggcuucuucauugucaugugacagaccauauacacgcgggaauggagacuacuuauacaguccugcagaacgaggauacaaaaagcggguag

SEQ ID NO: 1654 - protein, 454 aa, Artificial Sequence
  derived and/or modified sequence
MALQLGRLSSGPCWLVARGGCGGPRAWSQCGGGGLRAWSQRSAAGRVCRPPGPAGTEQSRGLGHGSTSRGGPWVGTGLAAALAGLVGLATAAFGHVQRAEMLPKTSGTRATSLGRPEEEEDELAHRCSSFMAPPVTDLGELRRRPGDMKTKMELLILETQAQVCQALAQVDGGANFSVDRWERKEGGGGISCVLQDGCVFEKAGVSISVVHGNLSEEAAKQMRSRGKVLKTKDGKLPFCAMGVSSVIHPKNPHAPTIHFNYRYFEVEEADGNKQWWFGGGCDLTPTYLNQEDAVHFHRTLKEACDQHGPDLYPKFKKWCDDYFFIAHRGERRGIGGIFFDDLDSPSKEEVFRFVQSCARAVVPSYIPLVKKHCDDSFTPQEKLWQQLRRGRYVEFNLLYDRGTKFGLFTPGSRIESILMSLPLTARWEYMHSPSENSKEAEILEVLRHPRDWVR

SEQ ID NO: 1655 - DNA, 1365 bp, Artificial Sequence
  derived and/or modified sequence
atggccctgcagctcggacgcttaagttccggtccttgttggctggtggcccgcggtgggtgtggggggcctcgtgcgtggtcacaatgcggggggggcggtttgcgcgcgtggagccagcgctcggcagctggtagggtttgtaggccaccgggtcctgccggcacagagcagtcacgcggtctggggcacgggagcacctcccggggagggccgtgggtcggaacaggcctggcagctgcactcgccggactcgtcggacttgccactgctgcattcggacacgtccagagagccgagatgctcccaaagactagtgggaccagagcaacctctctcggacggcctgaggaggaagaggatgaattggcccacaggtgttcttccttcatggctccccccgtgacggacttaggtgagctaaggaggcgtcctggggacatgaaaaccaagatggagctactgatcctcgagacccaagcccaggtatgtcaggccttggcccaagtggatggtggcgctaatttcagtgtagatcggtgggagcgtaaagaagggggaggcgggatttcctgtgtcttgcaggacggttgcgtgtttgagaaggccggagtgtcaatcagcgttgtacatgggaatctttcagaagaggccgccaaacaaatgcggtccagaggaaaggttctcaaaactaaagacggcaagctgcctttttgcgcaatgggtgtgtcctccgtgatccaccccaagaatccccacgctcccaccatccattttaactaccggtattttgaggtggaggaggcggacgggaacaagcagtggtggtttgggggagggtgcgacttgactcccacatacctcaaccaggaggatgccgtgcacttccacagaacattaaaggaagcatgtgatcagcacgggcctgacctctatccaaagtttaagaaatggtgcgacgattacttcttcatcgctcatagaggcgagagaagagggataggggggatattcttcgacgatctggattcgcccagcaaggaggaggtctttcgtttcgtgcaaagctgcgcccgcgcggttgtgccctcttatatccccctggtaaagaaacattgtgacgacagcttcaccccccaagaaaagttgtggcagcaactgaggcgtggccgctatgtggagttcaatctgctctacgaccgcgggaccaagttcggcctcttcactccaggcagccgcatagaaagtattctgatgtcactccccctaactgctcgttgggagtatatgcattcaccttccgaaaatagtaaagaggctgagattttggaggtgttacgccaccctcgggactgggtgcgttag

SEQ ID NO: 1656 - DNA, 1365 bp, Artificial Sequence
  derived and/or modified sequence
atggccctgcagctgggccgcctgagcagcggcccctgctggctggtggcccggggcggctgcggcggcccccgggcctggagccagtgtggcggcggcggcctgcgggcctggagccagaggtctgctgctggccgggtgtgccggcccccaggccctgctggaacagagcagagccggggcctgggccacggcagcaccagccggggcggcccctgggtgggcaccggcctggccgccgccctggccggcctggtgggcctggccacagctgcctttggacatgtgcagagagctgagatgctgcccaagaccagcggcacccgggccaccagcctgggccggcctgaggaggaggaggatgagctggcccaccgctgcagcagcttcatggcccctcctgtgacagacctgggggagctgcggcggcggcctggggacatgaagaccaagatggagctgctgatcctggagacccaggcccaggtgtgccaggccctggcccaggtggatggaggagccaacttctctgtggaccgctgggagaggaaggagggcggcggcggcatcagctgtgtgctgcaggacggctgtgtgtttgagaaggccggcgtgtccatctctgtggtgcacggcaacctgtctgaggaggccgccaagcagatgaggagccggggcaaggtgctgaagaccaaggatggcaagctgcccttctgtgccatgggcgtgtcctctgtcatccaccccaagaacccccacgcccccaccatccacttcaactaccgctactttgaggtggaggaggctgatggcaacaagcagtggtggtttggaggcggctgtgacctgacccccacctacctgaaccaggaggatgctgtgcacttccacaggaccctgaaggaggcctgtgaccagcacggccctgacctgtaccccaagttcaagaagtggtgtgatgactacttcttcatcgcccacagaggagagcggcggggcatcggcggcatcttctttgatgacctggacagccccagcaaggaggaggtgttccgctttgtgcagagctgtgcccgggctgtggtgcccagctacatccccctggtgaagaagcactgtgatgacagcttcaccccccaggagaagctgtggcagcagctgcggcggggccgctacgtggagttcaacctgctgtatgaccggggcaccaagtttggcctcttcaccccaggcagccgcatcgagagcatcctgatgagcctgcccctgacagcccgctgggagtacatgcacagccccagcgagaacagcaaggaggccgagatcctggaggtgctgcggcacccccgggactgggtgaggtag

SEQ ID NO: 1657 - DNA, 1365 bp, Artificial Sequence
  derived and/or modified sequence
atggccctgcagctgggccggctgagcagcggcccctgctggctggtcgcgagagggggttgtggcggaccacgagcttggtctcaatgtggaggaggtgggcttcgggcctggtctcagcgctcagctgccgggagggtgtgtagacccccagggcccgcaggcacagaacaatcccgcgggttggggcacggaagtaccagccgcggagggccttgggtggggaccggcctggcagctgcgctggccggcctggtaggattggcaaccgccgctttcggccatgtgcaacgggcagagatgctgcctaagacttctgggaccagagctacttcactagggcgacccgaggaagaggaggatgaacttgcccatagatgtagttccttcatggcgccccctgtgaccgatctgggagaactgcggcggcggccaggagatatgaaaacaaaaatggaattgctgatcctcgagacccaggctcaagtctgtcaggcgttggcccaggtagacggcggggccaatttttcagtggacagatgggagcgcaaagaggggggcggcggaatttcatgtgtcctccaggacggatgtgtgttcgagaaagctggcgttagtatctctgtggttcacggtaacctgagcgaggaagccgctaaacagatgagaagccgaggaaaagtactaaaaacaaaagatggtaaactaccattctgtgctatgggcgtatcaagcgtgatccaccctaagaaccctcatgctccgactattcactttaattatcgctacttcgaggtggaggaagcagatgggaacaagcagtggtggttcggaggaggatgtgatctgaccccaacctacctgaatcaagaggacgccgtccattttcacaggaccctgaaagaagcatgtgatcagcatggccctgatctgtaccctaaattcaaaaagtggtgcgacgactacttcttcatcgctcatcggggggaacggaggggcatcggaggaatattcttcgacgacctggacagtccttcaaaggaagaagtgtttagattcgtgcagagctgtgccagggcggtggtcccatcctacataccactggtcaaaaagcactgtgatgactcgtttacccctcaggagaagctatggcagcagctcaggcggggtcgatatgtcgagtttaacctgctgtacgataggggaacaaagttcggcttatttactccaggttcaagaatcgagtccattcttatgagtctccctctgaccgctaggtgggagtacatgcacagtccttccgagaattctaaagaagctgagatcctggaggtcctacgacaccctagggattgggtcagatag

SEQ ID NO: 1658 - DNA, 1365 bp, Artificial Sequence
  derived and/or modified sequence
atggcgctgcagttgggacggctatcatcaggtccctgttggcttgtggcaagaggaggttgtggcggacccagagcgtggtcacagtgcggagggggtggtctgcgcgcatggtcccaaagatctgccgcaggcagagtctgcaggccccctggacctgcagggacagagcagtccagaggcctagggcatggatctacctctaggggcggaccctgggtaggtacagggctggcagccgcactcgcagggttagtgggtctggctacggccgcttttggacatgttcagcgcgcagaaatgcttcctaagacctccggaaccagagccaccagtcttggtagacctgaggaggaagaggacgagctcgctcaccgctgctcatcatttatggccccacctgttacagacctcggggagcttagacggcgacctggtgatatgaagaccaaaatggagcttctgattcttgagacccaagctcaggtgtgtcaggctctggctcaggtggacgggggagcaaattttagcgtggaccgctgggagaggaaggaagggggaggcggaatctcctgtgttctgcaggacggatgcgtgtttgagaaagctggagtctcaatctccgttgtgcatggaaacttgagtgaagaggccgctaaacaaatgcgatccagaggcaaggtgctcaagaccaaagatggtaagctgcctttctgcgcaatgggcgtctcgtcggtgatccatcctaaaaacccacacgcacctaccattcacttcaattatcgatactttgaagtggaggaagctgatgggaataagcagtggtggttcgggggaggctgtgacttgacacccacctatcttaaccaagaagacgcagtacatttccacaggacactcaaggaagcttgtgatcaacacgggccagacttgtatccgaaattcaagaagtggtgtgacgactattttttcatagctcatcgcggagagcgaaggggtattggaggaatattttttgatgatttggacagtccaagcaaggaggaggtgttccgctttgtgcagtcctgtgccagagccgtggtcccttcatacatccctctggttaagaagcattgtgatgacagctttacaccccaggagaaactgtggcagcaactccgtcgaggtcgctacgtcgaattcaacttgttatatgatagaggaaccaaatttggcctcttcactccaggctccaggatcgagtccattctcatgtcgttacctctgactgctcgatgggaatacatgcatagtcctagtgagaacagcaaagaggccgaaattttagaggttctgcgccatcctagggattgggtccgctag

SEQ ID NO: 1659 - DNA, 2825 bp, Artificial Sequence
  derived and/or modified sequence
cgcgcagggacgccgcaggcggcgataggatccggactacagctcccagcgcgccccagttcccgcccccgcctccggagcccgacgctgcagcggctcttctcgaaaggttctttccgcctgtgcagctcgccggctcaatactccgggggtctgggtggggggctcaaacgcagggctctgggacgcaggcactgctccaggtgatagtgcgggaacatggccttgcagctgggcaggctgagctcgggcccctgctggctcgtggcgcggggcggctgcggagggccccgcgcctggtcccagtgcggcggcggagggctccgagcctggtcccagcgcagcgcagccggacgcgtctgccggccccctggcccggctggcacggagcagagccgcgggctggggcacggctcgacgtcgagaggcggcccctgggtggggacagggctggccgcggcgctggcggggttggtggggctggccaccgccgccttcgggcatgtgcagcgggcggagatgttgcctaagacctcggggacgcgggccacttcgctggggaggccggaggaggaggaggatgagctggcccaccgctgcagcagcttcatggccccgcctgtgaccgacctgggcgagctgcgaaggaggccgggcgacatgaagaccaagatggagctgctgattctggagacccaggcccaggtgtgccaggctctggcacaggtagacgggggcgccaacttttctgtggaccggtgggagaggaaggaaggaggtggcggcatcagctgtgtacttcaagatgggtgtgttttcgaaaaggctggggtgagcatttctgttgttcatggaaatctttcagaggaagctgcaaaacaaatgagaagcagaggaaaagttctgaagactaaagatggtaaattgccattttgtgctatgggcgtgagctctgttatccaccccaagaatcctcatgctcctactatccatttcaactacagatactttgaagtagaagaagctgatggcaacaagcagtggtggtttggtggtggatgtgacctcactccaacatacttgaatcaagaagacgctgtccattttcacagaactctgaaggaggcttgtgaccagcatggtccagatctctaccccaaatttaaaaaatggtgtgatgattacttctttatagcccatcgtggagaacggcggggcattggtggtatcttttttgatgatcttgactctccgtccaaggaggaggtgtttcgctttgtacagagctgtgccagggctgtagttccttcttacattccccttgtgaaaaagcactgtgatgactcattcaccccccaggagaagctgtggcagcagctcagaagaggacggtatgtagaatttaatctgctgtatgatcggggcacaaagtttggcctcttcactccaggatccagaattgaaagtatcttgatgtctttacctctaactgcccgatgggagtacatgcattcaccctcagagaattccaaagaagctgaaattctggaagttctacgccatccaagggactgggtgcgttgatgcaggcagaatggctgtgcaggggtttggagggcacacgatgtgtgctccccatgccactggtcggcactttgccactgtgtggcagttacccgtgccttagtcttctccactctgcaccctacctcgtgggcagatgataacatgttttggatgctgtcagtgatgaatggtgagatggcagattgtcagagtcaattgattaaacctcatttatacttctagtgtcattttatatgactagtttacaaaataggacattgagtttccaagtattgagataagggaatataaatagtattatatgtatcaggaaatctctcatcttgtttttgtttcatgtattttttaaagttttcatttgtgccacaaaaatctgtcgtggaatatattttattttcattaattcagtgaagttgagacttcatagtaattttagaatgcaacttgaaggtaaaaattttactttgtcaatactgaagtctctgctgtaatccttatatatctttctccagagaacataatattgtcaaatagatacacatttttctaataggtatttagaagcacttgaaataatctctgcatgtgttacaattcagttatttctgtagtttgtaaactctaaagtgacattactattattttagagatgtctaagttgtaattttgatttttgtggaaccattgtttgttaatgttgggattctctgcacttttgaatgtgaaagcttatatccctgaattctgatacttaagagttttctatttcagacatctctgtgtggaagttgagactaagaataatcctagggatgtcatgaatttaggcaatgtttctcatttggaaaatgaaatgagaaataatttccttctttaaagcaagtatatatagtatgagaaacttggaggcatttcatacacacgtttcttaggaaaatggacacattgaaaatgtcctcttttttatattagagattctgcagctctttgctcttaagagcaaatcacaacaggattcttaatgtatgatttctttgttcatatattatgaatgtattattttatttgcttcgtaataaagtttataaggaagagcatctcatacatatcattatcgtggaacacgttgaatgtttgtgattctgtgtggcctttttggggctggaaaatgtatgaattcttcaactgtcttacaagagatctgctaataaattttattattaaataagactaagaaa

SEQ ID NO: 1660 - DNA, 1365 bp, Artificial Sequence
  derived and/or modified sequence
atggccctgcagctgggcagactgagcagcggcccctgctggctggtggccagaggcggctgcggcggccccagagcctggagccagtgcggcggcggcggcctgagagcctggagccagagaagcgccgccggcagagtgtgcagaccccccggccccgccggcaccgagcagagcagaggcctgggccacggcagcaccagcagaggcggcccctgggtgggcaccggcctggccgccgccctggccggcctggtgggcctggccaccgccgccttcggccacgtgcagagagccgagatgctgcccaagaccagcggcaccagagccaccagcctgggcagacccgaggaggaggaggacgagctggcccacagatgcagcagcttcatggccccccccgtgaccgacctgggcgagctgagaagaagacccggcgacatgaagaccaagatggagctgctgatcctggagacccaggcccaggtgtgccaggccctggcccaggtggacggcggcgccaacttcagcgtggacagatgggagagaaaggagggcggcggcggcatcagctgcgtgctgcaggacggctgcgtgttcgagaaggccggcgtgagcatcagcgtggtgcacggcaacctgagcgaggaggccgccaagcagatgagaagcagaggcaaggtgctgaagaccaaggacggcaagctgcccttctgcgccatgggcgtgagcagcgtgatccaccccaagaacccccacgcccccaccatccacttcaactacagatacttcgaggtggaggaggccgacggcaacaagcagtggtggttcggcggcggctgcgacctgacccccacctacctgaaccaggaggacgccgtgcacttccacagaaccctgaaggaggcctgcgaccagcacggccccgacctgtaccccaagttcaagaagtggtgcgacgactacttcttcatcgcccacagaggcgagagaagaggcatcggcggcatcttcttcgacgacctggacagccccagcaaggaggaggtgttcagattcgtgcagagctgcgccagagccgtggtgcccagctacatccccctggtgaagaagcactgcgacgacagcttcaccccccaggagaagctgtggcagcagctgagaagaggcagatacgtggagttcaacctgctgtacgacagaggcaccaagttcggcctgttcacccccggcagcagaatcgagagcatcctgatgagcctgcccctgaccgccagatgggagtacatgcacagccccagcgagaacagcaaggaggccgagatcctggaggtgctgagacaccccagagactgggtgagatag

SEQ ID NO: 1661 - protein, 98 aa, Artificial Sequence
  derived and/or modified sequence
MMCGAPSATQPATAETQHIADQVRSQLEEKENKKFPVFKAVSFKSQVVAGTNYFIKVHVGDEDFVHLRVFQSLPHENKPLTLSNYQTNKAKHDELTYF

SEQ ID NO: 1662 - DNA, 297 bp, Artificial Sequence
  derived and/or modified sequence
atgatgtgtggcgccccctccgctacgcagcccgcaactgccgagacccagcacattgcagatcaggtccgctctcagctggaagagaaggagaacaaaaagtttcctgtctttaaagcggtcagcttcaaatcacaggtggtcgcaggaacaaactacttcatcaaggtgcatgtgggggacgaggacttcgtgcacctgcgggtgtttcagtcgcttccacacgagaataaacccttgacactgtcaaattaccagacgaataaggccaagcatgacgaacttacctatttctag

SEQ ID NO: 1663 - DNA, 297 bp, Artificial Sequence
  derived and/or modified sequence
atgatgtgtggggcccccagcgccacccagcctgccacagctgagacccagcacatcgctgaccaggtgcgcagccagctggaggagaaggagaacaagaagtttcctgtgttcaaggctgtgtccttcaagagccaggtggtggccggcaccaactacttcatcaaggtgcacgtgggagatgaggactttgtgcacctgcgggtcttccagagcctgccccatgagaacaagcccctgaccctgagcaactaccagaccaacaaggccaagcatgatgagctgacctacttctag

SEQ ID NO: 1664 - DNA, 297 bp, Artificial Sequence
  derived and/or modified sequence
atgatgtgcggcgcccccagcgccacccagcccgccaccgccgagacgcagcatattgccgaccaggtcaggagtcagttggaggagaaagaaaacaaaaagttcccagtctttaaggcagttagctttaagtcacaagtcgttgccggcactaactacttcataaaggtacatgttggagatgaagattttgtccatctgcgcgtgttccagtcactacctcatgagaataaaccacttactctgtcaaactaccaaacgaacaaggccaagcatgatgagctaacctatttttag

SEQ ID NO: 1665 - DNA, 297 bp, Artificial Sequence
  derived and/or modified sequence
atgatgtgcggggcaccatctgcaactcagcccgctacagctgagacgcagcacatcgcagatcaagtgcggagtcagctcgaggaaaaagagaacaaaaagttccccgtatttaaggcggtgagtttcaagagccaagtggtagcgggtactaattattttattaaggtgcacgttggcgacgaggacttcgtgcacctgagagtgtttcagtctctccctcatgagaacaaacccctcaccctgtccaattatcagaccaataaggccaagcacgatgagctcacctacttctag

SEQ ID NO: 1666 - DNA, 2163 bp, Artificial Sequence
  derived and/or modified sequence
cgcgtcccttcttgcggggccaccgcgaccccgcaggggactccgaagccaaagtgcctcctccccgccccttggttccgcccgcgcgtcacgtgaccccagcgcctacttgggctgaggagccgccgcgtcccctcgccgagtcccctcgccagattccctccgtcgccgccaagatgatgtgcggggcgccctccgccacgcagccggccaccgccgagacccagcacatcgccgaccaggtgaggtcccagcttgaagagaaagaaaacaagaagttccctgtgtttaaggccgtgtcattcaagagccaggtggtcgcggggacaaactacttcatcaaggtgcacgtcggcgacgaggacttcgtacacctgcgagtgttccaatctctccctcatgaaaacaagcccttgaccttatctaactaccagaccaacaaagccaagcatgatgagctgacctatttctgatcctgactttggacaaggcccttcagccagaagactgacaaagtcatcctccgtctaccagagcgtgcacttgtgatcctaaaataagcttcatctccgggctgtgccccttggggtggaaggggcaggattctgcagctgcttttgcatttctcttcctaaatttcattgtgttgatttctttccttcccaataggtgatcttaattactttcagaatattttcaaaatagatatatttttaaaatccttacagattgcctcctttgttttagacttttttcttcgtctgaaccaccccgggcaggtccttcccctcgggggcatggagggcggagagactgcctggctcacacagcaagcaggtggtggacccaggattcacacctgcccactccggcccgcgttcctaaccaccactctttacatgttggtgctttgactcttaggtcctggccccaagcttcagtttctcccataaaataaaagagtgtgagtaaatccaattccagagcataactggctccagatctcagatacattcacgcactttatgctctggtacggagaggcagccacacagtgtcgtgcacgtgcagaatagcctgcagcctcactgagtgccctgtggtgcgggaggcttcccatggagccacgtgggcttctaaagggaggtatcttaggagagcgtggctgtttttaaaaacaccttctagttttcaacagggattacttcccattcatggaattggtccggtgccttcccaactgtgattctatgttaaataggacagaagagggagcatcatacatgataagagctaagactgggggtgaaagtctctgtgcaccggggtcatgatgtgaacgtgttcctgagggtgtcctgagctgcgctttgcctccgaggcgtccggcagcgtatgccagaactgcagctgcagggttcaggctgtccagatcgtgggggatctgtgaagactaaggagggatctaccagtgagtccacagagctttgaaagtgatgttaggaaattctgaatcaggccgggcgcggtggctcacacctagaatcccaacactttgggaggccaaggtgggtggatcactctgaggtcaggagttctaggccagcctgacccacatggtgaaaccctgtctctactaataataaaaaaattagctgggcgttgtggcaggcgcctgtaatcccagctacttgggaggctgagacgggaggatcacttggactcgggaggtggtgggtgcagtgagccgagatcgtacctctgcactccagcctgggtgggtgacagagtgagatcctatctcaaaaaaaaaccaaaaagaaaactgaatcatggactgtgtgtattctacactcttaacatgaactctgagactaagcttttataacatgcaaaacagaatcaagcagttttgcattgaaaggaaaacccgttgtatttcccacttgagaatttccagcggaaggcaggtgggggaggggctgtttaggggaccacgcagcgggagagccatccccaacaggaagggagcggttgtctgcaggagcagtgaccaggaactcctatggggcacctgggttgggggaagctggatttagggttagaagcttgtgtgtaaacaggaaatatcagtgtaaaacagaaaataaaatatgtaattaa

SEQ ID NO: 1667 - DNA, 297 bp, Artificial Sequence
  derived and/or modified sequence
atgatgtgcggcgcccccagcgccacccagcccgccaccgccgagacccagcacatcgccgaccaggtgagaagccagctggaggagaaggagaacaagaagttccccgtgttcaaggccgtgagcttcaagagccaggtggtggccggcaccaactacttcatcaaggtgcacgtgggcgacgaggacttcgtgcacctgagagtgttccagagcctgccccacgagaacaagcccctgaccctgagcaactaccagaccaacaaggccaagcacgacgagctgacctacttctag

SEQ ID NO: 1668 - protein, 195 aa, Artificial Sequence
  derived and/or modified sequence
MGQIEWAMWANEQALASGLILITGGIVATAGRFTQWYFGAYSIVAGVFVCLLEYPRGKRKKGSTMERWGQKYMTAVVKLFGPFTRNYYVRAVLHLLLSVPAGFLLATILGTACLAIASGIYLLAAVRGEQWTPIEPKPRERPQIGGTIKQPPSNPPPRPPAEARKKPSEEEAAVAAGGPPGGPQVNPIPVTDEVV

SEQ ID NO: 1669 - DNA, 123 bp, Artificial Sequence
  derived and/or modified sequence
atgctgctgagagagatcacctacagcatcacccccctgagcctgcacggcaccagcctgctgaactgcaactggagagccaccggcctggtgaccctggagggccacagacccttccagtag

SEQ ID NO: 1670 - DNA, 588 bp, Artificial Sequence
  derived and/or modified sequence
atgggccagatagaatgggctatgtgggccaatgaacaggccctggcctccggtttaatactcatcactggcgggattgtggctactgccggccgattcacccaatggtatttcggcgcatactctattgtagcaggcgtttttgtatgcctgctcgaataccccagagggaagcgaaaaaagggaagcactatggagaggtggggccaaaagtatatgactgcagtcgtcaagcttttcggtcctttcactaggaactattatgtaagagcggtgcttcacctgctgttaagcgtgcctgctggctttctgttggctacaatcttgggcacagcttgtcttgccattgcatcaggcatctatctgctggctgcagttaggggtgaacagtggacccctatcgaaccaaaaccacgagagcggcctcagatcgggggtaccattaagcaacccccctcaaatcctcctcctaggccccctgccgaggcaaggaagaagccctccgaagaggaagcagcggtagccgccggcggccctccaggaggacctcaggtcaacccaattccagtaacagacgaagtcgtgtag

SEQ ID NO: 1671 - DNA, 588 bp, Artificial Sequence
  derived and/or modified sequence
atgggccagatcgagtgggccatgtgggccaatgagcaggccctggccagcggcctcatcctgatcactggaggcatcgtggccacagctggccgcttcacccagtggtactttggagcctacagcatcgtggccggcgtgtttgtgtgcctgctggagtacccccggggcaagaggaagaagggcagcaccatggagcgctggggccagaagtacatgacagctgtggtgaagctgtttggccccttcaccaggaactactacgtgcgggctgtgctgcacctgctgctgtctgtgcctgctggcttcctgctggccaccatcctgggcacagcctgcctggccatcgccagcggcatctacctgctggccgctgtgcggggggagcagtggacccccatcgagcccaagccccgggagcggccccagatcggcggcaccatcaagcagccccccagcaaccccccacccaggcctcctgctgaggccaggaagaagcccagcgaggaggaggccgctgtggccgccggcggccccccaggcggcccccaggtgaaccccatccctgtgacagatgaggtggtgtag

SEQ ID NO: 1672 - DNA, 588 bp, Artificial Sequence
  derived and/or modified sequence
atgggccagatcgagtgggccatgtgggccaacgagcaggccctggcatccggcctgattctaattaccgggggtattgtggcgacagccgggcgttttacacagtggtatttcggggcttactctatcgtggctggagtattcgtctgtctcttagaatacccaagagggaaacgcaaaaagggcagcacaatggaacgctgggggcaaaaatacatgactgctgttgtgaagctcttcgggccattcaccagaaactactacgtccgcgctgtgctgcacttattgctgagcgtcccagctggctttttgctggccacaatcctgggcaccgcctgcctagccattgcctctggtatttatctactggccgctgttcggggagagcagtggaccccaattgagcccaagccccgcgagaggccacagatcgggggtacaattaagcagccgccatccaatccccccccgaggcccccggctgaggctcgaaaaaagccctctgaagaagaggcagccgtggccgctgggggccccccaggcggacctcaggtcaatccaatcccagttactgacgaggtagtctag

SEQ ID NO: 1673 - DNA, 588 bp, Artificial Sequence
  derived and/or modified sequence
atgggccagattgaatgggctatgtgggcaaacgaacaagccctggcatccgggctcatcctgattaccgggggaattgtggctactgcaggtaggttcacccagtggtatttcggggcttactcaattgtcgcaggcgtgtttgtctgcttactggagtacccacgcggtaagcggaagaagggatccaccatggaaagatggggccagaagtacatgacagccgttgtcaaactgtttgggccttttacaaggaactattatgtgcgagctgtactccacctcttacttagtgtgccggcaggattcctcctggcaaccatcctagggaccgcctgcctagctatagcctcaggaatttatctgctcgcagcagtccgtggcgaacagtggacaccaattgaacccaaacctagagagcggcctcagatcggtggaaccatcaaacagcccccatccaatccccctcccaggccaccagccgaagcacggaagaagccgagtgaagaggaggccgcagtggccgcaggtggaccccctggaggaccccaagttaaccccatccctgtgaccgatgaggtggtgtag

SEQ ID NO: 1674 - DNA, 687 bp, Artificial Sequence
  derived and/or modified sequence
cgcgcctagcagtgtcccagccgggttcgtgtcgccatggggcagatcgagtgggccatgtgggccaacgaacaggcgctggcgtccggcctgatcctcatcaccgggggcatcgtggccacagctgggcgcttcacccagtggtactttggtgcctactccattgtggcgggcgtgtttgtgtgcctgctggagtacccccgggggaagaggaagaagggctccaccatggagcgctggggacagaagtacatgaccgccgtggtgaagctgttcgggccctttaccaggaattactatgttcgggccgtcctgcatctcctgctctcggtgcccgccggcttcctgctggccaccatccttgggaccgcctgcctggccattgcgagcggcatctacctactggcggctgtgcgtggcgagcagtggacgcccatcgagcccaagccccgggagcggccgcagatcggaggcaccatcaagcagccgcccagcaaccccccgccgcggcccccggccgaggcccgcaagaagcccagcgaggaggaggctgcggtggcggcggggggacccccgggaggtccccaggtcaaccccatcccggtgaccgacgaggtcgtgtgacctcgccccggacctgccctcccgccaggtgcacccacctgcaataaatgcagcgaagccggg

SEQ ID NO: 1675 - DNA, 588 bp, Artificial Sequence
  derived and/or modified sequence
atgggccagatcgagtgggccatgtgggccaacgagcaggccctggccagcggcctgatcctgatcaccggcggcatcgtggccaccgccggcagattcacccagtggtacttcggcgcctacagcatcgtggccggcgtgttcgtgtgcctgctggagtaccccagaggcaagagaaagaagggcagcaccatggagagatggggccagaagtacatgaccgccgtggtgaagctgttcggccccttcaccagaaactactacgtgagagccgtgctgcacctgctgctgagcgtgcccgccggcttcctgctggccaccatcctgggcaccgcctgcctggccatcgccagcggcatctacctgctggccgccgtgagaggcgagcagtggacccccatcgagcccaagcccagagagagaccccagatcggcggcaccatcaagcagccccccagcaaccccccccccagaccccccgccgaggccagaaagaagcccagcgaggaggaggccgccgtggccgccggcggcccccccggcggcccccaggtgaaccccatccccgtgaccgacgaggtggtgtag

SEQ ID NO: 1676 - protein, 508 aa, Artificial Sequence
  derived and/or modified sequence
MWELVALLLLTLAYLFWPKRRCPGAKYPKSLLSLPLVGSLPFLPRHGHMHNNFFKLQKKYGPIYSVRMGTKTTVIVGHHQLAKEVLIKKGKDFSGRPQMATLDIASNNRKGIAFADSGAHWQLHRRLAMATFALFKDGDQKLEKIICQEISTLCDMLATHNGQSIDISFPVFVAVTNVISLICFNTSYKNGDPELNVIQNYNEGIIDNLSKDSLVDLVPWLKIFPNKTLEKLKSHVKIRNDLLNKILENYKEKFRSDSITNMLDTLMQAKMNSDNGNAGPDQDSELLSDNHILTTIGDIFGAGVETTTSVVKWTLAFLLHNPQVKKKLYEEIDQNVGFSRTPTISDRNRLLLLEATIREVLRLRPVAPMLIPHKANVDSSIGEFAVDKGTEVIINLWALHHNEKEWHQPDQFMPERFLNPAGTQLISPSVSYLPFGAGPRSCIGEILARQELFLIMAWLLQRFDLEVPDDGQLPSLEGIPKVVFLIDSFKVKIKVRQAWREAQAEGST

SEQ ID NO: 1677 - DNA, 1527 bp, Artificial Sequence
  derived and/or modified sequence
atgtgggagttggtggcactcctgctcctgacgctggcttatctgttctggcctaaacgcagatgtcctggggctaaataccccaaaagccttctgagcctcccccttgtgggaagcttgccgtttctgcctcgtcacggacacatgcataacaatttctttaagctccagaaaaaatatggtcctatctattcagtacgcatgggaacaaagactaccgttatcgtgggacaccatcagctggccaaagaagtgttaatcaagaaagggaaagactttagcggtcggccccaaatggccactttggacatcgcctccaataatcggaaaggtatagcctttgccgattctggggctcattggcagcttcaccgtcgacttgctatggcaaccttcgccttattcaaggacggagaccaaaagctggaaaagatcatctgtcaggaaatttctaccctgtgcgacatgctggctacacacaatggacaatcaattgatattagtttcccagtatttgtggccgtaacaaacgtcatcagccttatctgttttaacacaagttataagaatggcgatcccgaactaaatgtgatccagaattataatgagggtataattgataacctgagtaaggattcattagttgacttagtaccatggctgaaaatttttccaaacaagacacttgagaagcttaagagccatgtgaagatcaggaacgacctgttgaacaaaatcttagaaaactataaagaaaagtttcggagcgatagcatcacaaatatgctcgacacactgatgcaggccaagatgaattcagacaacggcaacgctggccccgatcaggactccgagctcctctctgataatcatattctgaccactataggcgacatcttcggggcaggcgtcgaaactactacctccgtcgtcaagtggacactggcatttctactccacaaccctcaggtcaagaaaaagctgtacgaagaaattgatcagaatgtgggattttcgcgaacccctaccatatcggatcgcaaccgattgctcttgcttgaggccaccatcagggaggtgctccggctgaggcctgtggcccccatgctcatcccgcacaaggccaatgtcgattcgtctatcggcgagttcgcagtcgacaaggggaccgaagtgattattaacctgtgggcactgcaccataacgagaaagaatggcatcagcccgatcagttcatgcctgagcggtttttgaaccccgcaggaacacagttgatatccccgtctgtctcttacctgccctttggtgctgggccaagatcctgtattggtgagatacttgccagacaagagctgttcctgatcatggcatggctcctgcaaagattcgacctcgaagtgcccgacgacggccagctcccatcactcgagggcatccccaaagtggttttcctgatagatagttttaaagtgaaaatcaaggtccgccaagcttggagggaagcgcaggcagaaggcagtacctag

SEQ ID NO: 1678 - DNA, 1527 bp, Artificial Sequence
  derived and/or modified sequence
atgtgggagctggtggccctgctgctgctgaccctggcctacctgttctggcccaagaggcgctgccctggggccaagtaccccaagagcctgctgagcctgcccctggtgggcagcctgcccttcctgcccaggcatggccacatgcacaacaacttcttcaagctgcagaagaagtatggccccatctacagcgtgaggatgggcaccaagaccaccgtgattgtgggccaccaccagctggccaaggaggtgctgatcaagaagggcaaggacttcagcggccggccccagatggccaccctggacatcgccagcaacaacaggaagggcatcgcctttgctgacagcggggcccactggcagctgcaccggcggctggccatggccacctttgccctcttcaaggatggagaccagaagctggagaagatcatctgccaggagatcagcaccctgtgtgacatgctggccacccacaacggccagagcattgacatctccttccctgtgtttgtggccgtgaccaacgtcatcagcctcatctgcttcaacaccagctacaagaatggagaccctgagctgaatgtcatccagaactacaatgaaggcatcatcgacaacctgagcaaggacagcctggtggacctggtgccctggctgaagatcttccccaacaagaccctggagaagctgaagagccacgtgaagatcagaaatgacctgctgaacaagatcctggagaactacaaggagaagttcagaagtgacagcatcaccaacatgctggacaccctgatgcaggccaagatgaacagcgacaatggaaatgccggccctgaccaggacagcgagctgctgagtgacaaccacatcctgaccaccatcggggacatctttggagctggggtggagaccaccacctctgtggtgaagtggaccctggccttcctgctgcacaacccccaggtgaagaagaagctgtatgaggagattgaccagaatgtgggcttcagcaggacccccaccatcagtgacaggaaccggctgctgctgctggaggccaccatccgggaggtgctgcggctgcggcctgtggcccccatgctgatcccccacaaggccaacgtggacagcagcattggagaatttgctgtggacaagggcacagaggtgatcatcaacctgtgggccctgcaccacaatgagaaggagtggcaccagcctgaccagttcatgcctgagcgcttcctgaacccagctggcacccagctgatcagccccagcgtgtcctacctgccctttggagctggccccaggagctgcattggagagatcctggcccggcaggagctgttcctgatcatggcctggctgctgcagagatttgacctggaggtgcctgatgatggccagctgcccagcctggagggcatccccaaggtggtgttcctgattgacagcttcaaggtgaagatcaaggtgcggcaggcctggagggaggcccaggccgagggcagcacctag

SEQ ID NO: 1679 - DNA, 1527 bp, Artificial Sequence
  derived and/or modified sequence
atgtgggagctggtggccctgctgctgctgaccctggcctacctgttttggcctaaaaggagatgccccggcgcaaaatatccgaaaagcctgcttagcctccccctcgtgggatcactgccctttcttcctcgacacgggcatatgcacaacaatttctttaaactccagaaaaagtatggtccaatctacagcgttagaatgggcaccaagacgaccgtgatagtgggacaccaccagctggccaaggaggtgctgattaagaaagggaaagacttctccggccgcccccaaatggccactctggacatcgccagtaacaatcgcaagggcattgcattcgctgactctggcgcgcactggcagttgcacaggagactggctatggctacatttgccctctttaaagatggagatcagaaactcgaaaagatcatctgtcaggagatctctactctgtgtgatatgctggccactcataatggacagtcaattgatatctcctttcccgtctttgtcgccgtgaccaatgtgatttccctcatatgcttcaacacttcctataaaaatggcgacccagagctcaatgtgatacagaactacaacgagggaatcatagataatttgagcaaggactcattggtggacctggtcccttggcttaaaatctttcccaacaagacattagaaaaacttaagagccacgtcaagatcagaaacgacctgcttaacaaaatcctcgagaactacaaagagaagtttcgatcagattccatcactaacatgttggacactttgatgcaggcgaagatgaattccgataacggtaacgccggaccagatcaggattcagagctgctgagtgacaaccacattctcacaactattggtgacatctttggtgctggggttgaaaccacaacatccgtggtgaagtggactctggcctttctcctccataaccctcaggtcaaaaagaaactctacgaagaaatcgaccaaaatgtcggcttttcccggacacccaccatctctgacaggaatagactcttgctgctggaggctactattcgtgaggtgttgcgactgcggcccgtggccccaatgctcatcccccataaggcaaatgtcgacagttcaattggagaatttgctgtcgataaagggaccgaggtgattatcaatttgtgggccttgcaccataatgagaaagagtggcatcagcctgaccagttcatgccggagcggttcctgaaccccgccggcacacaactgatctccccctcagtgtcttatctgcccttcggcgccgggccccgtagttgcattggcgagatcttggcccggcaggaactattcctcatcatggcctggctgcttcagaggttcgacctggaagtcccagatgacggccagctaccttcactcgaaggcattcccaaggtcgtttttctgatagatagcttcaaggtcaaaattaaggtaaggcaggcctggagggaagcccaagccgagggctcgacgtag

SEQ ID NO: 1680 - DNA, 1527 bp, Artificial Sequence
  derived and/or modified sequence
atgtgggaattggtagcgctgctcttgctgacgcttgcctaccttttctggccaaagcgcaggtgtcctggggctaagtatcccaaatcgctgctgagtctccccctggtgggttccctgcccttcttacctaggcacggacacatgcataacaactttttcaagttacaaaagaaatacggtcctatttacagtgtacgtatggggacgaaaacgaccgtcatcgtggggcaccaccaattagccaaagaggttctgatcaagaaaggcaaggatttctctggtaggccacagatggccactctggatattgcttcaaacaacaggaaagggatcgctttcgccgattcgggcgcacactggcagctgcacaggcgtctagcgatggccaccttcgctttattcaaagacggtgatcagaagctagagaaaatcatatgtcaggagatttcgacactgtgcgatatgttggcgactcacaacggacaaagcattgacatttctttccctgtcttcgttgctgtcaccaacgtcatctcactgatatgttttaatacaagctataagaacggagaccctgaactgaatgtgattcagaattataacgaggggatcatagataatctgtccaaagacagtttggtcgatctggtgccctggctgaagatatttcctaacaaaactctcgaaaagttaaaaagtcacgtgaaaatccgtaacgatcttttaaacaagatccttgagaactataaggaaaaatttagaagcgacagcattaccaacatgttggacacacttatgcaagctaagatgaatagtgacaacgggaacgccggtccggaccaggattccgagctcctgtctgacaatcacattctcacaactatcggggatatctttggcgctggggtggaaaccaccacctctgttgtgaagtggacactcgccttcttgctccataatccgcaggtgaagaaaaaactttatgaggagattgaccagaatgttggttttagcaggacaccaaccatttcagatagaaataggctcctattactggaagccactattagggaggtgctcagactgcggcctgtggccccaatgctcattcctcataaagcaaacgtggacagctcgatcggggagttcgcagtggacaagggaactgaggtcatcattaacctgtgggcgctgcaccacaacgagaaggagtggcatcagccagatcagtttatgcccgaacgattcctcaatcctgccggaacacaactcatatctccatccgtgtcatatctccccttcggcgcaggaccgcgatcctgtataggtgaaatcctggccagacaggaactgttcctcattatggcatggttgctgcagaggttcgatttagaggtaccggacgatggccagctcccttctttggaaggaatccccaaagtcgtgtttctcatcgactcctttaaagtgaagatcaaagtgcgccaggcttggagggaggcccaagcagaagggtctacctag

SEQ ID NO: 1681 - DNA, 1870 bp, Artificial Sequence
  derived and/or modified sequence
atatgagctcaggcctggctgggctccaggagaatctttccacaaggcaagagataacacaaagtcaaggtgaagatcagggtagccctttaaaaggcctccttgtgccctagagttgccacagctcttctactccactgctgtctatcttgcctgccggcacccagccaccatgtgggagctcgtggctctcttgctgcttaccctagcttatttgttttggcccaagagaaggtgccctggtgccaagtaccccaagagcctcctgtccctgcccctggtgggcagcctgccattcctccccagacacggccatatgcataacaacttcttcaagctgcagaaaaaatatggccccatctattcggttcgtatgggcaccaagactacagtgattgtcggccaccaccagctggccaaggaggtgcttattaagaagggcaaggacttctctgggcggcctcaaatggcaactctagacatcgcgtccaacaaccgtaagggtatcgccttcgctgactctggcgcacactggcagctgcatcgaaggctggcgatggccacctttgccctgttcaaggatggcgatcagaagctggagaagatcatttgtcaggaaatcagtacattgtgtgatatgctggccacccacaacggacagtccatagacatctcctttcctgtcttcgtggcggtaaccaatgtcatctccttgatctgcttcaatacctcctacaagaatggggaccctgagttgaatgtcatacagaattacaatgaaggcatcatagacaacctgagcaaagacagcctggtggacctagtcccctggttgaagattttccccaacaaaaccctggaaaaattaaagagccatgttaaaatacgaaatgatctgctgaataaaatacttgaaaattacaaggagaaattccggagtgactctatcaccaacatgctggacacactgatgcaagccaagatgaactcagataatggcaatgctggcccagatcaagactcagagctgctttcagataaccacattctcaccaccataggggacatctttggggctggcgtggagaccaccacctctgtggttaaatggaccctggccttcctgctgcacaatcctcaggtgaagaagaagctctacgaggagattgaccagaatgtgggtttcagccgcacaccaactatcagtgaccgtaaccgtctcctcctgctggaggccaccatccgagaggtgcttcgcctcaggcccgtggcccctatgctcatcccccacaaggccaacgttgactccagcatcggtgagtttgctgtggacaagggcacagaagttatcatcaatctgtgggcgctgcatcacaatgagaaggagtggcaccagccggatcagttcatgcctgagcgtttcttgaatccagcggggacccagctcatctcaccgtcagtaagctatttgcccttcggagcaggacctcgctcctgtataggtgagatcctggcccgccaggagctcttcctcatcatggcctggctgctgcagaggttcgacctggaggtgccagatgatgggcagctgccctccctggaaggcatccccaaggtggtctttctgatcgactctttcaaagtgaagatcaaggtgcgccaggcctggagggaagcccaggctgagggtagcacctaaaggctgtaactcacagcccctgtccaccctatgtggccccacaacacagatttagagatacaaccccccacccttctccgccattcttccctactcccaacccactctgccttctttttcagcttgtggcaatgccagtgatgtgcataaacagtttttttttttccataa

SEQ ID NO: 1682 - DNA, 1527 bp, Artificial Sequence
  derived and/or modified sequence
atgtgggagctggtggccctgctgctgctgaccctggcctacctgttctggcccaagagaagatgccccggcgccaagtaccccaagagcctgctgagcctgcccctggtgggcagcctgcccttcctgcccagacacggccacatgcacaacaacttcttcaagctgcagaagaagtacggccccatctacagcgtgagaatgggcaccaagaccaccgtgatcgtgggccaccaccagctggccaaggaggtgctgatcaagaagggcaaggacttcagcggcagaccccagatggccaccctggacatcgccagcaacaacagaaagggcatcgccttcgccgacagcggcgcccactggcagctgcacagaagactggccatggccaccttcgccctgttcaaggacggcgaccagaagctggagaagatcatctgccaggagatcagcaccctgtgcgacatgctggccacccacaacggccagagcatcgacatcagcttccccgtgttcgtggccgtgaccaacgtgatcagcctgatctgcttcaacaccagctacaagaacggcgaccccgagctgaacgtgatccagaactacaacgagggcatcatcgacaacctgagcaaggacagcctggtggacctggtgccctggctgaagatcttccccaacaagaccctggagaagctgaagagccacgtgaagatcagaaacgacctgctgaacaagatcctggagaactacaaggagaagttcagaagcgacagcatcaccaacatgctggacaccctgatgcaggccaagatgaacagcgacaacggcaacgccggccccgaccaggacagcgagctgctgagcgacaaccacatcctgaccaccatcggcgacatcttcggcgccggcgtggagaccaccaccagcgtggtgaagtggaccctggccttcctgctgcacaacccccaggtgaagaagaagctgtacgaggagatcgaccagaacgtgggcttcagcagaacccccaccatcagcgacagaaacagactgctgctgctggaggccaccatcagagaggtgctgagactgagacccgtggcccccatgctgatcccccacaaggccaacgtggacagcagcatcggcgagttcgccgtggacaagggcaccgaggtgatcatcaacctgtgggccctgcaccacaacgagaaggagtggcaccagcccgaccagttcatgcccgagagattcctgaaccccgccggcacccagctgatcagccccagcgtgagctacctgcccttcggcgccggccccagaagctgcatcggcgagatcctggccagacaggagctgttcctgatcatggcctggctgctgcagagattcgacctggaggtgcccgacgacggccagctgcccagcctggagggcatccccaaggtggtgttcctgatcgacagcttcaaggtgaagatcaaggtgagacaggcctggagagaggcccaggccgagggcagcacctag

SEQ ID NO: 1683 - protein, 543 aa, Artificial Sequence
  derived and/or modified sequence
MGTSLSPNDPWPLNPLSIQQTTLLLLLSVLATVHVGQRLLRQRRRQLRSAPPGPFAWPLIGNAAAVGQAAHLSFARLARRYGDVFQIRLGSCPIVVLNGERAIHQALVQQGSAFADRPAFASFRVVSGGRSMAFGHYSEHWKVQRRAAHSMMRNFFTRQPRSRQVLEGHVLSEARELVALLVRGSADGAFLDPRPLTVVAVANVMSAVCFGCRYSHDDPEFRELLSHNEEFGRTVGAGSLVDVMPWLQYFPNPVRTVFREFEQLNRNFSNFILDKFLRHCESLRPGAAPRDMMDAFILSAEKKAAGDSHGGGARLDLENVPATITDIFGASQDTLSTALQWLLLLFTRYPDVQTRVQAELDQVVGRDRLPCMGDQPNLPYVLAFLYEAMRFSSFVPVTIPHATTANTSVLGYHIPKDTVVFVNQWSVNHDPVKWPNPENFDPARFLDKDGLINKDLTSRVMIFSVGKRRCIGEELSKMQLFLFISILAHQCDFRANPNEPAKMNFSYGLTIKPKSFKVNVTLRESMELLDSAVQNLQAKETCQ

SEQ ID NO: 1684 - DNA, 1632 bp, Artificial Sequence
  derived and/or modified sequence
atgggcaccagcctgagccccaacgacccctggcccctgaaccccctgagcatccagcagaccaccctgctgctgctgctgagcgtgctggccaccgtgcacgtgggccagagactgctgagacagagaagaagacagctgagaagcgccccccccggccccttcgcctggcccctgatcggcaacgccgccgccgtgggccaggccgcccacctgagcttcgccagactggccagaagatacggcgacgtgttccagatcagactgggcagctgccccatcgtggtgctgaacggcgagagagccatccaccaggccctggtgcagcagggcagcgccttcgccgacagacccgccttcgccagcttcagagtggtgagcggcggcagaagcatggccttcggccactacagcgagcactggaaggtgcagagaagagccgcccacagcatgatgagaaacttcttcaccagacagcccagaagcagacaggtgctggagggccacgtgctgagcgaggccagagagctggtggccctgctggtgagaggcagcgccgacggcgccttcctggaccccagacccctgaccgtggtggccgtggccaacgtgatgagcgccgtgtgcttcggctgcagatacagccacgacgaccccgagttcagagagctgctgagccacaacgaggagttcggcagaaccgtgggcgccggcagcctggtggacgtgatgccctggctgcagtacttccccaaccccgtgagaaccgtgttcagagagttcgagcagctgaacagaaacttcagcaacttcatcctggacaagttcctgagacactgcgagagcctgagacccggcgccgcccccagagacatgatggacgccttcatcctgagcgccgagaagaaggccgccggcgacagccacggcggcggcgccagactggacctggagaacgtgcccgccaccatcaccgacatcttcggcgccagccaggacaccctgagcaccgccctgcagtggctgctgctgctgttcaccagataccccgacgtgcagaccagagtgcaggccgagctggaccaggtggtgggcagagacagactgccctgcatgggcgaccagcccaacctgccctacgtgctggccttcctgtacgaggccatgagattcagcagcttcgtgcccgtgaccatcccccacgccaccaccgccaacaccagcgtgctgggctaccacatccccaaggacaccgtggtgttcgtgaaccagtggagcgtgaaccacgaccccgtgaagtggcccaaccccgagaacttcgaccccgccagattcctggacaaggacggcctgatcaacaaggacctgaccagcagagtgatgatcttcagcgtgggcaagagaagatgcatcggcgaggagctgagcaagatgcagctgttcctgttcatcagcatcctggcccaccagtgcgacttcagagccaaccccaacgagcccgccaagatgaacttcagctacggcctgaccatcaagcccaagagcttcaaggtgaacgtgaccctgagagagagcatggagctgctggacagcgccgtgcagaacctgcaggccaaggagacctgccagtag

SEQ ID NO: 1685 - DNA, 5247 bp, Artificial Sequence
  derived and/or modified sequence
aaaacccggaggagcgggatggcgcgctttgactctggagtgggagtgggagcgagcgcttctgcgactccagttgtgagagccgcaagggcatgggaattgacgccactcaccgacccccagtctcaatctcaacgctgtgaggaaacctcgactttgccaggtccccaagggcagcggggctcggcgagcgaggcacccttctccgtccccatcccaatccaagcgctcctggcactgacgacgccaagagactcgagtgggagttaaagcttccagtgagggcagcaggtgtccaggccgggctgcgggttcctgttgacgtcttgccctaggcaaaggtcccagttccttctcggagccggctgtcccgcgccactggaaaccgcacctccccgcagcatgggcaccagcctcagcccgaacgacccttggccgctaaacccgctgtccatccagcagaccacgctcctgctactcctgtcggtgctggccactgtgcatgtgggccagcggctgctgaggcaacggaggcggcagctccggtccgcgcccccgggcccgtttgcgtggccactgatcggaaacgcggcggcggtgggccaggcggctcacctctcgttcgctcgcctggcgcggcgctacggcgacgttttccagatccgcctgggcagctgccccatagtggtgctgaatggcgagcgcgccatccaccaggccctggtgcagcagggctcggccttcgccgaccggccggccttcgcctccttccgtgtggtgtccggcggccgcagcatggctttcggccactactcggagcactggaaggtgcagcggcgcgcagcccacagcatgatgcgcaacttcttcacgcgccagccgcgcagccgccaagtcctcgagggccacgtgctgagcgaggcgcgcgagctggtggcgctgctggtgcgcggcagcgcggacggcgccttcctcgacccgaggccgctgaccgtcgtggccgtggccaacgtcatgagtgccgtgtgtttcggctgccgctacagccacgacgaccccgagttccgtgagctgctcagccacaacgaagagttcgggcgcacggtgggcgcgggcagcctggtggacgtgatgccctggctgcagtacttccccaacccggtgcgcaccgttttccgcgaattcgagcagctcaaccgcaacttcagcaacttcatcctggacaagttcttgaggcactgcgaaagccttcggcccggggccgccccccgcgacatgatggacgcctttatcctctctgcggaaaagaaggcggccggggactcgcacggtggtggcgcgcggctggatttggagaacgtaccggccactatcactgacatcttcggcgccagccaggacaccctgtccaccgcgctgcagtggctgctcctcctcttcaccaggtatcctgatgtgcagactcgagtgcaggcagaattggatcaggtcgtggggagggaccgtctgccttgtatgggtgaccagcccaacctgccctatgtcctggccttcctttatgaagccatgcgcttctccagctttgtgcctgtcactattcctcatgccaccactgccaacacctctgtcttgggctaccacattcccaaggacactgtggtttttgtcaaccagtggtctgtgaatcatgacccagtgaagtggcctaacccggagaactttgatccagctcgattcttggacaaggatggcctcatcaacaaggacctgaccagcagagtgatgattttttcagtgggcaaaaggcggtgcattggcgaagaactttctaagatgcagctttttctcttcatctccatcctggctcaccagtgcgatttcagggccaacccaaatgagcctgcgaaaatgaatttcagttatggtctaaccattaaacccaagtcatttaaagtcaatgtcactctcagagagtccatggagctccttgatagtgctgtccaaaatttacaagccaaggaaacttgccaataagaagcaagaggcaagctgaaattttagaaatattcacatcttcggagatgaggagtaaaattcagtttttttccagttcctcttttgtgctgcttctcaattagcgtttaaggtgagcataaatcaactgtccatcaggtgaggtgtgctccatacccagcggttcttcatgagtagtgggctatgcaggagcttctgggagatttttttgagtcaaagacttaaagggcccaatgaattattatatacatactgcatcttggttatttctgaaggtagcattctttggagttaaaatgcacatatagacacatacacccaaacacttacaccaaactactgaatgaagcagtattttggtaaccaggccatttttggtgggaatccaagattggtctcccatatgcagaaatagacaaaaagtatattaaacaaagtttcagagtatattgttgaagagacagagacaagtaatttcagtgtaaagtgtgtgattgaaggtgataagggaaaagataaagaccagaaattcccttttcaccttttcaggaaaataacttagactctagtatttatgggtggatttatccttttgccttctggtatacttccttacttttaaggataaatcataaagtcagttgctcaaaaagaaatcaatagttgaattagtgagtatagtggggttccatgagttatcatgaattttaaagtatgcattattaaattgtaaaactccaaggtgatgttgtacctcttttgcttgccaaagtacagaatttgaattatcagcaaagaaaaaaaaaaaagccagccaagctttaaattatgtgaccataatgtactgatttcagtaagtctcataggttaaaaaaaaaagtcaccaaatagtgtgaaatatattacttaactgtccgtaagcagtatattagtattatcttgttcaggaaaaggttgaataatatatgccttgtataatattgaaaattgaaaagtacaactaacgcaaccaagtgtgctaaaaatgagcttgattaaatcaaccacctatttttgacatggaaatgaagcagggtttcttttcttcactcaaattttggcgaatctcaaaattagatcctaagatgtgttcttatttttataacatctttattgaaattctatttataatacagaatcttgttttgaaaataacctaattaatatattaaaattccaaattcatggcatgcttaaattttaactaaattttaaagccattctgattattgagttccagttgaagttagtggaaatctgaacattctcctgtggaaggcagagaaatctaagctgtgtctgcccaatgaataatggaaaatgccatgaattacctggatgttctttttacgaggtgacaagagttggggacagaactcccattacaactgaccaagtttctcttctagatgattttttgaaagttaacattaatgcctgctttttggaaagtcagaatcagaagatagtcttggaagctgtttggaaaagacagtggagatgaggtcagttgtgttttttaagatggcaattactttggtagctgggaaagcataaagctcaaatgaaatgtatgcattcacatttagaaaagtgaattgaagtttcaagttttaaagttcattgcaattaaacttccaaagaaagttctacagtgtcctaagtgctaagtgcttattacattttattaagctttttggaatctttgtaccaaaattttaaaaaagggagtttttgatagttgtgtgtatgtgtgtgtggggtggggggatggtaagagaaaagagagaaacactgaaaagaaggaaagatggttaaacattttcccactcattctgaattaattaatttggagcacaaaattcaaagcatggacatttagaagaaagatgtttggcgtagcagagttaaatctcaaataggctattaaaaaagtctacaacatagcagatctgttttgtggtttggaatattaaaaaacttcatgtaattttattttaaaatttcatagctgtacttcttgaatataaaaaatcatgccagtatttttaaaggcattagagtcaactacacaaagcaggcttgcccagtacatttaaattttttggcacttgccattccaaaatattatgccccaccaaggctgagacagtgaatttgggctgctgtagcctatttttttagattgagaaatgtgtagctgcaaaaataatcatgaaccaatctggatgcctcattatgtcaaccaggtccagatgtgctataatctgtttttacgtatgtaggcccagtcgtcatcagatgcttgcggcaaaaggaaagctgtgtttatatggaagaaagtaaggtgcttggagtttacctggcttatttaatatgcttataacctagttaaagaaaggaaaagaaaacaaaaaacgaatgaaaataactgaatttggaggctggagtaatcagattactgctttaatcagaaaccctcattgtgtttctaccggagagagaatgtatttgctgacaaccattaaagtcagaagttttactccaggttattgcaataaagtataatgtttattaaatgcttcatttgtatgtcaaagctttgactctataagcaaattgcttttttccaaaacaaaaagatgtctcaggtttgttttgtgaattttctaaaagctttcatgtcccagaacttagcctttacctgtgaagtgttactacagccttaatattttcctagtagatctatattagatcaaatagttgcatagcagtatatgttaatttgtgtgtttttagctgtgacacaactgtgtgattaaaaggtatactttagtagacatttataactcaaggataccttcttatttaatcttttcttatttttgtactttatcatgaatgcttttagtgtgtgcataatagctacagtgcatagttgtagacaaagtacattctggggaaacaacatttatatgtagcctttactgtttgatataccaaattaaaaaaaaattgtatctcattacttatactgggacaccattaccaaaataataaaaatcactttcataatcttgttatgaagttttatgttgtagcaaatatagtctaatgtatcactttatttcaactattactatggattattcaattaaaatattgcactgtaaa

SEQ ID NO: 1686 - DNA, 2173 bp, Artificial Sequence
  derived and/or modified sequence
ccactcaccgacccccagtctcaatctcaacgctgtgaggaaacctcgactttgccaggtccccaagggcagcggggctcggcgagcgaggcacccttctccgtccccatcccaatccaagcgctcctggcactgacgacgccaagagactcgagtgggagttaaagcttccagtgagggcagcaggtgtccaggccgggctgcgggttcctgttgacgtcttgccctaggcaaaggtcccagttccttctcggagccggctgtcccgcgccactggaaaccgcacctccccgcaggtcacatgggcaccagcctcagcccgaacgacccttggccgctaaacccgctgtccatccagcagaccacgctcctgctactcctgtcggtgctggccactgtgcatgtgggccagcggctgctgaggcaacggaggcggcagctccggtccgcgcccccgggcccgtttgcgtggccactgatcggaaacgcggcggcggtgggccaggcggctcacctctcgttcgctcgcctggcgcggcgctacggcgacgttttccagatccgcctgggcagctgccccatagtggtgctgaatggcgagcgcgccatccaccaggccctggtgcagcagggctcggccttcgccgaccggccggccttcgcctccttccgtgtggtgtccggcggccgcagcatggctttcggccactactcggagcactggaaggtgcagcggcgcgcagcccacagcatgatgcgcaacttcttcacgcgccagccgcgcagccgccaagtcctcgagggccacgtgctgagcgaggcgcgcgagctggtggcgctgctggtgcgcggcagcgcggacggcgccttcctcgacccgaggccgctgaccgtcgtggccgtggccaacgtcatgagtgccgtgtgtttcggctgccgctacagccacgacgaccccgagttccgtgagctgctcagccacaacgaagagttcgggcgcacggtgggcgcgggcagcctggtggacgtgatgccctggctgcagtacttccccaacccggtgcgcaccgttttccgcgaattcgagcagctcaaccgcaacttcagcaacttcatcctggacaagttcttgaggcactgcgaaagccttcggcccggggccgccccccgcgacatgatggacgcctttatcctctctgcggaaaagaaggcggccggggactcgcacggtggtggcgcgcggctggatttggagaacgtaccggccactatcactgacatcttcggcgccagccaggacaccctgtccaccgcgctgcagtggctgctcctcctcttcaccaggtatcctgatgtgcagactcgagtgcaggcagaattggatcaggtcgtggggagggaccgtctgccttgtatgggtgaccagcccaacctgccctatgtcctggccttcctttatgaagccatgcgcttctccagctttgtgcctgtcactattcctcatgccaccactgccaacacctctgtcttgggctaccacattcccaaggacactgtggtttttgtcaaccagtggtctgtgaatcatgacccagtgaagtggcctaacccggagaactttgatccagctcgattcttggacaaggatggcctcatcaacaaggacctgaccagcagagtgatgattttttcagtgggcaaaaggcggtgcattggcgaagaactttctaagatgcagctttttctcttcatctccatcctggctcaccagtgcgatttcagggccaacccaaatgagcctgcgaaaatgaatttcagttatggtctaaccattaaacccaagtcatttaaagtcaatgtcactctcagagagtccatggagctccttgatagtgctgtccaaaatttacaagccaaggaaacttgccaataagaagcaagaggcaagctgaaattttagaaatattcacatcttcggagatgaggagtaaaattcagtttttttccagttcctcttttgtgctgcttctcaattagcgtttaaggtgagcataaatcaactgtccatcaggtgaggtgtgctccatacccagcggttcttcatgagtagtgggctatgcaggagcttctgggagatttttttgagtcaaagacttaaagggcccaatgaatt

SEQ ID NO: 1687 - DNA, 1632 bp, Artificial Sequence
  derived and/or modified sequence
atgggaacgagcctgtcgccaaacgatccttggcccctgaaccccctctctatccagcagactactctgttacttctcctgtccgtgctggccaccgtacacgtggggcagcgactcctccggcagcgccgcaggcagctgagaagcgctcctcccgggcccttcgcctggccactaataggaaacgccgccgcagttggacaagcggctcacctttccttcgccaggctggctcgcaggtatggagatgtgtttcaaatcagattgggctcctgccccatagtggtgctcaacggggagcgggctattcaccaggctctcgtacaacagggaagtgccttcgccgatagacctgccttcgcatcgtttagggttgtttccgggggaaggtcaatggcctttggccactacagtgagcactggaaagttcagcgacgggcagcacattccatgatgcggaacttctttactcgacagcccaggtcacggcaggtgctggagggacacgtgttgagtgaggctcgggagttggtagctctcttggtccggggctcagcagacggggccttccttgacccgagacccctgacagtggtggccgtagcaaatgtaatgagtgccgtttgcttcggatgtcggtattcccatgatgaccccgagttccgtgagctgctttcccataacgaagaatttgggcgaacggtcggggctgggagcctggtcgacgtaatgccgtggcttcagtatttcccgaatcccgtgaggaccgtgttcagggaatttgaacagctgaataggaacttctccaactttatcctcgacaagttcttgagacattgtgagtcattgcgcccgggggccgcccctcgggacatgatggatgctttcattctgtccgctgagaaaaaagctgctggcgacagtcacggcggaggagcaagactggatcttgagaatgtgccggccacgatcaccgatattttcggggcgtcacaggacaccctttcaacagcacttcagtggcttctgctgctgttcaccaggtacccagatgtgcagaccagagttcaggccgaactcgaccaggtcgtcggccgggacaggcttccatgcatgggtgaccagcccaacctaccgtatgttttggctttcctctatgaagcaatgcgattctcttcttttgtgcctgttacaatccctcacgccacaactgcaaacacatcagtgctgggctaccacataccgaaggacaccgttgtgttcgttaatcagtggtccgtgaaccacgacccagtcaaatggccaaacccagaaaatttcgaccccgcccgattccttgacaaggacggcctgatcaacaaggacctgacttcaagggtgatgatttttagcgttggaaaaagaagatgcattggggaggaactgagcaagatgcagctcttcctttttataagtatcctggcgcatcagtgcgactttagggcaaatcccaacgaaccagcaaaaatgaacttttcttatggtcttacaatcaagcctaaatcatttaaggtcaatgtcactcttcgagagagtatggagctgcttgactctgctgtgcagaaccttcaggccaaagagacctgtcagtag

SEQ ID NO: 1688 - DNA, 1632 bp, Artificial Sequence
  derived and/or modified sequence
atggggacatctttgtcaccaaacgacccatggcccctgaaccctctttccatccagcaaactacattgctcctattgctgtccgtgcttgcgaccgtccatgtcggtcagcgcctccttcgtcagcggcgtcgtcagctcaggtctgccccaccaggtccattcgcctggccgctgattgggaatgccgcggctgtcggccaagccgcccacctgtcattcgcccgcctcgctcgtagatacggggacgtttttcaaatacggctcgggagctgccctatcgttgtcctgaatggagaacgcgctatccatcaagcgctagtgcaacaaggcagtgctttcgccgataggcccgccttcgcatcttttcgggtggtgtccggaggccggagtatggcgttcggacactattcggaacattggaaagtgcagaggagggccgcgcatagtatgatgagaaattttttcactcgacaaccaaggagtcgccaggtgctggagggccacgtgctctcagaggccagagagctggttgcccttcttgttaggggctcggccgacggggcattcctggaccccaggccattaaccgtggtagccgtggcaaatgtcatgagcgccgtctgctttggctgtcgatactcccatgacgatcctgagtttagggagttgctctcccacaacgaagagttcggccgaacggtgggcgcgggaagccttgtggatgtgatgccctggctacaatacttccctaaccccgtgagaacagtcttcagagagtttgaacagttaaatcgaaacttttctaattttatcctggataagttccttcgtcactgcgagtccctcagaccaggtgcggcccccagagacatgatggacgcattcatcctgtccgctgaaaaaaaagcagccggtgattcacacgggggtggagcacgccttgacttagagaacgttccagcgaccattactgacatcttcggcgcctctcaggataccctgagcacagctctacaatggctgcttctgctgttcaccagatacccggacgtccaaacccgtgtgcaggcagagttggatcaggtcgtcggccgggatcggttaccctgtatgggcgatcagccaaatctgccctacgttctagctttcctgtatgaagctatgaggttctcctcatttgtgcccgtgaccattcctcacgctaccacggccaatacaagtgttcttggttatcacattcctaaagacaccgtcgtgtttgtgaaccaatggagtgtcaatcatgatcccgtgaaatggcctaacccagagaattttgatcccgccaggttcctcgataaggacgggctgatcaacaaggacctgacttcccgcgtgatgatattctctgtggggaaacgaagatgcataggagaagagctttcaaaaatgcaactgttcctgttcatttctatcctcgcccatcagtgcgactttagggccaatccaaacgaacccgccaagatgaatttctcctacggcctgacgattaaaccaaagagcttcaaagtgaacgtaacgctacgagagtcaatggagttgctggattctgccgtgcagaatctgcaggctaaggaaacatgtcagtag

SEQ ID NO: 1689 - DNA, 1632 bp, Artificial Sequence
  derived and/or modified sequence
atgggcaccagcctgagccccaatgacccctggcccctgaaccccctgagcatccagcagaccaccctgctgctgctgctgtctgtgctggccaccgtgcacgtgggccagaggctgctgcggcagaggcggcggcagctgcggagcgcccctcctggcccctttgcctggcccctgattggaaatgctgctgctgtgggccaggccgcccacctgagctttgcccggctggccaggagatatggagatgtgttccagatccggctgggcagctgccccatcgtggtgctgaatggagagcgggccatccaccaggccctggtgcagcagggcagcgcctttgctgacaggcctgcctttgccagcttccgggtggtgtctgggggccgctccatggccttcggccactacagcgagcactggaaggtgcagaggagagctgcccacagcatgatgaggaacttcttcacccggcagcccaggagccggcaggtgctggagggccacgtgctgtctgaggcccgggagctggtggccctgctggtgcggggcagcgcagatggagccttcctggacccccggcccctgactgtggtggccgtggccaacgtgatgtctgctgtgtgcttcggctgccgctacagccatgatgatcctgagttccgggagctgctgagccacaatgaggagtttggaagaacagtgggcgccggcagcctggtggatgtgatgccctggctgcagtacttccccaaccctgtgaggacagtgttccgggagtttgagcagctgaacagaaacttcagcaacttcatcctggacaagttcctgcggcactgtgagagcctgcggcctggagctgccccccgggacatgatggatgccttcatcctgtctgctgagaagaaggctgctggggacagccatggaggaggagcccggctggacctggagaatgtgcctgccaccatcacagacatctttggagccagccaggacaccctgagcacagccctgcagtggctgctgctgctcttcacccgctacccagatgtgcagaccagggtgcaggccgagctggaccaggtggtgggccgggaccggctgccctgcatgggagaccagcccaacctgccctacgtgctggccttcctgtatgaggccatgaggttcagcagctttgtgcctgtgaccatcccccacgccaccacagccaacacctctgtgctgggctaccacatccccaaggacacagtggtgtttgtgaaccagtggagcgtgaaccacgaccctgtgaagtggcccaaccctgagaactttgatcctgcccgcttcctggacaaggatggcctcatcaacaaggacctgaccagccgggtgatgatcttctctgtgggcaagaggcgctgcattggagaggagctgagcaagatgcagctgttcctgttcatcagcatcctggcccaccagtgtgacttccgggccaaccccaatgagcccgccaagatgaacttctcctatggcctgaccatcaagcccaagagcttcaaggtgaatgtgaccctgcgggagagcatggagctgctggacagcgctgtgcagaacctgcaggccaaggagacctgccagtag

SEQ ID NO: 1690 - DNA, 1632 bp, Artificial Sequence
  derived and/or modified sequence
atgggcaccagcctgagccccaacgacccctggcccctgaaccccttgtccatccaacagaccacacttctgcttctgctttccgtccttgcaaccgttcatgtggggcagcgtctgttgcggcagagacgccgccagctgcggtccgctcctcctggcccttttgcctggccgctgatcggaaacgcagcagctgtaggtcaggcagcccatctgtctttcgcgagattagcccggagatacggagatgttttccagattcggctcggctcctgcccaatcgtggtgctgaatggcgagcgagccatccatcaagccctggttcagcaaggatccgccttcgccgatagacctgcattcgcctcctttagagtggtgagcggcggtaggtccatggccttcggccactatagcgagcattggaaagtacagcgccgcgccgctcattcgatgatgcgaaattttttcacaaggcagccgcggagcaggcaggtcctggaaggacatgttctgtccgaggcccgcgaattagtggccctgctagttagagggagcgccgacggggcctttctggatccaaggccactgactgtcgtggcagtggcaaatgtgatgtccgctgtgtgtttcgggtgtcgctatagtcacgacgatccagagtttcgggagctgttgtcacacaatgaagaattcggccgtactgtgggagctggtagtctggtggatgtaatgccatggttgcagtacttccctaaccctgttaggaccgttttcagggaattcgagcagcttaacagaaacttttccaattttatcctggacaaatttctgcgccattgtgaatctctgagacccggcgccgcccctcgcgacatgatggacgcatttatactttctgccgaaaaaaaagcagctggcgactcacacggcggaggcgcgcgcctggacttagaaaatgtaccggcgacaattacagacatcttcggcgcgagccaggacaccctcagcaccgctttgcagtggctcttattgctttttactagatacccggacgtacagacccgcgtccaggctgagttagaccaggtcgtgggcagagacagattaccgtgcatgggcgaccagcctaatctgccctacgtgctggctttcctatatgaagcgatgaggttttcctccttcgtgcctgtgaccatccctcatgccactaccgccaacaccagcgtgcttggatatcacatcccaaaggacacggtcgtattcgtgaatcagtggagtgtcaatcatgacccagtgaagtggccgaatccagagaacttcgacccggccaggtttctggacaaggatgggctaataaacaaagacctgacgagtcgcgtgatgatcttttctgtgggcaagcgtcgctgtatcggcgaagagctgagtaagatgcagctgtttctcttcatctccattctggcccaccaatgtgatttccgggcaaatccaaacgaacccgctaagatgaatttttcgtacgggcttactatcaaaccaaagtcgtttaaggtcaacgtgacgttgcgagagagcatggaactactggatagcgctgtccagaaccttcaggcaaaggagacatgccagtag

SEQ ID NO: 1691 - DNA, 1632 bp, Artificial Sequence
  derived and/or modified sequence
atgggcaccagcctgagccccaacgacccctggcccctgaaccccctgagcatccagcagaccaccctgctattgttgctgtccgtcctggctacagtgcacgtgggccagcgcctgttacgccagcggagaaggcagcttaggagcgccccaccaggacccttcgcttggcctctgatcggtaatgcagcagcagtcggacaggctgcccatctgagctttgctaggctggcccgcagatatggcgacgtctttcaaatccgactgggttcatgccccatagttgtgctgaacggagagcgcgccatacatcaagctctcgtgcagcagggcagtgcatttgcagatcgaccagcctttgccagtttcagggttgtgtcaggcggcagatccatggcctttgggcattactccgaacactggaaggtgcagcgtagggccgcccacagcatgatgcgaaactttttcacacgccaaccacggagccgccaggtcttggaaggacatgtgttgagcgaagcacgagagctggttgccctcctggttcgtgggagcgcagatggcgccttcctggaccctcgtccactcacagttgttgctgtcgccaacgtgatgtccgccgtatgtttcggatgtaggtacagtcacgacgacccagagtttcgcgagttgctgtcacacaatgaagaatttggtagaactgttggggccgggtcactggttgatgtgatgccatggctccaatacttccctaacccggtacgtacagttttcagagaatttgagcagttaaacaggaatttctccaatttcatcctcgacaagtttttacgacattgtgagtccctgcgaccaggcgccgcccctagagacatgatggatgctttcattcttagtgcggaaaaaaaagcagccggcgatagtcacgggggtggcgctaggttagaccttgaaaacgtgcccgccacaatcacagacatcttcggcgcctcacaggacacactctccaccgctctacagtggctcctgctcttatttacacggtaccccgacgttcaaactagggtgcaggcagaattagaccaggttgtgggtcgggacaggctgccctgcatgggggaccaacccaatttgccgtatgtgctcgccttcctgtacgaggcgatgcgattttcatctttcgtcccggtgacaatcccacacgcgactaccgctaatacttccgtgttgggatatcatatacctaaggatactgtagtattcgttaaccagtggtcagtgaaccatgatccggtgaagtggccaaaccccgagaattttgacccagcccggtttttggacaaagacgggctgatcaataaggacctgacgtcccgagtaatgatttttagcgtgggcaagagaagatgtatcggtgaagaattgtctaaaatgcagcttttcctctttatcagcatcctggcacaccagtgcgattttcgagctaatcccaatgagcccgccaaaatgaactttagctacggcctgacaataaaaccaaaatcctttaaagtcaatgtgacgctgagagagtccatggagcttcttgactctgccgtccaaaacttgcaggcaaaggaaacatgtcagtag

SEQ ID NO: 1692 - DNA, 1632 bp, Artificial Sequence
  derived and/or modified sequence
atgggaacttccctgagcccaaacgatccctggcccctgaatcccttgagcattcagcagaccaccctactcctcttactttctgttctcgcaaccgtccacgtgggccagcggctgctgcggcagagacgcaggcagctcaggtccgctcccccagggccattcgcatggcctctgattggcaatgcggcagctgttggccaggcggcacacctgtcgttcgcccgactggctcgtaggtacggggatgtcttccaaatacgtttgggcagctgccccattgtggtcctcaacggtgaacgggctatccaccaggccctcgttcagcagggctcggcattcgcagacagaccagctttcgctagctttagggtggtgagcggcggacgaagcatggcctttggccactatagtgaacattggaaagttcagcgacgggctgcccactcaatgatgagaaattttttcacccggcaacctcgctcacgacaggtgctggaggggcacgtcctcagtgaggcgcgagagctggttgcgctgctcgttagaggatctgcagatggggctttcttggaccctcggccattgacagttgtggcagtggccaacgtcatgagcgccgtctgttttggatgccggtactctcacgatgacccagaattccgcgagttgctgtcgcataacgaagagttcgggagaaccgtcggcgcaggctcgctggttgacgtgatgccctggcttcagtactttccaaaccccgtaaggactgttttccgcgagttcgagcagctaaacaggaacttcagcaattttatcctggacaaattcttaagacactgcgagtcgctccgccctggtgcagcccctagagatatgatggatgccttcatccttagtgcagaaaagaaggccgctggagactcgcatggaggcggagctcggctggatctcgaaaacgtacccgcaactatcacagacatctttggagcatcacaggacacactcagcacggccttgcagtggctcttattgctcttcactcgatacccagatgtacagaccagggtgcaagcggaattggatcaggtcgtgggccgagatcggcttccctgtatgggtgaccagccaaatctgccgtacgttctggcttttttgtatgaggcgatgcggttctcttcttttgtaccagtgacgatacctcacgccacaacagccaatacctctgtactgggataccatattcctaaagatactgtggttttcgtcaaccaatggtccgttaatcacgatccggtcaaatggccaaacccggagaacttcgatccagcccgattcttggataaggacggattgatcaacaaggacctgacgtctcgcgtgatgatcttctctgtgggaaaacggagatgtatcggagaagagctcagcaaaatgcagctatttctctttatcagcatactggcccatcaatgcgacttcagagctaatcccaacgaacctgcaaaaatgaattttagttatggactcaccattaagcccaagagttttaaggtcaatgtgactttgagagagagtatggaactgctggattccgctgtgcaaaatcttcaggctaaggagacctgccagtag

SEQ ID NO: 1693 - DNA, 1632 bp, Artificial Sequence
  derived and/or modified sequence
atgggtacgagtctcagccccaacgatccatggcctctgaaccctctctccatccaacagactacactcctgttactactgtccgtactggcaacagtacacgtcggccagaggcttctccggcagcgaaggcgtcagctacgctctgcaccccctgggccattcgcttggcctttgattggcaacgctgccgcagtgggccaggccgctcacctaagcttcgccaggctcgctagacggtatggggatgtgttccagatccgtctcggtagctgtccgatcgtagtgctcaatggcgagcgggcaatacaccaggccctggtgcagcagggttctgcctttgccgatcggccagctttcgcaagtttccgggttgtctcaggcggacggtccatggcgttcggtcactactctgaacactggaaagttcagcgaagggccgcacactctatgatgcgtaatttctttacaagacagccccgttctcggcaagtcctggagggacacgtattatcagaggcacgcgagctcgtggcacttcttgtcagaggaagtgcagacggagcatttctggacccgagacctctcacggtagtggctgtggcaaacgtcatgtcggccgtttgcttcgggtgcagatactcgcatgatgatcccgagttccgcgaactgctgtcccataacgaggagtttggtcggactgtgggtgccggaagtttagtcgatgtgatgccatggttgcagtactttccaaaccctgttaggacagtgtttcgcgagtttgagcagctgaacaggaacttctccaatttcattctggacaaatttctgagacactgtgagagtctgcgacccggtgccgctccccgtgacatgatggatgcctttattttgtctgcagaaaaaaaagcagccggagactcccacggaggaggcgcacgtctggatcttgaaaatgtacctgccactattactgatatattcggggcttcacaggacactctcagcacagcactccagtggctcctgctgctgtttactcgctaccccgacgtgcagacccgggtccaggcggagttggaccaggtggtgggaagggaccgactgccatgtatgggggatcagcccaacctgccttatgtgctggccttcttgtatgaagcgatgcgattttcctcattcgtacccgtcactattccccacgctaccacagcgaatacttcagttctgggttaccatattcccaaggacacagtcgtgttcgtaaaccagtggtctgtgaaccacgaccctgtaaaatggccgaacccagaaaactttgatcctgccaggtttctggacaaggacggactcataaataaggatttgaccagtagagtgatgatcttctctgttgggaaaaggagatgcataggcgaagagctctctaaaatgcagctcttcctgttcatatccattctggctcaccagtgcgactttcgggcaaatcccaacgagccagccaaaatgaacttctcttatggtctgaccattaaacctaaaagcttcaaggtaaatgtgactctcagggagagcatggaactgcttgattccgccgtacagaacttacaggcaaaggagacctgccagtag

SEQ ID NO: 1694 - protein, 443 aa, Artificial Sequence
  derived and/or modified sequence
QEALTLPLQLRRRFGDVFSLQLAWTPVVVLNGLAAVREAMVTRGEDTADRPPAPIYQVLGFGPREQWVFLSRYGPAWREQRRFSVSTLRNLGLGKKSLEQWVTEEAACLCAAFADQDAPFAPTVSWTKPNVIASLTCGRRFEYDDPRFLRLLDLAQEGLKEESGFLREVLNAVPVLLHIPALAGKVLRFQKAFLTQLDELLTEHRMTWDPAQPPRDLTEAFLAKKEKAKGSPESSFNDENLRIVVGNLFLAGMVTTLTTLAWGLLLMILHLDVQLRVQQEIDDVIGQVRRPEMGDQAHMPYTTAVIHEVQRFGDIIPLSVTHMTSHDIEVQGFRIPKGTTLITNLSSVLKDEAVWKKPFRFHPEHFLDAQGHFVKPEAFLPFSAGRRACLGEPLARMELFLFFTSLLQHFSFSVAAGQPRPSHSRVVSFLVTPSPYELCAVPR

SEQ ID NO: 1695 - protein, 496 aa, Artificial Sequence
  derived and/or modified sequence
MGLEALVPLAMIVAIFLLLVDLMHRHQRWAARYPPGPLPLPGLGNLHVDFQNTPYCFDQLRRRFGDVFSLQLAWTPVVVLNGLAAVREAMVTRGEDTADRPPAPIYQVLGFGPREQWVFLSRYGPAWREQRRFSVSTLRNLGLGKKSLEQWVTEEAACLCAAFADQAGRPFRPNGLLDKAVSNVIASLTCGRRFEYDDPRFLRLLDLAQEGLKEESGFLREVLNAVPVLLHIPALAGKVLRFQKAFLTQLDELLTEHRMTWDPAQPPRDLTEAFLAKKEKAKGSPESSFNDENLRIVVGNLFLAGMVTTLTTLAWGLLLMILHLDVQLRVQQEIDDVIGQVRRPEMGDQAHMPYTTAVIHEVQRFGDIIPLSVTHMTSHDIEVQGFRIPKGTTLITNLSSVLKDEAVWKKPFRFHPEHFLDAQGHFVKPEAFLPFSAGRRACLGEPLARMELFLFFTSLLQHFSFSVAAGQPRPSHSRVVSFLVTPSPYELCAVPR

SEQ ID NO: 1696 - protein, 407 aa, Artificial Sequence
  derived and/or modified sequence
MVTRGEDTADRPPAPIYQVLGFGPRSQGVFLSRYGPAWREQRRFSVSTLRNLGLGKKSLEQWVTEEAACLCAAFADQAGRPFRPNGLLDKAVSNVIASLTCGRRFEYDDPRFLRLLDLAQEGLKEESGFLREVLNAVPVLLHIPALAGKVLRFQKAFLTQLDELLTEHRMTWDPAQPPRDLTEAFLAKKEKAKGSPESSFNDENLRIVVGNLFLAGMVTTLTTLAWGLLLMILHLDVQLRVQQEIDDVIGQVRRPEMGDQAHMPYTTAVIHEVQRFGDIIPLSVTHMTSHDIEVQGFRIPKGTTLITNLSSVLKDEAVWKKPFRFHPEHFLDAQGHFVKPEAFLPFSAGRRACLGEPLARMELFLFFTSLLQHFSFSVAAGQPRPSHSRVVSFLVTPSPYELCAVPR

SEQ ID NO: 1697 - protein, 497 aa, Artificial Sequence
  derived and/or modified sequence
MGLEALVPLAVIVAIFLLLVDLMHRRQRWAARYPPGPLPLPGLGNLLHVDFQNTPYCFDQLRRRFGDVFSLQLAWTPVVVLNGLAAVREALVTHGEDTADRPPVPITQILGFGPRSQGVFLARYGPAWREQRRFSVSTLRNLGLGKKSLEQWVTEEAACLCAAFANHSGRPFRPNGLLDKAVSNVIASLTCGRRFEYDDPRFLRLLDLAQEGLKEESGFLREVLNAVPVLLHIPALAGKVLRFQKAFLTQLDELLTEHRMTWDPAQPPRDLTEAFLAEMEKAKGNPESSFNDENLCIVVADLFSAGMVTTSTTLAWGLLLMILHPDVQRRVQQEIDDVIGQVRRPEMGDQAHMPYTTAVIHEVQRFGDIVPLGVTHMTSRDIEVQGFRIPKGTTLITNLSSVLKDEAVWEKPFRFHPEHFLDAQGHFVKPEAFLPFSAGRRACLGEPLARMELFLFFTSLLQHFSFSVPTGQPRPSHHGVFAFLVTPSPYELCAVPR

SEQ ID NO: 1698 - protein, 497 aa, Artificial Sequence
  derived and/or modified sequence
MGLEALVPLAVIVAIFLLLVDLMHRRQRWAARYPPGPLPLPGLGNLLHVDFQNTPYCFDQLRRRFGDVFSLQLAWTPVVVLNGLAAVREALVTHGEDTADRPPVPITQILGFGPRGQGVFLARYGPAWREQRRFSVSTLRNLGLGKKSLEQWVTEEAACLCAAFANHSGRPFRPNGLLDKAVSNVIASLTCGRRFEYDDPRFLRLLDLAQEGLKEESGFLREVLNAVPVLLHIPALAGKVLRFQKAFLTQLDELLTEHRMTWDPAQPPRDLTEAFLAEMEKAKGNPESSFNDENLCIVVADLFSAGMVTTSTTLAWGLLLMILHPDVQRRVQQEIDDVIGQVRRPEMGDQAHMPYTTAVIHEVQRFGDIVPLGVTHMTSRDIEVQGFRIPKGTTLITNLSSVLKDEAVWEKPFRFHPEHFLDAQGHFVKPEAFLPFSAGRRACLGEPLARMELFLFFTSLLQHFSFSVPTGQPRPSHHGVFAFLVTPSPYELCAVPR

SEQ ID NO: 1699 - protein, 443 aa, Artificial Sequence
  derived and/or modified sequence
QEALTLPLQLRRRFGDVFSLQLAWTPVVVLNGLAAVREALVTHGEDTADRPPVPITQILGFGPRGQGVFLARYGPAWREQRRFSVSTLRNLGLGKKSLEQWVTEEAACLCAAFANHDAPFAPTVSWTKPNVIASLTCGRRFEYDDPRFLRLLDLAQEGLKEESGFLREVLNAVPVLLHIPALAGKVLRFQKAFLTQLDELLTEHRMTWDPAQPPRDLTEAFLAEMEKAKGNPESSFNDENLCIVVADLFSAGMVTTSTTLAWGLLLMILHPDVQRRVQQEIDDVIGQVRRPEMGDQAHMPYTTAVIHEVQRFGDIVPLGVTHMTSRDIEVQGFRIPKGTTLITNLSSVLKDEAVWEKPFRFHPEHFLDAQGHFVKPEAFLPFSAGRRACLGEPLARMELFLFFTSLLQHFSFSVPTGQPRPSHHGVFAFLVTPSPYELCAVPR

SEQ ID NO: 1700 - DNA, 1332 bp, Artificial Sequence
  derived and/or modified sequence
caggaggccctgaccctgcccctgcagctgagaagaagattcggcgacgtgttcagcctgcagctggcctggacccccgtggtggtgctgaacggcctggccgccgtgagagaggccatggtgaccagaggcgaggacaccgccgacagaccccccgcccccatctaccaggtgctgggcttcggccccagagagcagtgggtgttcctgagcagatacggccccgcctggagagagcagagaagattcagcgtgagcaccctgagaaacctgggcctgggcaagaagagcctggagcagtgggtgaccgaggaggccgcctgcctgtgcgccgccttcgccgaccaggacgcccccttcgcccccaccgtgagctggaccaagcccaacgtgatcgccagcctgacctgcggcagaagattcgagtacgacgaccccagattcctgagactgctggacctggcccaggagggcctgaaggaggagagcggcttcctgagagaggtgctgaacgccgtgcccgtgctgctgcacatccccgccctggccggcaaggtgctgagattccagaaggccttcctgacccagctggacgagctgctgaccgagcacagaatgacctgggaccccgcccagccccccagagacctgaccgaggccttcctggccaagaaggagaaggccaagggcagccccgagagcagcttcaacgacgagaacctgagaatcgtggtgggcaacctgttcctggccggcatggtgaccaccctgaccaccctggcctggggcctgctgctgatgatcctgcacctggacgtgcagctgagagtgcagcaggagatcgacgacgtgatcggccaggtgagaagacccgagatgggcgaccaggcccacatgccctacaccaccgccgtgatccacgaggtgcagagattcggcgacatcatccccctgagcgtgacccacatgaccagccacgacatcgaggtgcagggcttcagaatccccaagggcaccaccctgatcaccaacctgagcagcgtgctgaaggacgaggccgtgtggaagaagcccttcagattccaccccgagcacttcctggacgcccagggccacttcgtgaagcccgaggccttcctgcccttcagcgccggcagaagagcctgcctgggcgagcccctggccagaatggagctgttcctgttcttcaccagcctgctgcagcacttcagcttcagcgtggccgccggccagcccagacccagccacagcagagtggtgagcttcctggtgacccccagcccctacgagctgtgcgccgtgcccagatag

SEQ ID NO: 1701 - DNA, 1491 bp, Artificial Sequence
  derived and/or modified sequence
atgggcctggaggccctggtgcccctggccatgatcgtggccatcttcctgctgctggtggacctgatgcacagacaccagagatgggccgccagatacccccccggccccctgcccctgcccggcctgggcaacctgcacgtggacttccagaacaccccctactgcttcgaccagctgagaagaagattcggcgacgtgttcagcctgcagctggcctggacccccgtggtggtgctgaacggcctggccgccgtgagagaggccatggtgaccagaggcgaggacaccgccgacagaccccccgcccccatctaccaggtgctgggcttcggccccagagagcagtgggtgttcctgagcagatacggccccgcctggagagagcagagaagattcagcgtgagcaccctgagaaacctgggcctgggcaagaagagcctggagcagtgggtgaccgaggaggccgcctgcctgtgcgccgccttcgccgaccaggccggcagacccttcagacccaacggcctgctggacaaggccgtgagcaacgtgatcgccagcctgacctgcggcagaagattcgagtacgacgaccccagattcctgagactgctggacctggcccaggagggcctgaaggaggagagcggcttcctgagagaggtgctgaacgccgtgcccgtgctgctgcacatccccgccctggccggcaaggtgctgagattccagaaggccttcctgacccagctggacgagctgctgaccgagcacagaatgacctgggaccccgcccagccccccagagacctgaccgaggccttcctggccaagaaggagaaggccaagggcagccccgagagcagcttcaacgacgagaacctgagaatcgtggtgggcaacctgttcctggccggcatggtgaccaccctgaccaccctggcctggggcctgctgctgatgatcctgcacctggacgtgcagctgagagtgcagcaggagatcgacgacgtgatcggccaggtgagaagacccgagatgggcgaccaggcccacatgccctacaccaccgccgtgatccacgaggtgcagagattcggcgacatcatccccctgagcgtgacccacatgaccagccacgacatcgaggtgcagggcttcagaatccccaagggcaccaccctgatcaccaacctgagcagcgtgctgaaggacgaggccgtgtggaagaagcccttcagattccaccccgagcacttcctggacgcccagggccacttcgtgaagcccgaggccttcctgcccttcagcgccggcagaagagcctgcctgggcgagcccctggccagaatggagctgttcctgttcttcaccagcctgctgcagcacttcagcttcagcgtggccgccggccagcccagacccagccacagcagagtggtgagcttcctggtgacccccagcccctacgagctgtgcgccgtgcccagatag

SEQ ID NO: 1702 - DNA, 1224 bp, Artificial Sequence
  derived and/or modified sequence
atggtgaccagaggcgaggacaccgccgacagaccccccgcccccatctaccaggtgctgggcttcggccccagaagccagggcgtgttcctgagcagatacggccccgcctggagagagcagagaagattcagcgtgagcaccctgagaaacctgggcctgggcaagaagagcctggagcagtgggtgaccgaggaggccgcctgcctgtgcgccgccttcgccgaccaggccggcagacccttcagacccaacggcctgctggacaaggccgtgagcaacgtgatcgccagcctgacctgcggcagaagattcgagtacgacgaccccagattcctgagactgctggacctggcccaggagggcctgaaggaggagagcggcttcctgagagaggtgctgaacgccgtgcccgtgctgctgcacatccccgccctggccggcaaggtgctgagattccagaaggccttcctgacccagctggacgagctgctgaccgagcacagaatgacctgggaccccgcccagccccccagagacctgaccgaggccttcctggccaagaaggagaaggccaagggcagccccgagagcagcttcaacgacgagaacctgagaatcgtggtgggcaacctgttcctggccggcatggtgaccaccctgaccaccctggcctggggcctgctgctgatgatcctgcacctggacgtgcagctgagagtgcagcaggagatcgacgacgtgatcggccaggtgagaagacccgagatgggcgaccaggcccacatgccctacaccaccgccgtgatccacgaggtgcagagattcggcgacatcatccccctgagcgtgacccacatgaccagccacgacatcgaggtgcagggcttcagaatccccaagggcaccaccctgatcaccaacctgagcagcgtgctgaaggacgaggccgtgtggaagaagcccttcagattccaccccgagcacttcctggacgcccagggccacttcgtgaagcccgaggccttcctgcccttcagcgccggcagaagagcctgcctgggcgagcccctggccagaatggagctgttcctgttcttcaccagcctgctgcagcacttcagcttcagcgtggccgccggccagcccagacccagccacagcagagtggtgagcttcctggtgacccccagcccctacgagctgtgcgccgtgcccagatag

SEQ ID NO: 1703 - DNA, 1407 bp, Artificial Sequence
  derived and/or modified sequence
caagaggccctgaccctccctctgcagttgcggcgccgcttcggggacgtgttcagcctgcagctggcctggacgccggtggtcgtgctcaatgggctggcggccgtgcgcgaggcgatggtgacccgcggcgaggacacggccgaccgcccgcctgcgcccatctaccaggtcctgggcttcgggccgcgggagcaatgggtgttcctgtcgcgctatgggcccgcgtggcgcgagcagaggcgcttctccgtgtccaccttgcgcaacttgggcctgggcaagaagtcgctggagcagtgggtgaccgaggaggccgcctgcctttgtgccgccttcgccgaccaagacgcccctttcgccccaacggtctcttggacaaagccgaacgtgatcgcctccctcacctgcgggcgccgcttcgagtacgacgaccctcgcttcctcaggctgctggacctagctcaggagggactgaaggaggagtcgggcttcctgcgcgaggtgctgaatgctgtccccgtcctcctgcacatcccagcgctggctggcaaggtcctacgcttccaaaaggctttcctgacccagctggatgagctgctaactgagcacaggatgacctgggacccagcccagccaccccgagacctgactgaggccttcctggcaaagaaggagaaggccaaggggagccctgagagcagcttcaatgatgagaacctgcgcatagtggtgggtaacctgttccttgccgggatggtgaccaccttgaccacgctggcctggggcctcctgctcatgatcctacacctggatgtgcagctccgtgtccaacaggagatcgacgacgtgatagggcaggtgcggcgaccagagatgggtgaccaggctcacatgccctacaccactgccgtgattcacgaggtgcagcgctttggggacatcatccccctgagtgtgacccatatgacatcccatgacatcgaagtacagggcttccgcatccctaagggaacgacactcatcaccaacctgtcatcggtgctgaaggatgaggccgtctggaagaagcccttccgcttccaccccgaacacttcctggatgcccagggccactttgtgaagccggaggccttcctgcctttctcagcaggccgccgtgcatgcctcggggagcccctggcccgcatggagctcttcctcttcttcacctccctgctgcagcacttcagcttctccgtggccgccggacagccccggcccagccactctcgtgtcgtcagctttctggtgaccccatccccctacgagctttgtgctgtgccccgctagaatggggtacctagtccccagcctgctccctagccagaggctctaatgtacaataaagcaatgtggtagttccaa

SEQ ID NO: 1704 - DNA, 1566 bp, Artificial Sequence
  derived and/or modified sequence
atggggctagaagcactggtgcccctggccatgatagtggccatcttcctgctcctggtggacctgatgcaccggcaccaacgctgggctgcacgctacccgccaggtcccctgccactgcccgggctgggcaaccttcatgtggacttccagaacacaccatactgcttcgaccagttgcggcgccgcttcggggacgtgttcagcctgcagctggcctggacgccggtggtcgtgctcaatgggctggcggccgtgcgcgaggcgatggtgacccgcggcgaggacacggccgaccgcccgcctgcgcccatctaccaggtcctgggcttcgggccgcgggagcaatgggtgttcctgtcgcgctatgggcccgcgtggcgcgagcagaggcgcttctccgtgtccaccttgcgcaacttgggcctgggcaagaagtcgctggagcagtgggtgaccgaggaggccgcctgcctttgtgccgccttcgccgaccaagccggacgcccctttcgccccaacggtctcttggacaaagccgtgagcaacgtgatcgcctccctcacctgcgggcgccgcttcgagtacgacgaccctcgcttcctcaggctgctggacctagctcaggagggactgaaggaggagtcgggcttcctgcgcgaggtgctgaatgctgtccccgtcctcctgcacatcccagcgctggctggcaaggtcctacgcttccaaaaggctttcctgacccagctggatgagctgctaactgagcacaggatgacctgggacccagcccagccaccccgagacctgactgaggccttcctggcaaagaaggagaaggccaaggggagccctgagagcagcttcaatgatgagaacctgcgcatagtggtgggtaacctgttccttgccgggatggtgaccaccttgaccacgctggcctggggcctcctgctcatgatcctacacctggatgtgcagctccgtgtccaacaggagatcgacgacgtgatagggcaggtgcggcgaccagagatgggtgaccaggctcacatgccctacaccactgccgtgattcacgaggtgcagcgctttggggacatcatccccctgagtgtgacccatatgacatcccatgacatcgaagtacagggcttccgcatccctaagggaacgacactcatcaccaacctgtcatcggtgctgaaggatgaggccgtctggaagaagcccttccgcttccaccccgaacacttcctggatgcccagggccactttgtgaagccggaggccttcctgcctttctcagcaggccgccgtgcatgcctcggggagcccctggcccgcatggagctcttcctcttcttcacctccctgctgcagcacttcagcttctccgtggccgccggacagccccggcccagccactctcgtgtcgtcagctttctggtgaccccatccccctacgagctttgtgctgtgccccgctagaatggggtacctagtccccagcctgctccctagccagaggctctaatgtacaataaagcaatgtggtagttccaa

SEQ ID NO: 1705 - DNA, 1680 bp, Artificial Sequence
  derived and/or modified sequence
ggaagggtcacgcgctcggtgtgctgagagtgtcctgcctggtcctctgtgcctggtggggtgggggtgccaggtgtgtccagaggagcccagttggtagtgaggcagccatggggctagaagcactggtgcccctggccatgatagtggccatcttcctgctcctggtggacctgatgcaccggcaccaacgctgggctgcacgctacccgccaggtcccctgccactgcccgggctgggcaaccttgctgcatgtggacttccagaacacaccatactgcttcgaccagttgcggcgccgcttcggggacgtgttcagcctgcagctggcctggacgccggtggtcgtgctcaatgggctggcggccgtgcgcgaggcgatggtgacccgcggcgaggacacggccgaccgcccgcctgcgcccatctaccaggtcctgggcttcgggccgcgttcccaaggggtgttcctgtcgcgctatgggcccgcgtggcgcgagcagaggcgcttctccgtgtccaccttgcgcaacttgggcctgggcaagaagtcgctggagcagtgggtgaccgaggaggccgcctgcctttgtgccgccttcgccgaccaagccggacgcccctttcgccccaacggtctcttggacaaagccgtgagcaacgtgatcgcctccctcacctgcgggcgccgcttcgagtacgacgaccctcgcttcctcaggctgctggacctagctcaggagggactgaaggaggagtcgggcttcctgcgcgaggtgctgaatgctgtccccgtcctcctgcacatcccagcgctggctggcaaggtcctacgcttccaaaaggctttcctgacccagctggatgagctgctaactgagcacaggatgacctgggacccagcccagccaccccgagacctgactgaggccttcctggcaaagaaggagaaggccaaggggagccctgagagcagcttcaatgatgagaacctgcgcatagtggtgggtaacctgttccttgccgggatggtgaccaccttgaccacgctggcctggggcctcctgctcatgatcctacacctggatgtgcagctccgtgtccaacaggagatcgacgacgtgatagggcaggtgcggcgaccagagatgggtgaccaggctcacatgccctacaccactgccgtgattcacgaggtgcagcgctttggggacatcatccccctgagtgtgacccatatgacatcccatgacatcgaagtacagggcttccgcatccctaagggaacgacactcatcaccaacctgtcatcggtgctgaaggatgaggccgtctggaagaagcccttccgcttccaccccgaacacttcctggatgcccagggccactttgtgaagccggaggccttcctgcctttctcagcaggccgccgtgcatgcctcggggagcccctggcccgcatggagctcttcctcttcttcacctccctgctgcagcacttcagcttctccgtggccgccggacagccccggcccagccactctcgtgtcgtcagctttctggtgaccccatccccctacgagctttgtgctgtgccccgctagaatggggtacctagtccccagcctgctccctagccagaggctctaatgtacaataaagcaatgtggtagttccaa

SEQ ID NO: 1706 - DNA, 1332 bp, Artificial Sequence
  derived and/or modified sequence
caggaagctctaaccctgccactccaactgcgccgcagattcggcgatgtcttttcacttcagctggcatggacgcctgtggtcgtgttgaatgggctggcggccgtaagggaggccatggtgacacggggtgaggacacagccgaccggccacctgcgcctatctatcaggtcctcggcttcgggccccgtgagcaatgggttttcctctcccggtacgggcctgcgtggagagagcagcggcgattcagcgtgtccacactccgaaatctgggactgggcaagaaatcccttgaacagtgggtcacagaggaggctgcctgcctatgcgccgcttttgcagaccaggatgccccgtttgctccgaccgtctcctggacaaaaccgaatgtgatagcctcactgacatgtggaaggcgcttcgagtacgacgatcctcgctttttacgcctgcttgacttggcccaggaggggttgaaggaagagagcggctttcttcgcgaggtgctaaatgcagtacctgtgttactgcatattcctgccctcgccggaaaggttctgaggtttcaaaaggcatttctgacccaactggatgagcttctgacagaacatagaatgacatgggaccctgctcaacctcctcgggatctgactgaagcctttttagcaaagaaagagaaggccaaaggatctccagaatcaagcttcaatgacgagaatttgcgcattgtggtcgggaacctgttcctggcaggaatggtgaccacgctgactacactggcatggggcctgttacttatgattctccatctggatgtccagctgcgggtgcagcaggagattgatgacgtgatcggccaggtgcgcaggccggagatgggagatcaggcccatatgccgtacacaactgcagtaatacacgaagtgcagagattcggcgacatcattccgttaagcgtcactcacatgacctcacacgacattgaagtgcaaggattccgcatcccaaagggcactaccctgattaccaatctgtctagcgtgctgaaggacgaggccgtttggaaaaagcccttccggttccacccggaacattttctagacgcccagggccacttcgtcaaaccagaggcttttctcccctttagcgccgggagaagagcctgcctgggcgaaccattagcccggatggagcttttcctgtttttcaccagcctgctgcagcactttagtttctctgttgccgcgggccagccccggccctctcacagccgtgtggtatcatttctggtcactcccagtccatacgagctgtgtgctgtccccagatag

SEQ ID NO: 1707 - DNA, 1491 bp, Artificial Sequence
  derived and/or modified sequence
atggggctggaggccctcgtgccgctcgctatgatcgtagcgatctttcttctcctggtggatctgatgcacaggcaccagcggtgggccgctaggtaccctccaggacctctgccgctgcctggactgggcaatctgcacgtggattttcagaataccccgtattgctttgatcagctgagacggcgttttggggatgtatttagcctgcagctggcctggactccagttgtggtgctgaatgggctggcagcggtacgggaggctatggttacacggggagaagacaccgcagacaggcctcctgctcctatctaccaggtgcttggctttggcccaagggaacaatgggtctttctgagcagatatggcccggcttggagggagcaacggagattctccgtgagcacactgcgaaacctggggcttggcaagaaaagcttagagcaatgggtcaccgaggaggcagcttgcctgtgtgcggctttcgcagatcaggctggtcggccctttcggccgaacggcctactggataaggccgtctcaaatgtcatcgcttctcttacttgcgggcggaggtttgaatatgacgaccctcgatttctgcggctgctcgatttggcacaggaggggcttaaagaagagtcaggattcctgcgtgaagtgctaaacgctgtgcctgtcctgttgcacattcctgcactagccggaaaagttctaagatttcagaaggccttcttgacgcagctcgacgaattgctcactgaacatcgcatgacatgggatcccgcgcaaccgcccagagatttaaccgaggcctttttagccaagaaagagaaagccaaaggctctccagagtcttcctttaatgatgagaacctgaggatagttgtggggaacctgttcctcgcaggcatggtcacgaccctcacgacactggcttgggggctgttgcttatgattctacaccttgatgtgcagcttagggtccaacaagagatcgatgatgtaatcggtcaggtgaggcgccctgagatgggcgaccaagcccatatgccctacaccacagcagtgatacacgaagtgcaaaggttcggggacataattccactgtctgtcacgcacatgacgagccatgacattgaagtccaggggtttcgcatccccaaaggcacaacccttatcacaaacctgtcctctgtcttgaaagatgaagcggtatggaagaagccattcagattccaccccgaacacttcttagatgcccaggggcatttcgtgaagcccgaggctttccttccattctctgcaggcaggagagcctgtctgggagaacctttagcccggatggaattgttcctcttctttactagcctcctgcagcatttcagtttcagtgttgcagccggtcagccccggccttctcattcccgggttgtatcatttcttgtaacaccaagcccttatgaactctgcgccgtgccaagatag

SEQ ID NO: 1708 - DNA, 1224 bp, Artificial Sequence
  derived and/or modified sequence
atggtcaccagaggagaggacacggccgatcgtcctcccgctccaatttaccaggtgcttggctttggtcccaggagtcaaggagtgtttctgagtagatatgggcctgcatggagagagcagcggcgcttctccgtatccaccctgagaaacctgggcctgggcaaaaaaagcttagaacagtgggtcaccgaggaggcggcctgtctgtgtgctgcttttgctgatcaagcaggtcgcccttttagaccgaatggcttactggataaagccgtctccaacgtgatagcctcactgacgtgcggtagacgattcgagtatgatgatccccgatttttgagactgcttgatttggcccaggaggggctgaaggaggagagcggcttcttgagagaggttctgaatgccgtgccggtgttgcttcacatcccagcactcgcaggcaaagtgctccgttttcagaaggcctttttgacacagctggacgagctcctgacggaacatcggatgacatgggacccggcccagcctccacgggacctgaccgaagcctttctggccaaaaaggagaaagccaagggatccccagagagttccttcaacgatgagaatttgagaattgtcgtaggcaatctgttccttgcagggatggtcacaacactgactacactggcatggggcctgctgctaatgattctacatctggacgttcagctgagagttcaacaggagatcgatgatgtgatcggccaagtgaggaggcccgagatgggtgaccaggcacatatgccgtatactaccgcagtcatccacgaggtgcagcgatttggcgatatcatcccactaagtgttacacatatgacctcccatgatatagaggtccagggcttcagaatcccaaaagggacaactcttattacgaatctttcatcagtgcttaaagacgaggccgtgtggaagaaaccctttaggtttcacccagaacattttctcgatgcgcaaggacatttcgtgaaacccgaagcttttctccctttttctgctgggagacgcgcctgtctcggggaacctcttgctaggatggaactgtttttgttctttaccagtctgctccaacatttcagtttctcagtcgcagccgggcagcctcgaccttcccactctcgggtggtttctttcttggtgacaccttccccatacgaactgtgcgcagtaccccggtag

SEQ ID NO: 1709 - DNA, 1332 bp, Artificial Sequence
  derived and/or modified sequence
caggaggccctgaccctgcccctgcagctgcggaggagatttggagatgtgttcagcctgcagctggcctggacccctgtggtggtgctgaatggcctggccgctgtgcgggaggccatggtgaccagaggagaggacacagctgaccggcccccagcccccatctaccaggtgctgggcttcggcccccgggagcagtgggtgttcctgagccgctatggccctgcctggagggagcagaggcgcttctctgtgtccaccctgaggaacctgggcctgggcaagaagagcctggagcagtgggtgacagaggaggccgcctgcctgtgtgccgcctttgctgaccaggatgccccctttgcccccaccgtgtcctggaccaagcccaacgtcatcgccagcctgacctgtggcagaagatttgaatatgatgacccccgcttcctgcggctgctggacctggcccaggagggcctgaaggaggagagcggcttcctgcgggaggtgctgaatgctgtgcctgtgctgctgcacatcccagccctggccggcaaggtgctgcgcttccagaaggccttcctgacccagctggatgagctgctgacagagcacaggatgacctgggaccctgcccagcccccccgggacctgacagaggccttcctggccaagaaggagaaggccaagggcagccctgagagcagcttcaatgatgagaacctgagaattgtggtgggcaacctcttcctggccggcatggtgaccaccctgaccaccctggcctggggcctgctgctgatgatcctgcacctggatgtgcagctgcgggtgcagcaggagattgatgatgtgattggccaggtgagaagacctgagatgggagaccaggcccacatgccctacaccacagctgtgattcatgaggtgcagagatttggagacatcatccccctgtctgtgacccacatgaccagccatgacatcgaggtgcagggcttccgcatccccaagggcaccaccctcatcaccaacctgagctctgtgctgaaggatgaagctgtgtggaagaagcccttccgcttccaccctgagcacttcctggatgcccagggccactttgtgaagccagaggccttcctgcccttctctgctggccggcgggcctgcctgggggagcccctggccaggatggagctgttcctgttcttcaccagcctgctgcagcacttctccttctctgtggccgccggccagccccggcccagccacagccgggtggtgtccttcctggtgacccccagcccctatgagctgtgtgctgtgcccaggtag

SEQ ID NO: 1710 - DNA, 1491 bp, Artificial Sequence
  derived and/or modified sequence
atgggcctggaggccctggtgcccctggccatgattgtggccatcttcctgctgctggtggacctgatgcaccgccaccagcgctgggccgcccgctacccacctggccccctgcccctgcccggcctgggcaacctgcacgtggacttccagaacaccccctactgctttgaccagctgcggaggagatttggagatgtgttcagcctgcagctggcctggacccctgtggtggtgctgaatggcctggccgctgtgcgggaggccatggtgaccagaggagaggacacagctgaccggcccccagcccccatctaccaggtgctgggcttcggcccccgggagcagtgggtgttcctgagccgctatggccctgcctggagggagcagaggcgcttctctgtgtccaccctgaggaacctgggcctgggcaagaagagcctggagcagtgggtgacagaggaggccgcctgcctgtgtgccgcctttgctgaccaggccggccggcccttccggcccaacggcctgctggacaaggctgtgtccaatgtgattgccagcctgacctgtggccgccgctttgaatatgatgacccccgcttcctgcggctgctggacctggcccaggagggcctgaaggaggagagcggcttcctgcgggaggtgctgaatgctgtgcctgtgctgctgcacatcccagccctggccggcaaggtgctgcgcttccagaaggccttcctgacccagctggatgagctgctgacagagcacaggatgacctgggaccctgcccagcccccccgggacctgacagaggccttcctggccaagaaggagaaggccaagggcagccctgagagcagcttcaatgatgagaacctgcgcatcgtggtgggcaacctcttcctggccggcatggtgaccaccctgaccaccctggcctggggcctgctgctgatgatcctgcacctggatgtgcagctgcgggtgcagcaggagattgatgatgtgattggccaggtgcggcggcctgagatgggagaccaggcccacatgccctacaccacagctgtgatccacgaggtgcagagatttggagacatcatccccctgtctgtgacccacatgaccagccatgacatcgaggtgcagggcttccgcatccccaagggcaccaccctcatcaccaacctgagctctgtgctgaaggatgaggccgtgtggaagaagcccttccgcttccaccctgagcacttcctggatgcccagggccactttgtgaagccagaggccttcctgcccttctctgctggaagaagagcctgcctgggggagcccctggccaggatggagctgttcctgttcttcaccagcctgctgcagcacttctccttctctgtggccgccggccagccccggcccagccacagccgggtggtgtccttcctggtgacccccagcccctatgagctgtgtgctgtgcccaggtag

SEQ ID NO: 1711 - DNA, 1224 bp, Artificial Sequence
  derived and/or modified sequence
atggtgaccagaggagaggacacagctgaccggcccccagcccccatctaccaggtgctgggcttcggccccaggagccagggcgtcttcctgagccgctatggccctgcctggagggagcagaggcgcttctctgtgtccaccctgaggaacctgggcctgggcaagaagagcctggagcagtgggtgacagaggaggccgcctgcctgtgtgccgcctttgctgaccaggccggccggcccttccggcccaacggcctgctggacaaggctgtgtccaatgtcatcgccagcctgacctgtggcagaagatttgaatatgatgacccccgcttcctgcggctgctggacctggcccaggagggcctgaaggaggagagcggcttcctgcgggaggtgctgaatgctgtgcctgtgctgctgcacatcccagccctggccggcaaggtgctgcgcttccagaaggccttcctgacccagctggatgagctgctgacagagcacaggatgacctgggaccctgcccagcccccccgggacctgacagaggccttcctggccaagaaggagaaggccaagggcagccctgagagcagcttcaatgatgagaacctgagaattgtggtgggcaacctcttcctggccggcatggtgaccaccctgaccaccctggcctggggcctgctgctgatgatcctgcacctggatgtgcagctgcgggtgcagcaggagattgatgatgtgattggccaggtgagaagacctgagatgggagaccaggcccacatgccctacaccacagctgtgattcatgaggtgcagagatttggagacatcatccccctgtctgtgacccacatgaccagccatgacatcgaggtgcagggcttccgcatccccaagggcaccaccctcatcaccaacctgagctctgtgctgaaggatgaagctgtgtggaagaagcccttccgcttccaccctgagcacttcctggatgcccagggccactttgtgaagccagaggccttcctgcccttctctgctggccggcgggcctgcctgggggagcccctggccaggatggagctgttcctgttcttcaccagcctgctgcagcacttctccttctctgtggccgccggccagccccggcccagccacagccgggtggtgtccttcctggtgacccccagcccctatgagctgtgtgctgtgcccaggtag

SEQ ID NO: 1712 - DNA, 1332 bp, Artificial Sequence
  derived and/or modified sequence
caggaggccctgaccctgcccctgcagctgcggcggcggttcggcgatgtattctccctgcagcttgcctggacgccagtcgtggtgctgaatggactggcagccgtgagagaagcaatggtgactagaggtgaagatacggccgacaggccgcctgcaccaatttaccaagtgttaggattcggacccagggagcagtgggtgttcctctcacggtatggtcctgcttggcgggagcagcgccgattctcagtgagtaccctccgaaacctcggcctgggcaagaagagcctcgaacaatgggttaccgaggaggccgcctgtctgtgtgcggccttcgcagatcaggatgcaccttttgcccccaccgtgtcctggacaaagccaaatgtgatcgccagtctgacttgtggacggcgcttcgagtatgatgatccacgctttctgagactcctggaccttgcacaggagggtttaaaggaagaatccgggttcctgcgcgaggtgctgaacgctgtgcctgtgctgcttcacatccccgccttggcaggaaaggtcttacggtttcagaaagcttttctcacgcagctggacgagctgcttaccgagcataggatgacctgggatcctgcccagcctccacgcgatttaaccgaagcctttcttgctaaaaaagaaaaagctaagggaagccctgagagctcattcaacgacgagaatcttcgcatcgtcgtcggcaatctattcctcgctgggatggtgaccactctaacaacactagcctggggtctcctgctaatgatactccacttagacgtacagttgagggttcagcaggaaatcgacgatgtgattgggcaggttcggaggccagagatgggggaccaggcccatatgccttacaccaccgccgtgatccacgaggtgcagagattcggggatatcatcccactgtccgtaacccacatgacctcacacgatatagaagtgcagggctttaggatacccaagggtacaacattaatcacgaatctgtccagcgtccttaaggacgaggccgtgtggaagaaaccttttcgctttcatccggagcactttctggacgcccaggggcactttgtgaaaccggaagctttcctgccatttagcgcaggacggagggcatgtctcggtgagccgttggccaggatggaactttttttgttttttacaagcctgctgcagcactttagtttcagcgtggccgccggccagccaaggcccagtcattccagagtggtcagcttccttgtcaccccgtccccatatgaattgtgcgctgtgcccaggtag

SEQ ID NO: 1713 - DNA, 1491 bp, Artificial Sequence
  derived and/or modified sequence
atgggcctggaggccctggtgcccctggccatgatcgtggccatcttcctgctccttgtcgacctaatgcacagacaccagcgttgggccgcacgataccccccaggcccacttcccctgccgggcttagggaatcttcacgtggactttcaaaacacaccttactgctttgatcagctgaggcgtcgtttcggcgatgttttctcactacagctagcatggactcccgttgtggtcttgaacggactagcagctgtgcgtgaggccatggtcaccagaggcgaggacactgccgataggccacctgcacctatttaccaggtgctgggcttcggccccagggaacaatgggtttttctatcacgctacggccccgcctggagggagcagagaaggttttcggtgtctactctgcgtaaccttggcttgggcaagaagtccttggaacaatgggttacagaggaagcggcctgcctgtgcgccgccttcgccgatcaggccggtaggccctttcgccctaacggcctgctcgataaagcagtgtcaaatgtgatcgcttctctaacctgtgggcgcagatttgaatatgatgatccaagatttcttaggctgctggacctagcccaggagggacttaaagaggagtcgggcttcctgcgagaggttctcaacgcagtgcctgtcttattgcacatccccgctctggcgggtaaggtactgcgctttcagaaagcctttcttactcagctcgacgagctgctgaccgagcatcggatgacttgggatcctgcgcagcctccacgcgacctcaccgaggcgttcctcgctaagaaagaaaaagccaagggcagcccagagtcatcattcaatgatgaaaatcttagaatcgttgttggcaacctcttcctggcaggcatggtaacaacccttaccactctggcctggggcctgctgttgatgatcctgcaccttgatgtacaactgcgcgtccaacaagagatcgatgatgtcatcggccaagtgcggcgcccggagatgggcgaccaggctcatatgccatacacgacggctgtaatccacgaggtacagagattcggagatattattccattatcagtcactcatatgacttcccacgacatcgaggtgcagggcttccgaattccaaaggggactacccttatcactaacctctccagcgttctgaaggatgaggctgtgtggaaaaaacctttcaggtttcaccccgagcattttctagacgctcaaggacattttgtcaaaccagaggccttcctcccattcagcgccggacgccgagcctgcctgggtgagccactggctcgcatggagctgttcctgttcttcaccagcctgctgcaacatttctctttcagcgttgccgccggccaacctagacctagccattctagggtggtttctttcctggtcacgccatctccctacgagctctgcgccgtgcccaggtag

SEQ ID NO: 1714 - DNA, 1224 bp, Artificial Sequence
  derived and/or modified sequence
atggtgacccggggcgaggacaccgccgaccggccccccgcccccatttaccaggtcctgggatttggcccacgctcccagggagtcttcctgagtagatacggccctgcatggcgggaacaaagacgtttttccgtatctacactgaggaatttagggctgggcaagaagagtctggagcaatgggtgaccgaggaggccgcttgcctgtgcgctgccttcgctgatcaggccggcaggccatttagaccaaacggcctgttagacaaagcagtcagtaatgtgattgcttcgctgacctgcggacgcagattcgagtatgatgaccccagatttctgcggcttttagacttggctcaggaaggactcaaggaagagagtgggttcctcagagaggtgttgaacgccgtaccagtgctgcttcacatcccagccctagccggcaaggtacttcggtttcaaaaggcttttctaacccagctcgatgagctgctaacagagcacagaatgacttgggatcctgctcagccccccagggaccttacagaggccttcctggccaaaaaggaaaaggcaaaaggctccccagagagctccttcaacgatgagaacctgagaatcgtggttgggaacctttttctggcggggatggtgactaccctcacaactctggcctggggcctcttgctaatgatccttcacctggacgtccagctccgtgtccaacaagagatagatgatgtcattgggcaagttagacgaccagaaatgggtgatcaggcgcacatgccctacacaacggcagtgatccacgaagttcagcgatttggcgatatcattcctttgtccgttacacatatgacaagccatgacatcgaggtacagggttttaggattccaaagggtactacactgattacaaatctcagtagtgtacttaaagatgaggctgtgtggaaaaaacccttccgcttccaccccgaacatttcctcgatgcacaaggacattttgtgaaacccgaagcatttctgccattcagcgctggccggagagcttgtttaggggagcctttggctcgcatggaattgtttctgttctttacgagcttgctgcagcacttctccttcagcgtggcggcagggcagcctcgcccgagccattcacgggtggtatcctttctcgtcaccccaagcccgtacgagctatgcgctgtgcctcgatag

SEQ ID NO: 1715 - DNA, 1332 bp, Artificial Sequence
  derived and/or modified sequence
caagaggcacttaccctccccctgcagctgagaagaagattcggcgatgtgttcagcctgcaattggcctggacacctgtggtggtgttgaatggcctggccgcagttcgcgaggcaatggtgactagaggggaggataccgccgacagaccccctgccccaatttatcaggttctgggattcggccctcgagaacagtgggtttttctgagccggtacgggcctgcttggcgagagcagaggagattttcagtaagtacgctcagaaacctgggcctaggaaagaaaagcctcgagcaatgggtgacagaagaagccgcttgcctgtgcgccgcttttgccgaccaagacgctccgttcgcacccaccgtctcctggactaaacctaatgtcattgcctctctgacctgtggcaggaggttcgaatatgatgatccaaggttcctcaggttgctcgacttggcacaagagggcctgaaagaggaatctggttttttgcgggaggtgctgaacgccgtcccagtcctgctgcatataccggcactggctgggaaggtgttgcgcttccagaaggccttcttgacccaactcgacgaacttcttacagaacatcgcatgacatgggatcccgctcaacccccaagagatctgaccgaagcctttttggctaagaaggaaaaggcaaaaggaagccccgaatcctcatttaatgatgagaacctgcggatcgtggtaggtaacctgttcttggccggaatggtaacaacccttaccacacttgcctggggcctgctgttgatgattctgcatctggacgtccagctcagagtgcaacaggaaattgacgacgtcattggacaggtcagaagacctgagatgggtgatcaagcacatatgccttacaccacggcggtgatccacgaagtccagcggtttggagatattatacctctgtcagtgactcacatgacgtcacacgacatcgaggtgcagggattccgtatcccaaagggcaccacactgatcacaaatttgtcttcagtcctcaaggatgaggctgtttggaaaaagcccttccggtttcaccccgaacacttcctcgatgctcaaggacacttcgtgaaaccagaagccttcttgcccttctccgcaggcaggcgagcttgcctgggcgagcccttagcccgaatggagctgttcctcttcttcacgtccctcctccagcactttagtttctcagtggctgccggacagcctcgtcctagtcattcccgagtcgtgtcttttcttgtcaccccaagtccatacgagctttgcgcagttccgagatag

SEQ ID NO: 1716 - DNA, 1491 bp, Artificial Sequence
  derived and/or modified sequence
atggggctggaagctttggttccgcttgcaatgattgtcgctatttttctgcttctcgtcgacctcatgcacaggcaccagagatgggcagcacggtaccctccagggcctctgcctcttcccggacttggcaatcttcatgtggacttccagaatactccctactgttttgaccagctgcgacgacggtttggggacgtattctccctccaacttgcttggacgcccgttgtcgtgttaaatggccttgcagcggttcgtgaggctatggtcacccgcggtgaagacaccgcggacagaccacccgctccaatttatcaggtgcttggttttggcccaagggaacagtgggtgttcttgagcaggtatggtccagcctggagggagcagcgccgattcagtgtgtcaacgctgaggaatctaggattgggaaagaagagtctggaacagtgggttacagaggaggccgcatgcctctgcgctgcatttgctgatcaggccggtaggcccttccgccctaatgggctcctggacaaagctgtgagcaacgttattgcctctctaacctgcggaagaaggttcgagtacgacgatccacgctttctccggctgttagatcttgctcaggagggactaaaagaagaatccggcttcctccgcgaagttcttaatgccgtacccgtgctcctgcatattcccgctctggccggaaaggtgcttaggttccagaaggcctttttgacccagttggatgaactcctcactgagcacagaatgacctgggatcctgcccagcctcctagagacctcactgaagccttcctcgcaaagaaagagaaggcaaaggggtcccctgaatcctcctttaatgacgagaatcttagaatagtcgtgggtaacttgtttcttgccggtatggtaaccaccctcaccacccttgcttggggcttgcttttaatgatcctacaccttgatgtgcaacttagggtgcagcaggagatagatgacgttattggacaagttcgtaggccagaaatgggggaccaggcacatatgccttacacgaccgccgtcatccacgaggttcagcgctttggagacatcatcccacttagtgtgacccatatgacgtcccatgatatagaagtgcagggctttaggataccaaaaggcacaaccctcatcacaaatttgtcttccgtgctcaaggatgaggcggtatggaagaagccatttagattccacccagaacacttcctggatgcccagggtcactttgtgaagcccgaagccttcctcccgttctcagcgggtcggagagcttgcctcggcgaacccttagccagaatggaactctttctcttcttcaccagcctactgcagcatttttcttttagcgtggcagcgggacagcccagaccctcgcactctcgggttgtgtccttcctggttactcctagtccatacgagctgtgtgcagtgcctcgatag

SEQ ID NO: 1717 - DNA, 1224 bp, Artificial Sequence
  derived and/or modified sequence
atggtaacacgaggagaggacaccgccgataggccgccagcacccatctaccaggtgctgggctttggccctcgatctcagggggtgttcctttccaggtatgggccagcctggcgggaacagcgcagattcagtgtgagcaccctgcgtaacctgggattgggaaaaaagtcacttgagcagtgggtcacggaggaggccgcttgcctgtgcgctgcctttgccgaccaggctgggaggccatttcggcctaacgggctcctggacaaagctgtgagcaatgtaatagcgagtttgacatgcggacgccgatttgagtatgacgaccccagattcttgcgtctgctggacctggcccaggaaggactgaaggaggagtctggattccttcgagaagtcctgaacgctgtccccgtgctgctgcacataccagccctagccggtaaagtgctgcggttccagaaggcgttcctcacccagctggatgagctcctaactgagcatcgcatgacctgggatccagcgcagcctcccagggacctaactgaggcattcctggccaagaaggaaaaggccaaaggaagtcctgagtcaagcttcaacgatgaaaacttgagaatcgtagtgggcaacctgttcttggccggtatggtcactacgcttaccactctggcttggggtctccttctcatgattctgcatttggacgtgcagctcagggtacagcaggagatcgatgacgtgatcggtcaggtgaggagacctgagatgggcgaccaggcacatatgccatatacaaccgctgtgatccatgaggttcagaggtttggtgatatcatcccgctgagcgtgacacacatgacttcacacgacattgaggtgcagggatttaggatacccaagggtacaaccttgataaccaaccttagtagcgtgttgaaagatgaggcagtttggaagaagcccttcaggttccaccccgaacatttcttggatgcccagggccacttcgttaaaccagaggccttcctgcctttctcggctggcagaagggcttgtctaggagaaccgctggctagaatggagctttttcttttctttacctctctgttacagcacttcagcttcagtgtcgccgctggccagcctcggccaagtcattcaagggttgtttcctttctggtcacgccatcaccctatgagctgtgtgccgttcccagatag

SEQ ID NO: 1718 - DNA, 1494 bp, Artificial Sequence
  derived and/or modified sequence
atgggcctagaggccttagtgcctctggctgtgatcgttgcaatttttctcctgctggtagatttgatgcaccgaagacagcggtgggcagccaggtacccaccaggcccgcttccattaccggggcttggtaacctgcttcacgtagattttcaaaacactccctactgctttgatcagctgcgacgtaggtttggggacgtgttctctcttcagctagcgtggactccagtcgtggtgctaaatggcctagcggcggtgcgtgaggcattagttacacacggcgaagataccgctgatcgcccgcccgttccaatcacccagatcctgggttttggccccagatcacagggggtcttcctggcacggtacgggcccgcatggcgagagcagcgcaggttcagcgtgtccaccttacgaaatcttgggcttggcaagaagagtctggaacaatgggtcacggaagaggccgcttgcctgtgcgctgcctttgcaaatcattcagggcgtccctttagacccaacggtttactggataaggccgtatcaaatgtgattgcgtccttgacgtgtggtagacgcttcgaatatgacgaccctaggttcctgcggctactggacctcgctcaggaggggcttaaggaagaaagcggcttcctgcgcgaggtgctcaacgcagtccctgtgctcctccacatccccgctctcgccgggaaagtcttgaggtttcagaaggcttttctgacccagttggatgaactgttaactgaacatagaatgacatgggatcctgctcagccaccgcgggatttaacggaagcctttctggctgaaatggagaaggcgaagggtaaccctgaatcaagctttaacgatgaaaacctgtgtatcgtggtggccgacctattttccgccggtatggttaccacttccactaccctggcatggggcttacttctcatgatcctgcatcctgacgttcagcgacgcgtgcagcaggaaatagacgatgttattggacaggtgcggcgtcccgagatgggcgaccaagctcacatgccctatacaaccgccgtaattcacgaggtgcagcgttttggagatattgtccccctgggcgtgacccatatgacaagtcgggatatcgaagtccagggattccgtatccccaagggcacaaccctcattaccaacttaagcagtgtacttaaagacgaggctgtttgggaaaagccttttaggtttcatccggaacactttctggatgcccagggccacttcgtcaagcctgaggcatttctgccgttttccgccgggagacgagcctgcttgggggaaccattggcccgcatggagctcttcctgttctttacatctctcttgcagcatttctccttctcagttccaactggccaaccacgcccgagtcatcacggggttttcgctttcttggtaactccgtctccctacgagttgtgcgccgtccctaggtag

SEQ ID NO: 1719 - DNA, 1494 bp, Artificial Sequence
  derived and/or modified sequence
atgggattagaagcgctggtccccctcgccgtaattgtggccatctttctcctactggtggaccttatgcataggcggcagagatgggctgcccgttacccaccgggtcccctgcctctgccgggcctggggaatctacttcatgttgattttcagaacaccccatactgttttgaccagctgcggcgcaggttcggcgacgtctttagcctccagctggcgtggactcccgtggtcgtattgaacggattagccgccgtgcgagaagccctggtcacacatggcgaggacactgctgataggccccctgtgcctatcacccagattctgggattcggaccacgcgggcagggcgtgtttcttgcgagatacgggcccgcatggagggaacagcggagattcagcgtctctaccctacgtaacctcggacttggcaagaaatccttggagcagtgggtaacggaagaagccgcttgtttatgtgccgcctttgccaaccacagtggacgccccttccgacctaatggcctgttggacaaggcagttagtaatgttattgcctcactgacatgtggaaggagatttgagtacgatgacccaaggttccttcgcctattggatttggcccaggaaggactcaaggaagagagtgggttcctgagagaagtgcttaatgcagtaccagtgctgcttcatatcccggcgctcgctggcaaggttctgcggtttcagaaggcctttctcacgcagttggacgaattgttgaccgagcacagaatgacatgggatccagcacagccccctagagatctcaccgaagcctttctggccgagatggagaaagctaagggcaacccagagagctcattcaatgacgaaaatttgtgcattgtggtggcagatctgttcagtgccggtatggtgacaacaagtaccacattggcatggggcctcctgcttatgatcttacacccagatgtccagaggagggtccagcaggaaattgacgacgttattggccaagtacggcgcccggagatgggtgaccaggcacacatgccttacaccacagctgtcatccacgaggtgcagcgattcggagatatcgtgccactgggtgtgacgcatatgaccagtagggacattgaagtgcagggcttccgtattccaaaaggcacaacactgatcaccaacctttcttcagtactaaaagatgaggctgtgtgggaaaagccatttcggttccacccagagcacttcctcgacgctcaggggcacttcgtgaagcctgaggcgttcctccctttttctgcaggccgccgcgcttgtcttggggaaccactggcaaggatggaactgttcttgtttttcacatcccttttgcagcatttctcttttagcgtgcccaccggacagccccggccctctcaccatggtgtgttcgcattcctcgtgaccccgagcccctatgagctctgcgccgtcccacgatag

SEQ ID NO: 1720 - DNA, 1332 bp, Artificial Sequence
  derived and/or modified sequence
caggaagccctgactctgccgctgcagctgcgccggcgtttcggcgacgtcttttcactccagctggcttggacccctgtggtagtattaaatggtcttgcggcagtgcgcgaagcactggtgacacatggagaggacacagcagatcggcctcccgtcccaataacccagatcctgggctttggcccgcgcggacagggtgtctttttggcgcggtacggcccggcctggagagagcagaggagattcagtgttagcaccctccgtaatctagggctggggaagaaaagcctagaacagtgggtcactgaagaggccgcatgcctctgcgccgcgttcgcgaaccacgatgccccgttcgcgcccaccgtgtcatggacgaagcccaacgtgatcgcaagcctgacctgtggccggcggttcgaatatgacgaccccaggtttctccgtctgctggatttagcccaagaggggctgaaggaagagtccggctttctgagagaggtattgaacgccgtgcctgtattattacatatacctgccttggccggcaaagtcttgagatttcaaaaggccttcctgacccagttggacgagctgcttactgagcaccggatgacctgggatcctgcacagcccccaagggatctgacagaggctttcctggccgaaatggagaaggcgaagggtaacccagagtcaagcttcaacgatgagaacctgtgcatcgtggtcgccgacctgttcagcgccggaatggtgaccaccagcacaaccctcgcctgggggctattactcatgattttacatccagatgttcagagacgggtccagcaggagatcgacgacgtaatcggacaggttcggagaccggaaatgggggaccaggcccatatgccctacacaacggctgtgatacacgaggtccagcgcttcggagacatcgtccccctgggagtgacgcacatgaccagtagggatattgaagtgcagggttttcgcattccaaaagggaccaccctcattacaaatctgtccagtgtactgaaggacgaggccgtctgggagaagcccttcaggtttcaccccgagcactttcttgacgcacagggacatttcgtgaaacccgaagcttttctgcctttctctgctggccgtcgcgcttgccttggggagcctctggcccgcatggagcttttcctgtttttcactagtctactgcagcactttagcttctccgtacccaccgggcagccacgcccatcgcaccacggggtatttgctttcctcgtgaccccctccccatacgaactgtgtgcagtgcctcgctag

SEQ ID NO: 1721 - DNA, 1494 bp, Artificial Sequence
  derived and/or modified sequence
atgggcctggaggccctggtgcccctggccgtcatcgtggccatcttcctgctgctggtggacctgatgcaccggcggcagcgctgggccgcccgctacccacctggccccctgcccctgcccggcctgggcaacctgctgcacgtggacttccagaacaccccctactgctttgaccagctgcggaggagatttggagatgtgttcagcctgcagctggcctggacccctgtggtggtgctgaatggcctggccgctgtgcgggaggccctggtgacccacggggaggacacagctgaccggccccctgtgcccatcacccagatcctgggcttcggccccaggagccagggcgtcttcctggcccgctatggccctgcctggagggagcagaggcgcttctctgtgtccaccctgaggaacctgggcctgggcaagaagagcctggagcagtgggtgacagaggaggccgcctgcctgtgtgccgcctttgccaaccacagcggccggcccttccggcccaacggcctgctggacaaggctgtgtccaatgtcatcgccagcctgacctgtggcagaagatttgaatatgatgacccccgcttcctgcggctgctggacctggcccaggagggcctgaaggaggagagcggcttcctgcgggaggtgctgaatgctgtgcctgtgctgctgcacatcccagccctggccggcaaggtgctgcgcttccagaaggccttcctgacccagctggatgagctgctgacagagcacaggatgacctgggaccctgcccagcccccccgggacctgacagaggccttcctggccgagatggagaaggccaagggcaaccctgagagcagcttcaatgatgagaacctgtgcatcgtggtggccgacctcttctctgctggcatggtgaccaccagcaccaccctggcctggggcctgctgctgatgatcctgcacccagatgtgcagaggagagtgcagcaggagattgatgatgtgattggccaggtgagaagacctgagatgggagaccaggcccacatgccctacaccacagctgtgattcatgaggtgcagagatttggagacatcgtgcccctgggcgtgacccacatgaccagccgggacatcgaggtgcagggcttccgcatccccaagggcaccaccctcatcaccaacctgagctctgtgctgaaggatgaagctgtgtgggagaagcccttccgcttccaccctgagcacttcctggatgcccagggccactttgtgaagccagaggccttcctgcccttctctgctggccggcgggcctgcctgggggagcccctggccaggatggagctgttcctgttcttcaccagcctgctgcagcacttctccttctctgtgcccaccggccagccccggcccagccaccacggcgtgtttgccttcctggtgacccccagcccctatgagctgtgtgctgtgcccaggtag

SEQ ID NO: 1722 - DNA, 1494 bp, Artificial Sequence
  derived and/or modified sequence
atgggcctggaggccctggtgcccctggccgtcatcgtggccatcttcctgctgctggtggacctgatgcaccggcggcagcgctgggccgcccgctacccacctggccccctgcccctgcccggcctgggcaacctgctgcacgtggacttccagaacaccccctactgctttgaccagctgcggaggagatttggagatgtgttcagcctgcagctggcctggacccctgtggtggtgctgaatggcctggccgctgtgcgggaggccctggtgacccacggggaggacacagctgaccggccccctgtgcccatcacccagatcctgggcttcggcccccggggccagggcgtcttcctggcccgctatggccctgcctggagggagcagaggcgcttctctgtgtccaccctgaggaacctgggcctgggcaagaagagcctggagcagtgggtgacagaggaggccgcctgcctgtgtgccgcctttgccaaccacagcggccggcccttccggcccaacggcctgctggacaaggctgtgtccaatgtcatcgccagcctgacctgtggcagaagatttgaatatgatgacccccgcttcctgcggctgctggacctggcccaggagggcctgaaggaggagagcggcttcctgcgggaggtgctgaatgctgtgcctgtgctgctgcacatcccagccctggccggcaaggtgctgcgcttccagaaggccttcctgacccagctggatgagctgctgacagagcacaggatgacctgggaccctgcccagcccccccgggacctgacagaggccttcctggccgagatggagaaggccaagggcaaccctgagagcagcttcaatgatgagaacctgtgcatcgtggtggccgacctcttctctgctggcatggtgaccaccagcaccaccctggcctggggcctgctgctgatgatcctgcacccagatgtgcagaggagagtgcagcaggagattgatgatgtgattggccaggtgagaagacctgagatgggagaccaggcccacatgccctacaccacagctgtgattcatgaggtgcagagatttggagacatcgtgcccctgggcgtgacccacatgaccagccgggacatcgaggtgcagggcttccgcatccccaagggcaccaccctcatcaccaacctgagctctgtgctgaaggatgaagctgtgtgggagaagcccttccgcttccaccctgagcacttcctggatgcccagggccactttgtgaagccagaggccttcctgcccttctctgctggccggcgggcctgcctgggggagcccctggccaggatggagctgttcctgttcttcaccagcctgctgcagcacttctccttctctgtgcccaccggccagccccggcccagccaccacggcgtgtttgccttcctggtgacccccagcccctatgagctgtgtgctgtgcccaggtag

SEQ ID NO: 1723 - DNA, 1332 bp, Artificial Sequence
  derived and/or modified sequence
caggaggccctgaccctgcccctgcagctgcggaggagatttggagatgtgttcagcctgcagctggcctggacccctgtggtggtgctgaatggcctggccgctgtgcgggaggccctggtgacccatggagaggacacagctgacaggcctcctgtgcccatcacccagatcctgggcttcggcccccggggccagggcgtcttcctggcccgctatggccctgcctggagggagcagaggcgcttctctgtgtccaccctgaggaacctgggcctgggcaagaagagcctggagcagtgggtgacagaggaggccgcctgcctgtgtgccgcctttgccaaccatgatgccccctttgcccccaccgtgtcctggaccaagcccaacgtcatcgccagcctgacctgtggcagaagatttgaatatgatgacccccgcttcctgcggctgctggacctggcccaggagggcctgaaggaggagagcggcttcctgcgggaggtgctgaatgctgtgcctgtgctgctgcacatcccagccctggccggcaaggtgctgcgcttccagaaggccttcctgacccagctggatgagctgctgacagagcacaggatgacctgggaccctgcccagcccccccgggacctgacagaggccttcctggccgagatggagaaggccaagggcaaccctgagagcagcttcaatgatgagaacctgtgcatcgtggtggccgacctcttctctgctggcatggtgaccaccagcaccaccctggcctggggcctgctgctgatgatcctgcacccagatgtgcagaggagagtgcagcaggagattgatgatgtgattggccaggtgagaagacctgagatgggagaccaggcccacatgccctacaccacagctgtgattcatgaggtgcagagatttggagacatcgtgcccctgggcgtgacccacatgaccagccgggacatcgaggtgcagggcttccgcatccccaagggcaccaccctcatcaccaacctgagctctgtgctgaaggatgaagctgtgtgggagaagcccttccgcttccaccctgagcacttcctggatgcccagggccactttgtgaagccagaggccttcctgcccttctctgctggccggcgggcctgcctgggggagcccctggccaggatggagctgttcctgttcttcaccagcctgctgcagcacttctccttctctgtgcccaccggccagccccggcccagccaccacggcgtgtttgccttcctggtgacccccagcccctatgagctgtgtgctgtgcccaggtag

SEQ ID NO: 1724 - DNA, 1494 bp, Artificial Sequence
  derived and/or modified sequence
atgggcctggaggccctggtgcccctggccgtgatcgtggccatctttctgctattggtcgacctcatgcaccggcggcagaggtgggccgcccgttacccgccagggcccctaccactgccggggttagggaacttgctacacgttgacttccagaacactccgtactgttttgatcaactgcggcggaggtttggagatgtatttagcttgcaattggcctggactccagtcgtggtgctgaacggacttgctgctgtgcgcgaggccctggtgacccatggggaagataccgccgaccgcccccctgtcccgataacccaaatcctgggtttcggaccacgcagccagggggtcttcttggccaggtatggacctgcctggagggaacaacgcagatttagcgtgagcacacttaggaacctcggactaggcaaaaaatccttggagcagtgggtgaccgaagaagctgcatgtttatgtgcagcattcgccaaccactctgggcgacccttccgacccaacgggctgctagataaggctgtgagtaatgttatcgcctcccttacgtgcggaaggcgatttgagtatgacgatcctcgattcctgaggctgcttgacctggctcaagagggactgaaggaggagtcaggctttctccgcgaggtcctgaatgccgtcccagtgcttctgcacattccggccttggcaggcaaagtactccggtttcagaaagcctttctaacccagttagacgagttgcttaccgaacatagaatgacctgggaccctgcacagccccccagggatctgacagaggctttcctggccgagatggagaaagccaaggggaacccggaatccagcttcaacgacgagaatttgtgtatcgtggttgctgatctgttctccgctggtatggtgacgacatcaacaacgttggcatggggtctccttctgatgattttgcatcctgacgtccagcgtagagttcagcaggaaattgatgacgttattggacaggtcagacggcctgagatgggagatcaggcccacatgccgtacactaccgctgtaatccacgaagttcagcggtttggcgatatcgtcccgctgggcgttactcacatgacttcccgtgatatcgaagtacaggggttcagaatccctaagggtaccacactgattacgaatctttccagtgtgctgaaggacgaggctgtctgggagaaaccctttcgttttcaccccgaacacttcctggatgctcaggggcatttcgtcaagccagaggcctttttacctttttcggcaggcaggcgtgcttgcctgggagagccccttgcgcggatggagctgtttctgtttttcacaagccttctacagcacttttcctttagtgtgcctactggtcaacctcgaccaagtcaccacggtgtgttcgcatttctggtcacgccaagtccgtatgagctgtgcgccgtcccccgatag

SEQ ID NO: 1725 - DNA, 1494 bp, Artificial Sequence
  derived and/or modified sequence
atgggcctggaggccctggtgcccctggccgtgatcgtggccatcttcttacttttagtcgacctgatgcacagacgacaaagatgggcggctaggtatccgccaggccccctgcccctgcctgggctaggcaatttgctccatgtggattttcagaacacaccttattgcttcgatcagctgagaaggcggttcggagatgtgttctccctccaattagcctggactccggttgtcgttctgaatgggctcgcagctgttcgcgaggctttagtgacccatggcgaggatactgccgaccgcccgcccgtgcccattacccaaattcttgggttcggccctagaggacagggggtgtttcttgcaagatatgggccagcctggcgcgaacagaggagattcagcgtttcgactcttcgtaacctgggcctgggaaaaaagagtctcgaacagtgggttaccgaagaagctgcgtgcctctgtgccgcttttgcgaaccacagtgggcggccctttcgtccgaacggcctgctggataaggctgtttctaatgtgattgcaagcctgacatgtggcagaagatttgaatatgacgaccctagatttctcagactgcttgacttagcacaagagggcctaaaggaggagagtgggttccttagagaagtgctgaacgctgtgcccgtgctgctccatatccccgccctggcaggaaaagtgctcaggtttcaaaaagccttcctgactcagctggacgagctcctgaccgaacatagaatgacctgggaccctgcacagccaccgagggacctgaccgaggccttcctggccgagatggagaaggccaaaggcaatccagagagctccttcaatgacgagaatctttgcattgtcgtggcagacctgttctctgccggcatggtcacaacctctactacactcgcctggggtctgctcctaatgatccttcacccagacgtgcagcgaagagtacagcaagagatcgacgacgtaattggccaggttcgtcggccagagatgggcgatcaagcgcacatgccatatacgacggctgtgatccacgaagtccagcggtttggggacatcgtacctctgggggtgacacacatgacctcccgggatatcgaagtgcagggtttccgcatcccaaaaggtaccacattaatcaccaacctgtcatccgtgctgaaggacgaagctgtctgggagaagcctttcagattccaccctgagcacttcctggatgcccaaggccatttcgttaagcctgaggccttcttgcccttctctgccggccgacgggcgtgcctgggggagcccctcgcacgtatggaactgttcttgttctttacatccctgctgcagcacttttccttctcggtgccaacagggcagccacgacccagccatcacggcgtcttcgcattccttgttactccatccccttatgaattgtgcgcggttccccggtag

SEQ ID NO: 1726 - DNA, 1332 bp, Artificial Sequence
  derived and/or modified sequence
caggaggccctgaccctgcccctgcagctgcggcggcggttcggcgacgtcttctctttgcagctcgcttggacccccgtcgttgtgctcaacgggctggcagccgtgagggaagcacttgtgacacatggagaggacacagcagaccgtcctcccgtccccatcacccaaattctgggatttggacctcgggggcagggagtatttctcgccaggtacggacctgcctggagagagcaacgaagattctccgtgagcactctccggaacctggggctgggcaaaaaaagtctggaacagtgggtgacagaagaggcagcctgtctatgcgccgcgtttgctaatcacgatgccccattcgccccaaccgtgagctggactaaaccaaacgtaatagcctctctaacctgcggaagacggttcgagtacgacgaccctagattcctccgactgctggatcttgcacaagaaggtctcaaagaggaatcgggcttcctacgagaggtcctgaacgcagtgccagtgcttctccatattcctgccctcgcagggaaggtgctacgcttccagaaggctttcctcacacagttagatgagctgctcaccgaacatcgtatgacctgggatccagctcaacctcctcgagacctgacagaggcgtttttggcagagatggagaaggcaaaaggtaatccagagagctctttcaacgacgagaatttatgtattgtagtggcagatctattttctgcggggatggttacgaccagcacgaccctcgcatgggggttgctgctgatgatcctgcaccccgatgttcaaaggagggtccagcaggaaatcgatgatgtgattggtcaagtgcggcgacctgaaatgggtgaccaggcacacatgccatacacgactgccgttatccacgaagtgcagagattcggagacattgtgccactgggtgttacccacatgacatcccgagacatcgaagtacagggtttccgcattccgaaaggtacaaccctgattactaatcttagctcagtactaaaggatgaggctgtttgggaaaagcccttccggttccatcctgaacactttctggacgcccaggggcactttgttaaaccggaggcgtttctcccattcagcgccggtcgtcgcgcttgcctgggcgagccgctcgctcggatggaattattcctcttctttacctcattactgcagcatttttcgtttagtgtgccgaccggccaaccaaggccttctcatcacggggtgtttgcttttctggttactcctagcccctatgaactctgtgccgtccctaggtag

SEQ ID NO: 1727 - DNA, 1494 bp, Artificial Sequence
  derived and/or modified sequence
atgggactggaggccctggtacccctggcagttatcgtcgccatttttttattactagtcgatctgatgcacagacggcagcgatgggccgctcgttacccacctggccctctccctctgcctggtctaggcaacctactgcacgtggatttccaaaataccccatattgttttgaccagctgagaagaaggtttggagatgtgtttagcctgcaattggcctggacaccagttgtcgtgcttaacgggctggccgcagtaagggaagcactagtcacccatggtgaagataccgccgatagacccccagttccaattacccagatattgggctttggccctcggagtcaaggagtgttcctggctcggtatggccctgcttggcgcgaacaacgccgtttttccgtgtcaactttacggaatctagggttgggcaaaaagtcactggagcagtgggtcacggaagaagccgcatgtctgtgtgctgccttcgcaaaccacagtggcagacctttccgcccaaatggcctgctggacaaagccgtgtcgaacgtaattgctagtcttacctgcgggagaaggttcgaatacgacgaccccaggtttctcagactgttagatctcgcacaggaaggcttgaaagaagaatctgggttcctcagggaggtacttaacgctgtccccgtcttgctgcacatcccagcactggcgggaaaagtccttcgctttcaaaaggcttttctaacacaattggatgagttgttaacagagcaccggatgacttgggacccagcccagccaccacgggaccttaccgaagcatttctcgcagaaatggagaaggcaaaaggaaatccagaatcaagtttcaacgatgagaatttgtgcatcgtggtagctgatttgttcagcgcgggaatggttaccacctctacaactctggcgtgggggctgctgctcatgatcctacaccccgacgtccagagacgagtacagcaggaaatcgacgatgttattgggcaggttcgtcgcccagagatgggggatcaggcacatatgccctacacgacagcagtgatacatgaagtccaacgcttcggggatattgtaccactgggcgtgacgcatatgacttccagggatattgaggttcagggtttccgtattcctaagggtaccaccctgataactaacctcagtagtgtgctgaaggatgaggctgtgtgggaaaaaccgttccgtttccacccagagcattttctcgatgcgcagggccacttcgtgaagccagaggctttcctccctttcagcgctggaagaagagcttgtttgggtgaaccactggcccgaatggaacttttcctttttttcacgtctcttctgcagcacttttcattctccgtgcccacaggacagcccaggccctcccaccacggtgtgttcgcttttctggtcacaccctccccctatgaactctgtgcagtgccccgatag

SEQ ID NO: 1728 - DNA, 1494 bp, Artificial Sequence
  derived and/or modified sequence
atgggcctggaggccttggttccactggccgttattgtggcaatcttcctccttctcgtagatcttatgcacagaaggcagagatgggcagccagatacccaccaggaccattgcccttacccggtcttggaaacctcctccatgtagatttccagaatacgccctactgctttgaccagctgcggcgacgttttggtgacgtgttcagtctccaactggcatggacacccgtggtggtgttgaacggtttagccgcagtgagggaggccctggtgacacacggagaggatacagccgataggccacccgtgcctattacgcaaattctggggtttggaccccgagggcagggcgtgttcctcgctcgctatggcccagcttggcgggagcagcggaggttttcggtgagcacccttagaaatctgggtctgggaaaaaagtctctagagcagtgggtgaccgaggaagcggcatgcctgtgtgctgctttcgctaaccatagtggcagaccgtttaggccaaacgggctgttggacaaggcagttagtaatgtgatagcatctctaacctgcggtagaagattcgagtatgatgatcctcgctttcttagactattagacttggcccaggaaggcttaaaagaggaatctgggtttctgcgggaggtgctgaacgccgtcccagttcttctccacatacccgcactagcagggaaggtgctgcggtttcagaaggcctttctgacacagctggacgaactgctgacagagcaccgcatgacgtgggaccctgcacagccaccgcgtgatctgacagaagctttcttagccgagatggagaaggccaagggaaaccccgagtcttccttcaacgacgagaacctgtgtattgtggtagctgatttattcagcgcgggaatggttaccacgtctaccacgctcgcgtgggggctgcttctgatgattctccatcccgacgtgcaacgaagagtgcagcaggagatcgacgacgtgattggtcaggtgcgcagacctgagatgggggatcaggctcacatgccatacaccaccgcagtgatccatgaagtacagaggttcggcgacattgtaccactaggcgtcacacatatgacctcgcgggatatagaggtccagggattccgtatacctaaagggacaaccttgattaccaacctgagcagcgtgcttaaggatgaggcagtttgggagaagcccttcaggttccatccggagcatttcctggatgctcagggccatttcgtgaaacccgaggccttcttgccattctcagctggcaggcgggcttgcctgggggagccactcgctaggatggagttgttcctgttttttacatctctgttacagcatttctccttcagcgtccccactggacaaccgcgacccagccatcacggagtgtttgcctttttagtcaccccctcaccatacgagttgtgtgctgtccccaggtag

SEQ ID NO: 1729 - DNA, 1332 bp, Artificial Sequence
  derived and/or modified sequence
caggaggccctgacacttccactgcaattaaggcgccgttttggggacgtattttctctgcaactggcctggacccctgtagtggtcctgaacggccttgcagccgtgcgggaagcactagtgacacatggtgaagacacagccgatagaccacctgtgccaatcacccagattctggggttcggccctcgcggacagggcgtattcctcgcccgatacggccctgcttggagagagcagcgcaggtttagcgttagtacactgcggaacctaggcctcgggaagaagtccctcgagcaatgggtaacagaggaggcagcttgcctatgcgcggctttcgccaatcacgatgccccatttgcgccaactgtgagctggacgaaacctaatgtgattgcctctttgacttgtggcagaagattcgagtatgatgacccaagattcctgaggttgctcgacttagctcaggaagggctgaaagaggaaagtggttttctcagagaagttttaaacgccgtccccgtcctgctgcacattccggcactagctggtaaggttctgcgtttccagaaagcattcctaactcagctggatgagctgctcacagaacaccgcatgacctgggaccctgcacaaccccctagagacttaactgaggcttttctggccgagatggagaaggctaaaggaaatcccgaatcaagcttcaatgacgaaaacctctgcattgtggttgcggacctcttttcagcagggatggtcaccacaagcacaacactggcctggggtctccttctgatgatattgcatcctgatgtacaacgcagagtgcagcaggagattgacgacgtaatagggcaggtcagacgacctgagatgggtgatcaggcccatatgccgtacacaaccgccgtgattcacgaggtgcaacgctttggcgacattgtgcctctgggagtgactcatatgacctcaagggacatagaagtccagggatttcgcatccctaaggggacaacattgattacgaaccttagtagcgtccttaaggacgaagcggtttgggaaaaaccattcagattccatcctgaacactttctggacgcacaaggccacttcgtgaagcccgaggcttttttgccattttcagctgggaggcgggcatgtctgggcgagcctctggcacgcatggaactttttctgtttttcacttctctgctccaacatttcagcttcagcgttcctaccggtcagccaagaccatcccatcacggcgtctttgcttttttagtgacccccagtccttatgagctgtgcgccgtcccaagatag

SEQ ID NO: 1730 - DNA, 1684 bp, Artificial Sequence
  derived and/or modified sequence
ataagggaagggtcacgcgctcggtgtgctgagagtgtcctgcctggtcctctgtgcctggtggggtgggggtgccaggtgtgtccagaggagcccatttggtagtgaggcaggtatggggctagaagcactggtgcccctggccgtgatagtggccatcttcctgctcctggtggacctgatgcaccggcgccaacgctgggctgcacgctacccaccaggccccctgccactgcccgggctgggcaacctgctgcatgtggacttccagaacacaccatactgcttcgaccagttgcggcgccgcttcggggacgtgttcagcctgcagctggcctggacgccggtggtcgtgctcaatgggctggcggccgtgcgcgaggcgctggtgacccacggcgaggacaccgccgaccgcccgcctgtgcccatcacccagatcctgggtttcgggccgcgttcccaaggggtgttcctggcgcgctatgggcccgcgtggcgcgagcagaggcgcttctccgtctccaccttgcgcaacttgggcctgggcaagaagtcgctggagcagtgggtgaccgaggaggccgcctgcctttgtgccgccttcgccaaccactccggacgcccctttcgccccaacggtctcttggacaaagccgtgagcaacgtgatcgcctccctcacctgcgggcgccgcttcgagtacgacgaccctcgcttcctcaggctgctggacctagctcaggagggactgaaggaggagtcgggctttctgcgcgaggtgctgaatgctgtccccgtcctcctgcatatcccagcgctggctggcaaggtcctacgcttccaaaaggctttcctgacccagctggatgagctgctaactgagcacaggatgacctgggacccagcccagcccccccgagacctgactgaggccttcctggcagagatggagaaggccaaggggaaccctgagagcagcttcaatgatgagaacctgtgcatagtggtggctgacctgttctctgccgggatggtgaccacctcgaccacgctggcctggggcctcctgctcatgatcctacatccggatgtgcagcgccgtgtccaacaggagatcgacgacgtgatagggcaggtgcggcgaccagagatgggtgaccaggctcacatgccctacaccactgccgtgattcatgaggtgcagcgctttggggacatcgtccccctgggtgtgacccatatgacatcccgtgacatcgaagtacagggcttccgcatccctaagggaacgacactcatcaccaacctgtcatcggtgctgaaggatgaggccgtctgggagaagcccttccgcttccaccccgaacacttcctggatgcccagggccactttgtgaagccggaggccttcctgcctttctcagcaggccgccgtgcatgcctcggggagcccctggcccgcatggagctcttcctcttcttcacctccctgctgcagcacttcagcttctcggtgcccactggacagccccggcccagccaccatggtgtctttgctttcctggtgaccccatccccctatgagctttgtgctgtgccccgctagaatggggtacctagtccccagcctgctccctagccagaggctctaatgtacaataaagcaatgtggtagttccaa

SEQ ID NO: 1731 - DNA, 1657 bp, Artificial Sequence
  derived and/or modified sequence
gtgctgagagtgtcctgcctggtcctctgtgcctggtggggtgggggtgccaggtgtgtccagaggagcccatttggtagtgaggcaggtatggggctagaagcactggtgcccctggccgtgatagtggccatcttcctgctcctggtggacctgatgcaccggcgccaacgctgggctgcacgctacccaccaggccccctgccactgcccgggctgggcaacctgctgcatgtggacttccagaacacaccatactgcttcgaccagttgcggcgccgcttcggggacgtgttcagcctgcagctggcctggacgccggtggtcgtgctcaatgggctggcggccgtgcgcgaggcgctggtgacccacggcgaggacaccgccgaccgcccgcctgtgcccatcacccagatcctgggtttcgggccgcgcggtcagggggtgttcctggcgcgctatgggcccgcgtggcgcgagcagaggcgcttctccgtctccaccttgcgcaacttgggcctgggcaagaagtcgctggagcagtgggtgaccgaggaggccgcctgcctttgtgccgccttcgccaaccactccggacgcccctttcgccccaacggtctcttggacaaagccgtgagcaacgtgatcgcctccctcacctgcgggcgccgcttcgagtacgacgaccctcgcttcctcaggctgctggacctagctcaggagggactgaaggaggagtcgggctttctgcgcgaggtgctgaatgctgtccccgtcctcctgcatatcccagcgctggctggcaaggtcctacgcttccaaaaggctttcctgacccagctggatgagctgctaactgagcacaggatgacctgggacccagcccagcccccccgagacctgactgaggccttcctggcagagatggagaaggccaaggggaaccctgagagcagcttcaatgatgagaacctgtgcatagtggtggctgacctgttctctgccgggatggtgaccacctcgaccacgctggcctggggcctcctgctcatgatcctacatccggatgtgcagcgccgtgtccaacaggagatcgacgacgtgatagggcaggtgcggcgaccagagatgggtgaccaggctcacatgccctacaccactgccgtgattcatgaggtgcagcgctttggggacatcgtccccctgggtgtgacccatatgacatcccgtgacatcgaagtacagggcttccgcatccctaagggaacgacactcatcaccaacctgtcatcggtgctgaaggatgaggccgtctgggagaagcccttccgcttccaccccgaacacttcctggatgcccagggccactttgtgaagccggaggccttcctgcctttctcagcaggccgccgtgcatgcctcggggagcccctggcccgcatggagctcttcctcttcttcacctccctgctgcagcacttcagcttctcggtgcccactggacagccccggcccagccaccatggtgtctttgctttcctggtgaccccatccccctatgagctttgtgctgtgccccgctagaatggggtacctagtccccagcctgctccctagccagaggctctaatgtacaataaagcaatgtggtagttcc

SEQ ID NO: 1732 - DNA, 1405 bp, Artificial Sequence
  derived and/or modified sequence
caagaggccctgaccctccctctgcagttgcggcgccgcttcggggacgtgttcagcctgcagctggcctggacgccggtggtcgtgctcaatgggctggcggccgtgcgcgaggcgctggtgacccacggcgaggacaccgccgaccgcccgcctgtgcccatcacccagatcctgggtttcgggccgcgcggtcagggggtgttcctggcgcgctatgggcccgcgtggcgcgagcagaggcgcttctccgtctccaccttgcgcaacttgggcctgggcaagaagtcgctggagcagtgggtgaccgaggaggccgcctgcctttgtgccgccttcgccaaccacgacgcccctttcgccccaacggtctcttggacaaagccgaacgtgatcgcctccctcacctgcgggcgccgcttcgagtacgacgaccctcgcttcctcaggctgctggacctagctcaggagggactgaaggaggagtcgggctttctgcgcgaggtgctgaatgctgtccccgtcctcctgcatatcccagcgctggctggcaaggtcctacgcttccaaaaggctttcctgacccagctggatgagctgctaactgagcacaggatgacctgggacccagcccagcccccccgagacctgactgaggccttcctggcagagatggagaaggccaaggggaaccctgagagcagcttcaatgatgagaacctgtgcatagtggtggctgacctgttctctgccgggatggtgaccacctcgaccacgctggcctggggcctcctgctcatgatcctacatccggatgtgcagcgccgtgtccaacaggagatcgacgacgtgatagggcaggtgcggcgaccagagatgggtgaccaggctcacatgccctacaccactgccgtgattcatgaggtgcagcgctttggggacatcgtccccctgggtgtgacccatatgacatcccgtgacatcgaagtacagggcttccgcatccctaagggaacgacactcatcaccaacctgtcatcggtgctgaaggatgaggccgtctgggagaagcccttccgcttccaccccgaacacttcctggatgcccagggccactttgtgaagccggaggccttcctgcctttctcagcaggccgccgtgcatgcctcggggagcccctggcccgcatggagctcttcctcttcttcacctccctgctgcagcacttcagcttctcggtgcccactggacagccccggcccagccaccatggtgtctttgctttcctggtgaccccatccccctatgagctttgtgctgtgccccgctagaatggggtacctagtccccagcctgctccctagccagaggctctaatgtacaataaagcaatgtggtagttcc

SEQ ID NO: 1733 - DNA, 1494 bp, Artificial Sequence
  derived and/or modified sequence
atgggcctggaggccctggtgcccctggccgtgatcgtggccatcttcctgctgctggtggacctgatgcacagaagacagagatgggccgccagatacccccccggccccctgcccctgcccggcctgggcaacctgctgcacgtggacttccagaacaccccctactgcttcgaccagctgagaagaagattcggcgacgtgttcagcctgcagctggcctggacccccgtggtggtgctgaacggcctggccgccgtgagagaggccctggtgacccacggcgaggacaccgccgacagaccccccgtgcccatcacccagatcctgggcttcggccccagaagccagggcgtgttcctggccagatacggccccgcctggagagagcagagaagattcagcgtgagcaccctgagaaacctgggcctgggcaagaagagcctggagcagtgggtgaccgaggaggccgcctgcctgtgcgccgccttcgccaaccacagcggcagacccttcagacccaacggcctgctggacaaggccgtgagcaacgtgatcgccagcctgacctgcggcagaagattcgagtacgacgaccccagattcctgagactgctggacctggcccaggagggcctgaaggaggagagcggcttcctgagagaggtgctgaacgccgtgcccgtgctgctgcacatccccgccctggccggcaaggtgctgagattccagaaggccttcctgacccagctggacgagctgctgaccgagcacagaatgacctgggaccccgcccagccccccagagacctgaccgaggccttcctggccgagatggagaaggccaagggcaaccccgagagcagcttcaacgacgagaacctgtgcatcgtggtggccgacctgttcagcgccggcatggtgaccaccagcaccaccctggcctggggcctgctgctgatgatcctgcaccccgacgtgcagagaagagtgcagcaggagatcgacgacgtgatcggccaggtgagaagacccgagatgggcgaccaggcccacatgccctacaccaccgccgtgatccacgaggtgcagagattcggcgacatcgtgcccctgggcgtgacccacatgaccagcagagacatcgaggtgcagggcttcagaatccccaagggcaccaccctgatcaccaacctgagcagcgtgctgaaggacgaggccgtgtgggagaagcccttcagattccaccccgagcacttcctggacgcccagggccacttcgtgaagcccgaggccttcctgcccttcagcgccggcagaagagcctgcctgggcgagcccctggccagaatggagctgttcctgttcttcaccagcctgctgcagcacttcagcttcagcgtgcccaccggccagcccagacccagccaccacggcgtgttcgccttcctggtgacccccagcccctacgagctgtgcgccgtgcccagatag

SEQ ID NO: 1734 - DNA, 1494 bp, Artificial Sequence
  derived and/or modified sequence
atgggcctggaggccctggtgcccctggccgtgatcgtggccatcttcctgctgctggtggacctgatgcacagaagacagagatgggccgccagatacccccccggccccctgcccctgcccggcctgggcaacctgctgcacgtggacttccagaacaccccctactgcttcgaccagctgagaagaagattcggcgacgtgttcagcctgcagctggcctggacccccgtggtggtgctgaacggcctggccgccgtgagagaggccctggtgacccacggcgaggacaccgccgacagaccccccgtgcccatcacccagatcctgggcttcggccccagaggccagggcgtgttcctggccagatacggccccgcctggagagagcagagaagattcagcgtgagcaccctgagaaacctgggcctgggcaagaagagcctggagcagtgggtgaccgaggaggccgcctgcctgtgcgccgccttcgccaaccacagcggcagacccttcagacccaacggcctgctggacaaggccgtgagcaacgtgatcgccagcctgacctgcggcagaagattcgagtacgacgaccccagattcctgagactgctggacctggcccaggagggcctgaaggaggagagcggcttcctgagagaggtgctgaacgccgtgcccgtgctgctgcacatccccgccctggccggcaaggtgctgagattccagaaggccttcctgacccagctggacgagctgctgaccgagcacagaatgacctgggaccccgcccagccccccagagacctgaccgaggccttcctggccgagatggagaaggccaagggcaaccccgagagcagcttcaacgacgagaacctgtgcatcgtggtggccgacctgttcagcgccggcatggtgaccaccagcaccaccctggcctggggcctgctgctgatgatcctgcaccccgacgtgcagagaagagtgcagcaggagatcgacgacgtgatcggccaggtgagaagacccgagatgggcgaccaggcccacatgccctacaccaccgccgtgatccacgaggtgcagagattcggcgacatcgtgcccctgggcgtgacccacatgaccagcagagacatcgaggtgcagggcttcagaatccccaagggcaccaccctgatcaccaacctgagcagcgtgctgaaggacgaggccgtgtgggagaagcccttcagattccaccccgagcacttcctggacgcccagggccacttcgtgaagcccgaggccttcctgcccttcagcgccggcagaagagcctgcctgggcgagcccctggccagaatggagctgttcctgttcttcaccagcctgctgcagcacttcagcttcagcgtgcccaccggccagcccagacccagccaccacggcgtgttcgccttcctggtgacccccagcccctacgagctgtgcgccgtgcccagatag

SEQ ID NO: 1735 - DNA, 1332 bp, Artificial Sequence
  derived and/or modified sequence
caggaggccctgaccctgcccctgcagctgagaagaagattcggcgacgtgttcagcctgcagctggcctggacccccgtggtggtgctgaacggcctggccgccgtgagagaggccctggtgacccacggcgaggacaccgccgacagaccccccgtgcccatcacccagatcctgggcttcggccccagaggccagggcgtgttcctggccagatacggccccgcctggagagagcagagaagattcagcgtgagcaccctgagaaacctgggcctgggcaagaagagcctggagcagtgggtgaccgaggaggccgcctgcctgtgcgccgccttcgccaaccacgacgcccccttcgcccccaccgtgagctggaccaagcccaacgtgatcgccagcctgacctgcggcagaagattcgagtacgacgaccccagattcctgagactgctggacctggcccaggagggcctgaaggaggagagcggcttcctgagagaggtgctgaacgccgtgcccgtgctgctgcacatccccgccctggccggcaaggtgctgagattccagaaggccttcctgacccagctggacgagctgctgaccgagcacagaatgacctgggaccccgcccagccccccagagacctgaccgaggccttcctggccgagatggagaaggccaagggcaaccccgagagcagcttcaacgacgagaacctgtgcatcgtggtggccgacctgttcagcgccggcatggtgaccaccagcaccaccctggcctggggcctgctgctgatgatcctgcaccccgacgtgcagagaagagtgcagcaggagatcgacgacgtgatcggccaggtgagaagacccgagatgggcgaccaggcccacatgccctacaccaccgccgtgatccacgaggtgcagagattcggcgacatcgtgcccctgggcgtgacccacatgaccagcagagacatcgaggtgcagggcttcagaatccccaagggcaccaccctgatcaccaacctgagcagcgtgctgaaggacgaggccgtgtgggagaagcccttcagattccaccccgagcacttcctggacgcccagggccacttcgtgaagcccgaggccttcctgcccttcagcgccggcagaagagcctgcctgggcgagcccctggccagaatggagctgttcctgttcttcaccagcctgctgcagcacttcagcttcagcgtgcccaccggccagcccagacccagccaccacggcgtgttcgccttcctggtgacccccagcccctacgagctgtgcgccgtgcccagatag

SEQ ID NO: 1736 - protein, 427 aa, Artificial Sequence
  derived and/or modified sequence
MAPKKRPETQKTSEIVLRPRNKRSRSPLELEPEAKKLCAKGSGPSRRCDSDCLWVGLAGPQILPPCRSIVRTLHQHKLGRASWPSVQQGLQQSFLHTLDSYRILQKAAPFDRRATSLAWHPTHPSTVAVGSKGGDIMLWNFGIKDKPTFIKGIGAGGSITGLKFNPLNTNQFYASSMEGTTRLQDFKGNILRVFASSDTINIWFCSLDVSASSRMVVTGDNVGNVILLNMDGKELWNLRMHKKKVTHVALNPCCDWFLATASVDQTVKIWDLRQVRGKASFLYSLPHRHPVNAACFSPDGARLLTTDQKSEIRVYSASQWDCPLGLIPHPHRHFQHLTPIKAAWHPRYNLIVVGRYPDPNFKSCTPYELRTIDVFDGNSGKMMCQLYDPESSGISSLNEFNPMGDTLASAMGYHILIWSQEEARTRK

SEQ ID NO: 1737 - protein, 244 aa, Artificial Sequence
  derived and/or modified sequence
MAPKKRPETQKTSEIVLRPRNKRSRSPLELEPEAKKLCAKGSGPSRRCDSDCLWVGLAGPQILPPCRSIVRTLHQHKLGRASWPSVQQGLQQSFLHTLDSYRILQKAAPFDRRATSLAWHPTHPSTVAVGSKGGDIMLWNFGIKDKPTFIKGIGAGGSITGLKFNPLNTNQFYASSMEGTTRLQDFKGNILRVFASSDTINIWFCSLDVSASSRMVVTGDNVGNVILLNMDGKELVSVPMEPGS

SEQ ID NO: 1738 - protein, 363 aa, Artificial Sequence
  derived and/or modified sequence
MAPKKRPETQKTSEIVLRPRNKRSRSPLELEPEAKKLCAKGSGPSRRCDSDCLWVGLAGPQILPPCRSIVRTLHQHKLGRASWPSVQQIGAGGSITGLKFNPLNTNQFYASSMEGTTRLQDFKGNILRVFASSDTINIWFCSLDVSASSRMVVTGDNVGNVILLNMDGKELWNLRMHKKKVTHVALNPCCDWFLATASVDQTVKIWDLRQVRGKASFLYSLPHRHPVNAACFSPDGARLLTTDQKSEIRVYSASQWDCPLGLIPHPHRHFQHLTPIKAAWHPRYNLIVVGRYPDPNFKSCTPYELRTIDVFDGNSGKMMCQLYDPESSGISSLNEFNPMGDTLASAMGYHILIWSQEEARTRK

SEQ ID NO: 1739 - DNA, 1284 bp, Artificial Sequence
  derived and/or modified sequence
atggcccccaagaagagacccgagacccagaagaccagcgagatcgtgctgagacccagaaacaagagaagcagaagccccctggagctggagcccgaggccaagaagctgtgcgccaagggcagcggccccagcagaagatgcgacagcgactgcctgtgggtgggcctggccggcccccagatcctgcccccctgcagaagcatcgtgagaaccctgcaccagcacaagctgggcagagccagctggcccagcgtgcagcagggcctgcagcagagcttcctgcacaccctggacagctacagaatcctgcagaaggccgcccccttcgacagaagagccaccagcctggcctggcaccccacccaccccagcaccgtggccgtgggcagcaagggcggcgacatcatgctgtggaacttcggcatcaaggacaagcccaccttcatcaagggcatcggcgccggcggcagcatcaccggcctgaagttcaaccccctgaacaccaaccagttctacgccagcagcatggagggcaccaccagactgcaggacttcaagggcaacatcctgagagtgttcgccagcagcgacaccatcaacatctggttctgcagcctggacgtgagcgccagcagcagaatggtggtgaccggcgacaacgtgggcaacgtgatcctgctgaacatggacggcaaggagctgtggaacctgagaatgcacaagaagaaggtgacccacgtggccctgaacccctgctgcgactggttcctggccaccgccagcgtggaccagaccgtgaagatctgggacctgagacaggtgagaggcaaggccagcttcctgtacagcctgccccacagacaccccgtgaacgccgcctgcttcagccccgacggcgccagactgctgaccaccgaccagaagagcgagatcagagtgtacagcgccagccagtgggactgccccctgggcctgatcccccacccccacagacacttccagcacctgacccccatcaaggccgcctggcaccccagatacaacctgatcgtggtgggcagataccccgaccccaacttcaagagctgcaccccctacgagctgagaaccatcgacgtgttcgacggcaacagcggcaagatgatgtgccagctgtacgaccccgagagcagcggcatcagcagcctgaacgagttcaaccccatgggcgacaccctggccagcgccatgggctaccacatcctgatctggagccaggaggaggccagaaccagaaagtag

SEQ ID NO: 1740 - DNA, 735 bp, Artificial Sequence
  derived and/or modified sequence
atggcccccaagaagagacccgagacccagaagaccagcgagatcgtgctgagacccagaaacaagagaagcagaagccccctggagctggagcccgaggccaagaagctgtgcgccaagggcagcggccccagcagaagatgcgacagcgactgcctgtgggtgggcctggccggcccccagatcctgcccccctgcagaagcatcgtgagaaccctgcaccagcacaagctgggcagagccagctggcccagcgtgcagcagggcctgcagcagagcttcctgcacaccctggacagctacagaatcctgcagaaggccgcccccttcgacagaagagccaccagcctggcctggcaccccacccaccccagcaccgtggccgtgggcagcaagggcggcgacatcatgctgtggaacttcggcatcaaggacaagcccaccttcatcaagggcatcggcgccggcggcagcatcaccggcctgaagttcaaccccctgaacaccaaccagttctacgccagcagcatggagggcaccaccagactgcaggacttcaagggcaacatcctgagagtgttcgccagcagcgacaccatcaacatctggttctgcagcctggacgtgagcgccagcagcagaatggtggtgaccggcgacaacgtgggcaacgtgatcctgctgaacatggacggcaaggagctggtgagcgtgcccatggagcccggcagctag

SEQ ID NO: 1741 - DNA, 1092 bp, Artificial Sequence
  derived and/or modified sequence
atggcccccaagaagagacccgagacccagaagaccagcgagatcgtgctgagacccagaaacaagagaagcagaagccccctggagctggagcccgaggccaagaagctgtgcgccaagggcagcggccccagcagaagatgcgacagcgactgcctgtgggtgggcctggccggcccccagatcctgcccccctgcagaagcatcgtgagaaccctgcaccagcacaagctgggcagagccagctggcccagcgtgcagcagatcggcgccggcggcagcatcaccggcctgaagttcaaccccctgaacaccaaccagttctacgccagcagcatggagggcaccaccagactgcaggacttcaagggcaacatcctgagagtgttcgccagcagcgacaccatcaacatctggttctgcagcctggacgtgagcgccagcagcagaatggtggtgaccggcgacaacgtgggcaacgtgatcctgctgaacatggacggcaaggagctgtggaacctgagaatgcacaagaagaaggtgacccacgtggccctgaacccctgctgcgactggttcctggccaccgccagcgtggaccagaccgtgaagatctgggacctgagacaggtgagaggcaaggccagcttcctgtacagcctgccccacagacaccccgtgaacgccgcctgcttcagccccgacggcgccagactgctgaccaccgaccagaagagcgagatcagagtgtacagcgccagccagtgggactgccccctgggcctgatcccccacccccacagacacttccagcacctgacccccatcaaggccgcctggcaccccagatacaacctgatcgtggtgggcagataccccgaccccaacttcaagagctgcaccccctacgagctgagaaccatcgacgtgttcgacggcaacagcggcaagatgatgtgccagctgtacgaccccgagagcagcggcatcagcagcctgaacgagttcaaccccatgggcgacaccctggccagcgccatgggctaccacatcctgatctggagccaggaggaggccagaaccagaaagtag

SEQ ID NO: 1742 - DNA, 1846 bp, Artificial Sequence
  derived and/or modified sequence
ctccgagacgggtggggccggagctccaagctggtttgaacaagccctgggcatgtttggcgggaagttggcttagctcggctacctgtggccccgcagttttgtagtccccgccttgtttctccccagaggcctctcaatcctccctccatgatcttcgcatagagcacagtaccccttcacacggaggacgcgatggctcccaagaaacgcccagaaacccagaagacctccgagattgtattacgccccaggaacaagaggagcaggagtcccctggagctggagcccgaggccaagaagctctgtgcgaagggctccggtcctagcagaagatgtgactcagactgcctctgggtggggctggctggcccacagatcctgccaccatgccgcagcatcgtcaggaccctccaccagcataagctgggcagagcttcctggccatctgtccagcaggggctccagcagtcctttttgcacactctggattcttaccggatattacaaaaggctgccccctttgacaggagggctacatccttggcgtggcacccaactcaccccagcactgtggctgtgggttccaaagggggagatatcatgctctggaattttggcatcaaggacaaacccaccttcatcaaagggattggagctggagggagcatcactgggctgaagtttaaccctctcaataccaaccagttttacgcctcctcaatggagggaacaactaggctgcaagactttaaaggcaacattctacgagtttttgccagctcagacaccatcaacatctggttttgtagcctggatgtgtctgctagtagccgaatggtggtcacaggagacaacgtggggaacgtgatcctgctgaacatggacggcaaagagctttggaatctcagaatgcacaaaaagaaagtgacgcatgtggccctgaacccatgctgtgattggttcctggccacagcctccgtagatcaaacagtgaaaatttgggacctgcgccaggttagagggaaagccagcttcctctactcgctgccgcacaggcatcctgtcaacgcagcttgtttcagtcccgatggagcccggctcctgaccacggaccagaagagcgagatccgagtttactctgcttcccagtgggactgccccctgggcctgatcccgcaccctcaccgtcacttccagcacctcacacccatcaaggcagcctggcatcctcgctacaacctcattgttgtgggccgatacccagatcctaatttcaaaagttgtaccccttatgaattgaggacgatcgacgtgttcgatggaaactcagggaagatgatgtgtcagctctatgacccagaatcttctggcatcagttcgcttaatgaattcaatcccatgggggacacgctggcctctgcaatgggttaccacattctcatctggagccaggaggaagccaggacacggaagtgagagacactaaagaaggtgtgggccagacaaggccttggagcccacacatgggatcaagtcctgcaagcagaggtggcgatttgttaaagggccaaaagtatccaaggttagggttggagcaggggtgctgggacctggggcactgtgggactgggacacttttatgttaatgctctggacttgcctccagagactgctccagagttggtgacacagctgtcccaagggcccctctgtatctagcctggaaccaaggttatcttggaactaaatgacttttctcctctcagtgggtggtagcagagggatcaagcagttatttgatttgtgctcacttttgatatggccaataaaaccataccgactg

SEQ ID NO: 1743 - DNA, 1668 bp, Artificial Sequence
  derived and/or modified sequence
ctccgagacgggtggggccggagctccaagctggtttgaacaagccctgggcatgtttggcgggaagttggcttagctcggctacctgtggccccgcagttttgtagtccccgccttgtttctccccagaggcctctcaatcctccctccatgatcttcgcatagagcacagtaccccttcacacggaggacgcgatggctcccaagaaacgcccagaaacccagaagacctccgagattgtattacgccccaggaacaagaggagcaggagtcccctggagctggagcccgaggccaagaagctctgtgcgaagggctccggtcctagcagaagatgtgactcagactgcctctgggtggggctggctggcccacagatcctgccaccatgccgcagcatcgtcaggaccctccaccagcataagctgggcagagcttcctggccatctgtccagcaggggctccagcagtcctttttgcacactctggattcttaccggatattacaaaaggctgccccctttgacaggagggctacatccttggcgtggcacccaactcaccccagcactgtggctgtgggttccaaagggggagatatcatgctctggaattttggcatcaaggacaaacccaccttcatcaaagggattggagctggagggagcatcactgggctgaagtttaaccctctcaataccaaccagttttacgcctcctcaatggagggaacaactaggctgcaagactttaaaggcaacattctacgagtttttgccagctcagacaccatcaacatctggttttgtagcctggatgtgtctgctagtagccgaatggtggtcacaggagacaacgtggggaacgtgatcctgctgaacatggacggcaaagagcttgtttcagtcccgatggagcccggctcctgaccacggaccagaagagcgagatccgagtttactctgcttcccagtgggactgccccctgggcctgatcccgcaccctcaccgtcacttccagcacctcacacccatcaaggcagcctggcatcctcgctacaacctcattgttgtgggccgatacccagatcctaatttcaaaagttgtaccccttatgaattgaggacgatcgacgtgttcgatggaaactcagggaagatgatgtgtcagctctatgacccagaatcttctggcatcagttcgcttaatgaattcaatcccatgggggacacgctggcctctgcaatgggttaccacattctcatctggagccaggaggaagccaggacacggaagtgagagacactaaagaaggtgtgggccagacaaggccttggagcccacacatgggatcaagtcctgcaagcagaggtggcgatttgttaaagggccaaaagtatccaaggttagggttggagcaggggtgctgggacctggggcactgtgggactgggacacttttatgttaatgctctggacttgcctccagagactgctccagagttggtgacacagctgtcccaagggcccctctgtatctagcctggaaccaaggttatcttggaactaaatgacttttctcctctcagtgggtggtagcagagggatcaagcagttatttgatttgtgctcacttttgatatggccaataaaaccataccgactg

SEQ ID NO: 1744 - DNA, 1654 bp, Artificial Sequence
  derived and/or modified sequence
ctccgagacgggtggggccggagctccaagctggtttgaacaagccctgggcatgtttggcgggaagttggcttagctcggctacctgtggccccgcagttttgtagtccccgccttgtttctccccagaggcctctcaatcctccctccatgatcttcgcatagagcacagtaccccttcacacggaggacgcgatggctcccaagaaacgcccagaaacccagaagacctccgagattgtattacgccccaggaacaagaggagcaggagtcccctggagctggagcccgaggccaagaagctctgtgcgaagggctccggtcctagcagaagatgtgactcagactgcctctgggtggggctggctggcccacagatcctgccaccatgccgcagcatcgtcaggaccctccaccagcataagctgggcagagcttcctggccatctgtccagcagattggagctggagggagcatcactgggctgaagtttaaccctctcaataccaaccagttttacgcctcctcaatggagggaacaactaggctgcaagactttaaaggcaacattctacgagtttttgccagctcagacaccatcaacatctggttttgtagcctggatgtgtctgctagtagccgaatggtggtcacaggagacaacgtggggaacgtgatcctgctgaacatggacggcaaagagctttggaatctcagaatgcacaaaaagaaagtgacgcatgtggccctgaacccatgctgtgattggttcctggccacagcctccgtagatcaaacagtgaaaatttgggacctgcgccaggttagagggaaagccagcttcctctactcgctgccgcacaggcatcctgtcaacgcagcttgtttcagtcccgatggagcccggctcctgaccacggaccagaagagcgagatccgagtttactctgcttcccagtgggactgccccctgggcctgatcccgcaccctcaccgtcacttccagcacctcacacccatcaaggcagcctggcatcctcgctacaacctcattgttgtgggccgatacccagatcctaatttcaaaagttgtaccccttatgaattgaggacgatcgacgtgttcgatggaaactcagggaagatgatgtgtcagctctatgacccagaatcttctggcatcagttcgcttaatgaattcaatcccatgggggacacgctggcctctgcaatgggttaccacattctcatctggagccaggaggaagccaggacacggaagtgagagacactaaagaaggtgtgggccagacaaggccttggagcccacacatgggatcaagtcctgcaagcagaggtggcgatttgttaaagggccaaaagtatccaaggttagggttggagcaggggtgctgggacctggggcactgtgggactgggacacttttatgttaatgctctggacttgcctccagagactgctccagagttggtgacacagctgtcccaagggcccctctgtatctagcctggaaccaaggttatcttggaactaaatgacttttctcctctcagtgggtggtagcagagggatcaagcagttatttgatttgtgctcacttttgatatggccaataaaaccataccgactg

SEQ ID NO: 1745 - DNA, 1284 bp, Artificial Sequence
  derived and/or modified sequence
atggctcccaagaaacgacccgaaacacagaaaacatcggagatcgttctgaggccacggaacaaaaggagcaggtccccactggagttggaacccgaggctaagaagttgtgtgcgaaaggctctggcccctcacgacgctgcgatagtgactgtctgtgggtgggcctggcgggaccacagatcctgcccccatgcagaagtattgtacgtactctacatcagcacaaactcgggcgcgcctcctggccttctgtccaacagggtctccagcagagctttcttcatacactggattcgtataggattctccaaaaggctgcccctttcgaccgcagagcaacatcactcgcgtggcatccaacccacccctcaacggtggccgtgggtagtaagggtggcgacataatgttgtggaattttggcattaaggataagcctactttcatcaaaggtataggggctggcggcagtatcaccggcctcaagtttaacccactgaacactaatcagttttacgcttcaagcatggagggaactacacgcctgcaggatttcaaaggcaacatcctgcgagtgtttgccagctcagatacaatcaatatctggttctgctcactggacgttagcgcctcaagtagaatggtcgtcacaggggacaatgtggggaacgtcatcctgctgaatatggatggcaaggagctgtggaatctgaggatgcacaaaaagaaagttacacacgtcgccttgaacccttgttgtgattggtttctggccacagccagcgttgatcagaccgttaaaatctgggatctccgccaggttaggggaaaagcatcatttctgtattctctgccccaccgccaccctgtcaacgcagcatgtttctctcccgacggagcccgcctccttaccacagatcagaaatcagagatacgagtgtattccgcttctcagtgggactgcccccttgggctcattccacatcctcatagacactttcaacatcttacgcccatcaaggctgcgtggcacccgcgatataatctgatcgtagttggacgctacccagacccaaactttaaatcatgcacaccttacgagctgcgcaccattgatgtttttgacggcaacagtgggaagatgatgtgtcagttatacgatcccgagtcatccggcatttctagtctcaacgaatttaacccgatgggagacactctggcaagcgcaatggggtatcacatcctcatctggtctcaggaggaagcaaggactagaaaatag

SEQ ID NO: 1746 - DNA, 735 bp, Artificial Sequence
  derived and/or modified sequence
atggctcctaaaaaacgccccgagacccaaaaaacatcagagatcgttctgcggccccgcaataagcggtcaaggagccccctggaactcgagcccgaagctaagaaattgtgtgcaaaggggtctgggccaagtcgtagatgcgattcagactgcctgtgggtcgggctggctggcccccaaatactgcctccgtgcaggagtattgtcagaactctccaccaacacaaacttggccgcgctagctggccatctgtacagcaaggcctccaacagtccttcttgcacactctggattcctatcgaattctgcagaaagccgctccatttgatagacgagctacaagtctggcttggcatcccacacacccctcaacagtggccgtgggctcaaaagggggtgatatcatgctgtggaattttggaatcaaagacaagcctacctttattaagggcatcggtgcgggaggatcgatcaccggactgaagttcaatccactgaacacaaaccaattttatgcctcttccatggaagggacgacaagactccaggatttcaagggcaatatccttcgggtcttcgcaagctcagacactattaacatctggttctgttctctggatgtgtcagcatccagcagaatggttgtgacgggggacaacgttgggaatgtgattctgctgaacatggacggtaaagagctggtctccgttcctatggaacccggatcctag

SEQ ID NO: 1747 - DNA, 1092 bp, Artificial Sequence
  derived and/or modified sequence
atggcgccaaagaagagacctgaaacccagaaaacatccgagatagtgctgcgcccgcgtaacaagcggtccagaagccccctggaactggaacctgaagccaaaaagttatgcgctaagggctccggcccatcgaggaggtgtgactctgactgcctgtgggtggggctggctggcccacaaattcttcctccttgccggtctatcgtccgcaccctgcaccaacataagctaggcagagcttcctggcccagcgtgcagcagatcggtgctggaggatctattacaggcctcaaattcaatccactcaatactaaccagttctatgcatcttccatggagggtactactagactgcaggatttcaaagggaatatcttaagggtgttcgcgagtagcgacaccatcaacatctggttttgtagcttggacgtgtctgccagttccagaatggttgttaccggagacaacgtcggcaatgtgattctcctgaacatggatggaaaagaactgtggaatctacgaatgcacaagaagaaggtgacacatgtagccctcaatccttgttgcgactggtttctcgctaccgcctcggtggatcagaccgtgaaaatctgggacctgaggcaggtgaggggcaaagcaagcttcttatactccctgcctcacagacaccctgtgaacgctgcctgcttctcaccggacggcgccagactgctgaccactgatcagaagagcgagattcgggtgtatagcgcctcccagtgggactgtccactcggactgattccacaccctcaccgtcacttccagcacttgaccccaattaaagccgcttggcatcctcggtacaatctgatcgtcgttggacgctacccggatcctaacttcaaaagctgcactccgtacgagctgcggactatagacgtgtttgacgggaacagcggcaaaatgatgtgccaactctacgatcctgagtcatcaggcatttcctccttgaacgagttcaaccctatgggcgacacactagcctcagccatgggttatcatattctgatctggtctcaggaggaggctcgcacccggaagtag

SEQ ID NO: 1748 - DNA, 1284 bp, Artificial Sequence
  derived and/or modified sequence
atggcccccaagaagaggcctgagacccagaagaccagcgagatcgtgctgcggcccaggaacaagaggagccgcagccccctggagctggagcctgaggccaagaagctgtgtgccaagggcagcggccccagccgccgctgtgacagcgactgcctgtgggtgggcctggccggcccccagatcctgcccccctgccgcagcatcgtgaggaccctgcaccagcacaagctgggccgggcctcctggcccagcgtgcagcagggcctgcagcagagcttcctgcacaccctggacagctaccgcatcctgcagaaggccgccccctttgaccggcgggccaccagcctggcctggcaccccacccaccccagcacagtggccgtgggcagcaagggcggggacatcatgctgtggaactttggcatcaaggacaagcccaccttcatcaagggcattggagctgggggcagcatcaccggcctgaagttcaaccccctgaacaccaaccagttctacgccagctccatggagggcaccacccggctgcaggacttcaagggcaacatcctgcgggtgtttgccagcagtgacaccatcaacatctggttctgcagcctggatgtgtctgccagcagcaggatggtggtgactggagacaacgtgggcaatgtcatcctgctgaacatggatggcaaggagctgtggaacctgaggatgcacaagaagaaggtgacccacgtggccctgaacccctgctgtgactggttcctggccacagcctctgtggaccagacagtgaagatctgggacctgcggcaggtgcggggcaaggccagcttcctgtacagcctgccccaccgccaccctgtgaatgctgcctgcttctccccagatggagcccggctgctgaccacagaccagaagtctgagatccgggtgtacagcgccagccagtgggactgccccctgggcctcatcccccacccccaccgccacttccagcacctgacccccatcaaggccgcctggcacccccgctacaacctgattgtggtgggccgctacccagaccccaacttcaagagctgcaccccctatgagctgcggaccattgatgtgtttgatggcaacagcggcaagatgatgtgccagctgtatgaccctgagagcagcggcatcagcagcctgaatgagttcaaccccatgggagacaccctggccagcgccatgggctaccacatcctgatctggagccaggaggaggcccggaccaggaagtag

SEQ ID NO: 1749 - DNA, 735 bp, Artificial Sequence
  derived and/or modified sequence
atggcccccaagaagaggcctgagacccagaagaccagcgagatcgtgctgcggcccaggaacaagaggagccgcagccccctggagctggagcctgaggccaagaagctgtgtgccaagggcagcggccccagccgccgctgtgacagcgactgcctgtgggtgggcctggccggcccccagatcctgcccccctgccgcagcatcgtgaggaccctgcaccagcacaagctgggccgggcctcctggcccagcgtgcagcagggcctgcagcagagcttcctgcacaccctggacagctaccgcatcctgcagaaggccgccccctttgaccggcgggccaccagcctggcctggcaccccacccaccccagcacagtggccgtgggcagcaagggcggggacatcatgctgtggaactttggcatcaaggacaagcccaccttcatcaagggcattggagctgggggcagcatcaccggcctgaagttcaaccccctgaacaccaaccagttctacgccagctccatggagggcaccacccggctgcaggacttcaagggcaacatcctgcgggtgtttgccagcagtgacaccatcaacatctggttctgcagcctggatgtgtctgccagcagcaggatggtggtgactggagacaacgtgggcaatgtcatcctgctgaacatggatggcaaggagctggtgtctgtgcccatggagcccggcagctag

SEQ ID NO: 1750 - DNA, 1092 bp, Artificial Sequence
  derived and/or modified sequence
atggcccccaagaagaggcctgagacccagaagaccagcgagatcgtgctgcggcccaggaacaagaggagccgcagccccctggagctggagcctgaggccaagaagctgtgtgccaagggcagcggccccagccgccgctgtgacagcgactgcctgtgggtgggcctggccggcccccagatcctgcccccctgccgcagcatcgtgaggaccctgcaccagcacaagctgggccgggcctcctggcccagcgtgcagcagattggagctgggggcagcatcaccggcctgaagttcaaccccctgaacaccaaccagttctacgccagctccatggagggcaccacccggctgcaggacttcaagggcaacatcctgcgggtgtttgccagcagtgacaccatcaacatctggttctgcagcctggatgtgtctgccagcagcaggatggtggtgactggagacaacgtgggcaatgtcatcctgctgaacatggatggcaaggagctgtggaacctgaggatgcacaagaagaaggtgacccacgtggccctgaacccctgctgtgactggttcctggccacagcctctgtggaccagacagtgaagatctgggacctgcggcaggtgcggggcaaggccagcttcctgtacagcctgccccaccgccaccctgtgaatgctgcctgcttctccccagatggagcccggctgctgaccacagaccagaagtctgagatccgggtgtacagcgccagccagtgggactgccccctgggcctcatcccccacccccaccgccacttccagcacctgacccccatcaaggccgcctggcacccccgctacaacctgattgtggtgggccgctacccagaccccaacttcaagagctgcaccccctatgagctgcggaccattgatgtgtttgatggcaacagcggcaagatgatgtgccagctgtatgaccctgagagcagcggcatcagcagcctgaatgagttcaaccccatgggagacaccctggccagcgccatgggctaccacatcctgatctggagccaggaggaggcccggaccaggaagtag

SEQ ID NO: 1751 - DNA, 1284 bp, Artificial Sequence
  derived and/or modified sequence
atggcccccaagaagcggcccgagacccagaagaccagcgagatcgtgttgagacccagaaataagaggtctcgtagcccactagaattggagcccgaagctaaaaaattgtgcgccaaaggatctggcccttcgcggagatgcgactccgattgcttatgggtgggtttagcaggaccccaaattttacctccttgtcgcagcatcgttcgaacgcttcaccagcacaaactcggacgcgccagctggcccagcgtacagcaggggctccagcagtcattcttacacactctcgactcctatcgcattctccagaaggctgcacccttcgatcggcgagctaccagtctcgcgtggcaccccactcacccaagcactgtggcggttggcagcaagggcggcgatataatgctatggaatttcggtataaaggataaacccacgtttatcaaaggaatcggtgcgggcgggagcatcaccggtctcaaatttaatccgctgaatacaaaccagttctatgccagtagcatggaaggtaccacccggcttcaggacttcaagggtaacatcctgagagtgtttgccagttctgacaccataaacatctggttctgtagcctggatgtttcagccagctctcgcatggtggtcaccggtgataacgttgggaatgtgattctgctaaacatggacggcaaggagctctggaatctccgtatgcataagaaaaaagtgacacacgtagctctgaacccctgctgcgattggttcctggccaccgctagcgtggatcaaacagttaaaatttgggatctgaggcaggtgcgcggcaaggcctcctttctgtatagcctccctcatcgacacccggttaacgcggcgtgtttcagtcccgacggagctcgcctcctaaccaccgaccagaagagcgaaattcgggtgtacagcgcctctcagtgggattgtcccttgggactgattccccaccctcaccgacatttccagcacctcacccccatcaaagctgcttggcatccccggtacaacctgattgtggttggcagatatcccgacccaaatttcaaatcctgcaccccttacgaactgcgcaccattgatgtgttcgatggaaactctgggaagatgatgtgccagctctacgatccagaaagctccggtatctccagcttgaacgaattcaaccctatgggagacacactcgcatctgctatgggataccacatcctaatttggtcccaagaggaagcccggactcggaagtag

SEQ ID NO: 1752 - DNA, 735 bp, Artificial Sequence
  derived and/or modified sequence
atggcccccaagaagcggcccgagacccagaagaccagcgagatcgtattgcgtccacgtaataagagaagtaggtctcctcttgagctggagccagaggctaagaagctgtgcgccaaaggatctggcccatctcgtcgatgcgacagcgattgcctatgggttggtctggctggcccacaaattctccctccatgcagatcaatcgtgagaacgcttcaccaacacaagttaggaagagccagttggcctagcgttcaacagggcctccaacagtccttccttcacacactggattcgtataggattctccagaaggcggccccctttgatcgccgtgccacaagtctcgcctggcacccgacccaccccagtacagtggctgtcggatccaagggaggggacattatgctgtggaacttcggcataaaagataagccaaccttcatcaaaggaataggcgccggtggaagcataacagggcttaagttcaaccctttgaacactaaccaattttacgcctcatcaatggagggaacaactaggctgcaggattttaagggcaatatcctgcgcgtgttcgccagttcagatactattaatatatggttctgctcccttgatgtatccgcctcgagtagaatggtggtcacgggtgataacgttggcaacgtgatcttactgaacatggacgggaaggaactagtttctgtccccatggagcctgggtcctag

SEQ ID NO: 1753 - DNA, 1092 bp, Artificial Sequence
  derived and/or modified sequence
atggcccccaagaagcggcccgagacccagaagaccagcgagatcgtgctgagaccacggaacaagaggagccgctctccactggagctggagcccgaagccaaaaaactctgcgcaaaaggcagtggcccttcacggcgctgcgattcggattgtctctgggtcggcttggctggtccacagatcctacctccgtgcaggtccatcgtccgaaccctccaccagcataagctggggagagcttcttggccgagcgttcagcaaatcggagccgggggcagcatcaccggactgaaatttaaccctctcaatacaaatcagttctatgcatcatcaatggaaggcacaaccagacttcaggactttaaggggaatattcttagggttttcgccagcagtgatacaattaacatttggttttgttccctcgacgtgagcgcttcatctagaatggttgtgacaggggacaatgtggggaatgtgatccttctgaacatggacggtaaggagctgtggaaccttcgaatgcacaagaagaaggtgacgcacgttgctctcaatccctgttgcgattggttcttggcaacggccagtgtagaccagaccgtgaaaatatgggacctccggcaagtgagggggaaggctagtttcctgtattcactgccacatcgacatcctgtgaatgcagcctgcttctcccccgatggggcccggcttcttaccactgatcagaagagcgaaattcgggtttattccgccagccagtgggactgccctctgggactcattcctcacccacaccgccacttccagcaccttacacccataaaggccgcatggcacccacgatacaatctgattgtggtaggcaggtaccctgacccaaacttcaagagctgtaccccgtatgagctgcggaccatagatgtttttgatggcaactcagggaagatgatgtgtcagctctacgaccctgaatcgagtggtatttccagtctcaacgaattcaatccaatgggagacaccctagcatctgctatggggtatcatattctgatatggtctcaggaggaagctagaacccgtaagtag

SEQ ID NO: 1754 - DNA, 1284 bp, Artificial Sequence
  derived and/or modified sequence
atggccccaaaaaagaggcccgagactcaaaagaccagtgagattgtgctcagaccaagaaacaagagatccaggtccccactcgagcttgaacccgaggcgaagaagctgtgcgcaaaggggtctggcccttccagaaggtgtgattcagactgtttatgggtgggactggccggtcctcaaatcttacctccttgccgctctattgttaggacgctgcaccagcacaaactcgggagggcgtcatggccttctgtgcagcagggcctgcagcagtcttttcttcacaccttggactcgtataggatcctccagaaagccgcaccctttgacagaagagcgacctctctcgcttggcatcccacccatccaagcactgttgcggttggcagtaagggtggggatataatgctctggaacttcggaattaaagacaagcccactttcatcaaaggcatcggggctggcggaagcataaccggacttaaatttaatcctctgaacaccaaccaattttacgcctcctccatggaaggtaccacgagactgcaggactttaaaggcaatatcctgcgggtattcgcatcttcagatacaattaatatctggttctgttctctggacgtatcagcctcttctcgcatggtcgttaccggtgataacgtaggaaatgtgatcttgctcaacatggatggcaaagaactgtggaatctcagaatgcacaagaagaaggtgactcatgtggcattaaatccctgctgtgattggttcctggccactgcatccgtggatcagacagtgaagatttgggatctcagacaggttagagggaaggcctcattcctgtacagtctgccacaccggcatcccgtgaacgccgcatgctttagcccagacggagctcgcttactcacaacagaccagaagagtgagatccgggtgtattcagccagtcagtgggactgtcccctgggcttaatcccccatccccaccgccattttcaacacctgactcccattaaagctgcttggcatccacggtacaatttgatcgtggtggggaggtaccctgacccaaactttaagtcatgcacaccatacgaattacgtaccatcgacgtgttcgacggcaacagtggtaagatgatgtgccagctatacgatccagagtcgtcgggaattagtagcctaaacgagttcaaccccatgggcgatacactagcgagtgcaatggggtatcacattctcatttggtcccaggaggaggcgagaaccagaaagtag

SEQ ID NO: 1755 - DNA, 735 bp, Artificial Sequence
  derived and/or modified sequence
atggccccaaaaaagagacccgagacacagaaaaccagtgagatcgttcttcggcctcgaaataagcggagtcgatcccccctggagttggagcccgaagccaaaaaactgtgtgctaagggaagcggaccctcacgtcggtgcgactctgactgcttgtgggttggcttagcaggccctcagatactgcccccttgccggtcaattgtgcgcacactgcatcaacacaaactgggccgagcttcttggccctctgttcagcagggcctacaacaatcatttctccatactcttgactcctatagaatcctgcagaaggctgcaccattcgacagacgcgcaacatcactggcctggcaccctactcacccttctactgtcgcagtgggttccaagggaggagatatcatgctgtggaactttggcatcaaggacaagcccacattcattaaagggataggggcaggcggaagcataaccggactgaaatttaaccccctgaataccaaccaattttacgctagttccatggagggcacaacgcgcctccaagattttaaggggaatatcctcagagtttttgcctcttccgatacaatcaacatctggttttgcagtctagacgttagtgcctcttcaaggatggtcgtgactggcgataatgtgggcaatgtaattctgttaaacatggacggcaaagagttggtgagcgtccccatggaaccagggtcttag

SEQ ID NO: 1756 - DNA, 1092 bp, Artificial Sequence
  derived and/or modified sequence
atggctcccaaaaaaaggccagaaactcaaaagaccagtgaaatcgtgctgcgccctaggaataagcgatctcgctcacctctcgaactggaacccgaggcaaaaaagctttgtgcaaaaggtagcggtccctcacgcagatgcgactctgactgcctgtgggttgggctcgctggacctcagattctgcccccttgtaggagtatagtgcggacgttgcaccagcataaactcggacgggcttcctggcctagcgtacagcagatcggagccggtggatctatcacaggtctcaaatttaatcccctgaacactaatcagttttatgcaagcagcatggaaggaaccactaggctgcaggactttaaaggaaacattctccgcgtgttcgcctcatctgataccattaacatctggttctgttcactagatgtttcggccagttccagaatggtggtgactggtgacaatgtgggcaacgtaatcttgttgaacatggatgggaaggaactttggaatctaaggatgcacaagaagaaggtgacccacgtggctcttaacccctgctgtgattggtttctggctactgcttccgtagaccaaacagtcaaaatctgggaccttcgtcaagtgagaggcaaggctagcttcctgtatagtttaccccataggcacccagtgaacgccgcatgttttagcccagacggggctcggcttttgaccactgaccagaagtcggagatccgagtgtattccgcgtctcagtgggattgcccactgggcctgatcccccacccacaccggcactttcaacatttgaccccgattaaagcagcatggcatcctcggtacaacctcatcgttgtcggacgatacccagatcccaacttcaagagctgcaccccttatgagctgcggaccatcgatgtgttcgacgggaatagcggaaaaatgatgtgccagctgtatgaccccgaatcctcaggaatatcctcattaaatgaatttaatccaatgggagacacacttgctagcgcgatgggctatcacatcttgatttggagtcaggaagaagccaggacccgcaagtag

SEQ ID NO: 1757 - protein, 509 aa, Artificial Sequence
  derived and/or modified sequence
MQSWSRVYCSLAKRGHFNRISHGLQGLSAVPLRTYADQPIDADVTVIGSGPGGYVAAIKAAQLGFKTVCIEKNETLGGTCLNVGCIPSKALLNNSHYYHMAHGKDFASRGIEMSEVRLNLDKMMEQKSTAVKALTGGIAHLFKQNKVVHVNGYGKITGKNQVTATKADGGTQVIDTKNILIATGSEVTPFPGITIDEDTIVSSTGALSLKKVPEKMVVIGAGVIGVELGSVWQRLGADVTAVEFLGHVGGVGIDMEISKNFQRILQKQGFKFKLNTKVTGATKKSDGKIDVSIEAASGGKAEVITCDVLLVCIGRRPFTKNLGLEELGIELDPRGRIPVNTRFQTKIPNIYAIGDVVAGPMLAHKAEDEGIICVEGMAGGAVHIDYNCVPSVIYTHPEVAWVGKSEEQLKEEGIEYKVGKFPFAANSRAKTNADTDGMVKILGQKSTDRVLGAHILGPGAGEMVNEAALALEYGASCEDIARVCHAHPTLSEAFREANLAASFGKSINF

SEQ ID NO: 1758 - protein, 459 aa, Artificial Sequence
  derived and/or modified sequence
MLIYVAAIKAAQLGFKTVCIEKNETLGGTCLNVGCIPSKALLNNSHYYHMAHGKDFASRGIEMSEVRLNLDKMMEQKSTAVKALTGGIAHLFKQNKVVHVNGYGKITGKNQVTATKADGGTQVIDTKNILIATGSEVTPFPGITIDEDTIVSSTGALSLKKVPEKMVVIGAGVIGVELGSVWQRLGADVTAVEFLGHVGGVGIDMEISKNFQRILQKQGFKFKLNTKVTGATKKSDGKIDVSIEAASGGKAEVITCDVLLVCIGRRPFTKNLGLEELGIELDPRGRIPVNTRFQTKIPNIYAIGDVVAGPMLAHKAEDEGIICVEGMAGGAVHIDYNCVPSVIYTHPEVAWVGKSEEQLKEEGIEYKVGKFPFAANSRAKTNADTDGMVKILGQKSTDRVLGAHILGPGAGEMVNEAALALEYGASCEDIARVCHAHPTLSEAFREANLAASFGKSINF

SEQ ID NO: 1759 - DNA, 1530 bp, Artificial Sequence
  derived and/or modified sequence
atgcagagctggagtcgggtgtactgtagcttggcaaagaggggccattttaaccgcatctctcacggactgcagggtttgagcgctgtgccactgcggacatacgccgatcagcccatcgatgcagacgtgacagtgattggcagcggacctggtgggtacgtggcagcgatcaaggcagcacaactgggctttaaaaccgtctgtatcgagaaaaacgaaacgttgggaggtacctgtctgaatgtagggtgcatcccttctaaggctttgctcaataacagtcactactatcacatggcccacgggaaggattttgcctcccgtgggattgagatgtcggaagttcgtctgaacttggacaagatgatggaacagaaaagcaccgccgtaaaagcactaactggtggcatcgcccacctcttcaaacagaataaagtcgtgcatgtcaacggctatggcaagattactggaaaaaaccaagtcactgctacaaaagccgacggggggactcaggtgatcgacaccaaaaacattctcattgcaacgggctctgaagtgactccttttcccgggatcaccatcgacgaagatacaattgtgagctcgacaggcgccctctcgctgaaaaaggtccctgaaaagatggttgttattggcgcgggagtgattggtgtagaacttggtagcgtgtggcagcgactgggtgccgacgtgaccgcagtcgagtttctcgggcacgtgggtggagttggaatagacatggagatctcgaagaattttcaaaggatccttcagaaacagggtttcaagttcaaacttaacaccaaagtcacaggagcaaccaaaaaatcagacggcaaaatagacgtgtctatagaggctgccagtgggggtaaggccgaggtgatcacatgtgacgtgctgctggtttgtattggacgccggcccttcaccaaaaacctggggctggaagagttgggcattgagctggacccccgggggagaatacccgtgaacactcgctttcaaaccaagatacccaacatctacgcgataggcgatgttgtcgccggtccaatgctcgcccataaagcagaggacgaggggatcatctgcgttgagggcatggccgggggggctgtccacattgattacaactgtgtgccatccgtgatctatacccaccccgaagtggcttgggttggaaagagcgaagaacaactcaaggaggaaggcatcgagtataaagtggggaaatttccatttgccgccaactctagagcgaagacgaatgccgacacggatggtatggttaaaattctagggcagaaaagtactgaccgggtgctgggagcccatatcctgggccctggtgccggtgagatggtcaatgaagccgcactggcactggaatacggggccagctgcgaagatattgcccgcgtatgccatgcacatccgacgttaagcgaggccttccgtgaagctaatttggccgcatcttttggaaagtcaataaatttttag

SEQ ID NO: 1760 - DNA, 1530 bp, Artificial Sequence
  derived and/or modified sequence
atgcagtcctggtctcgcgtgtattgttcgctagcaaagaggggccactttaaccgcatctcgcacggcctccagggcctttctgccgtgccactgcggacctatgccgatcagccaatcgacgctgacgtgaccgtgatcgggtctgggccaggggggtacgttgccgccatcaaagccgctcagctgggcttcaaaactgtatgtatcgagaaaaacgagacccttgggggtacatgtctgaatgtgggatgcattcccagcaaggctcttctcaacaactcacattactaccacatggcccacggaaaggacttcgcttcaagagggatcgagatgagtgaggtcagactcaacctggacaagatgatggagcagaagagcacggctgtgaaagctctgactggcgggatcgcccacctctttaagcagaataaagtcgtgcacgtgaacggctatggcaagattacaggcaagaatcaggtgacagccactaaagccgacgggggtacccaggtgattgatacgaagaatattctgattgcgacaggttctgaagtcactccgttcccaggcattaccattgacgaggacacaatagtgtccagtactggggcacttagtcttaaaaaggttcccgaaaagatggtggtgatcggggcaggcgtcattggtgttgaactgggatccgtgtggcagagactgggggccgatgtcacagctgtggaattcctggggcacgttggaggggtaggcattgacatggagatttcaaaaaattttcagagaattctgcagaaacaagggttcaaattcaaactcaatacaaaggtgaccggcgcgaccaaaaaatcagatgggaagatcgacgtcagcatcgaggccgcctctggagggaaagccgaagtgataacttgcgatgtgctgctggtctgcatcggaaggcgtccttttacaaagaatctgggtctcgaggagctcggcattgaattagacccacgaggtaggattccagttaatactcgctttcagaccaagatacccaatatctacgccattggtgatgtggtagccggtccaatgcttgctcataaagcggaagacgagggaatcatatgcgtcgagggcatggctgggggagccgttcatatagattacaactgtgtgccctccgttatttatacacacccggaggttgcctgggtcggaaaatcagaggaacaactaaaggaggaaggaattgagtacaaagtgggcaaattcccctttgccgctaatagccgcgctaagactaatgccgacacagatgggatggttaagatactcggtcagaagtccacagacagggtgttaggcgcccatatcttggggcccggcgcaggtgaaatggtgaacgaggctgcattggcattggagtatggggcaagctgtgaggacatcgcaagagtgtgtcatgcccacccaacactgtcagaagcattccgtgaagccaatctggccgcctccttcgggaaaagtattaacttctag

SEQ ID NO: 1761 - DNA, 1380 bp, Artificial Sequence
  derived and/or modified sequence
atgttgatttacgttgccgccattaaagctgctcagttggggtttaagacggtgtgtatcgagaagaatgagactctgggcggcacctgcctaaacgtgggatgtattccgagcaaggcgctgctcaacaattctcattattatcacatggcccacgggaaggacttcgcaagccggggtattgaaatgtctgaggtcaggctcaacctcgacaagatgatggaacagaaaagcaccgcagtaaaggccctgacgggaggcatcgctcatctattcaagcagaataaagtggtgcatgtcaacgggtacggtaagataaccggcaagaaccaggttacagccacgaaagccgacggcggtactcaggtaatcgacactaaaaacattctgatcgccaccggttccgaagtcactcccttccctgggataacaatcgacgaggacactatcgtctcttctacgggagcactatcacttaagaaggtcccagaaaagatggtggttatcggggctggagtgattggcgtggaactcggatcagtgtggcaacgactaggcgctgacgtgaccgctgtcgagtttctcggacacgtgggaggcgtcggtatcgatatggaaataagcaagaattttcagcgtatcctgcagaaacagggcttcaagttcaagctgaatacgaaggttactggcgccacaaagaaaagtgatgggaaaattgatgtttctatcgaggccgctagcggtggaaaagccgaggtgatcacttgtgacgtgttattagtgtgcattggtcgaagacccttcaccaaaaatctcggtttggaggagttaggcatcgaacttgacccccggggacggattccagtgaataccagattccagaccaagattcccaacatttatgcaattggagacgtcgtggccggcccaatgcttgcccataaggctgaggacgagggcataatctgcgttgagggaatggctgggggggcagttcacattgactacaactgtgtgccatcagtgatctacacacatcctgaagtggcatgggtggggaaatccgaggagcaactgaaagaggaaggaatcgaatacaaggttgggaaatttccgtttgcagccaattcccgggccaaaaccaacgcagataccgacgggatggtcaagatcctcggacagaaatctactgacagagtgctaggggcccatatcttagggccaggagccggagaaatggttaatgaagcagccctggccctagagtatggcgccagttgcgaagacattgcacgggtctgccacgctcaccccaccctgtccgaagctttccgcgaggcaaatcttgccgcatctttcggcaagtccatcaacttttag

SEQ ID NO: 1762 - DNA, 1530 bp, Artificial Sequence
  derived and/or modified sequence
atgcagagctggagccgggtgtactgcagcctggccaagaggggccacttcaaccgcatcagccacggcctgcagggcctgtctgctgtgcccctgcggacctacgccgaccagcccattgatgctgatgtgacagtgattggcagcggccctgggggctacgtggccgccatcaaggccgcccagctgggcttcaagacagtgtgcatcgagaagaatgagaccctgggcggcacctgcctgaatgtgggctgcatccccagcaaggccctgctgaacaacagccactactaccacatggcccacggcaaggactttgccagccggggcatcgagatgtctgaggtgcggctgaacctggacaagatgatggagcagaagagcacagctgtgaaggccctgactggaggcatcgcccacctgttcaagcagaacaaggtggtgcacgtgaatggctacggcaagatcaccgggaagaaccaggtgacagccaccaaggcagatggcggcacccaggtgattgacaccaagaacatcctgattgccactggaagtgaggtgacccccttccctggcatcaccattgatgaggacaccatcgtgagcagcactggagccctgagcctgaagaaggtgcctgagaagatggtggtgattggagctggggtcatcggcgtggagctgggctctgtgtggcagaggctgggcgcagatgtgacagctgtggagttcctgggccacgtgggcggcgtgggcatcgacatggagatcagcaagaacttccagaggatcctgcagaagcagggcttcaagttcaagctgaacaccaaggtgactggagccaccaagaagagtgatggcaagattgatgtgtccattgaagctgccagcggcggcaaggccgaggtgatcacctgtgatgtgctgctggtgtgcattggaagaagacccttcaccaagaacctgggcctggaggagctgggcatcgagctggacccccggggccgcatccctgtgaacacccgcttccagaccaagatccccaacatctatgccatcggagatgtggtggccggccccatgctggcccacaaggcagaagatgagggcatcatctgtgtggagggcatggccggcggcgctgtgcacatcgactacaactgtgtgcccagcgtcatctacacccaccctgaggtggcctgggtgggcaagtctgaggagcagctgaaggaggagggcatcgagtacaaggtgggcaagttcccctttgctgccaacagccgggccaagaccaatgctgacacagatggcatggtgaagatcctgggccagaagagcacagacagagtgctgggcgcccacatcctgggccctggggccggggagatggtgaatgaagctgccctggccctggagtatggagccagctgtgaggacatcgcccgggtgtgccacgcccaccccaccctgtctgaggccttccgggaggccaacctggccgccagctttgggaagagcatcaacttctag

SEQ ID NO: 1763 - DNA, 1380 bp, Artificial Sequence
  derived and/or modified sequence
atgctgatctacgtggccgccatcaaggccgcccagctgggcttcaagacagtgtgcatcgagaagaatgagaccctgggcggcacctgcctgaatgtgggctgcatccccagcaaggccctgctgaacaacagccactactaccacatggcccacggcaaggactttgccagccggggcatcgagatgtctgaggtgcggctgaacctggacaagatgatggagcagaagagcacagctgtgaaggccctgactggaggcatcgcccacctgttcaagcagaacaaggtggtgcacgtgaatggctacggcaagatcaccgggaagaaccaggtgacagccaccaaggcagatggcggcacccaggtgattgacaccaagaacatcctgattgccactggaagtgaggtgacccccttccctggcatcaccattgatgaggacaccatcgtgagcagcactggagccctgagcctgaagaaggtgcctgagaagatggtggtgattggagctggggtcatcggcgtggagctgggctctgtgtggcagaggctgggcgcagatgtgacagctgtggagttcctgggccacgtgggcggcgtgggcatcgacatggagatcagcaagaacttccagaggatcctgcagaagcagggcttcaagttcaagctgaacaccaaggtgactggagccaccaagaagagtgatggcaagattgatgtgtccattgaagctgccagcggcggcaaggccgaggtgatcacctgtgatgtgctgctggtgtgcattggaagaagacccttcaccaagaacctgggcctggaggagctgggcatcgagctggacccccggggccgcatccctgtgaacacccgcttccagaccaagatccccaacatctatgccatcggagatgtggtggccggccccatgctggcccacaaggcagaagatgagggcatcatctgtgtggagggcatggccggcggcgctgtgcacatcgactacaactgtgtgcccagcgtcatctacacccaccctgaggtggcctgggtgggcaagtctgaggagcagctgaaggaggagggcatcgagtacaaggtgggcaagttcccctttgctgccaacagccgggccaagaccaatgctgacacagatggcatggtgaagatcctgggccagaagagcacagacagagtgctgggcgcccacatcctgggccctggggccggggagatggtgaatgaagctgccctggccctggagtatggagccagctgtgaggacatcgcccgggtgtgccacgcccaccccaccctgtctgaggccttccgggaggccaacctggccgccagctttgggaagagcatcaacttctag

SEQ ID NO: 1764 - DNA, 1530 bp, Artificial Sequence
  derived and/or modified sequence
atgcagagctggagccgggtgtactgcagcctggccaagcggggccactttaatcgaatttcccatggtttgcaaggtttgtccgccgtaccgctgagaacctatgcagatcagccaatcgacgctgacgtgacagtgatcggctccgggccaggaggctacgtagcagccatcaaggccgctcaactcggttttaagacagtgtgcatagaaaagaacgaaacgcttggcgggacttgtctgaacgtaggctgtatccctagcaaagcgcttctgaacaatagccactactatcatatggcacatggaaaagattttgcttcccgaggaatcgaaatgtccgaagttcggctgaacctcgacaagatgatggaacagaagagcacagccgtgaaagcacttactggcggcattgcacatctgttcaaacagaacaaggttgttcatgttaacggctacggaaaaatcactggcaagaatcaggttaccgccacaaaagcagatggcggtacccaggttatagacactaaaaatattctaatagcaaccggttccgaggttacacctttccccgggatcaccattgatgaagatactatcgtaagttccaccggtgcactctccctgaagaaggtccctgagaaaatggttgttataggggcaggggtgatcggagtcgagctaggctcagtctggcaacgccttggggccgacgtaaccgctgtggaatttctagggcacgtgggtggagtaggcattgatatggaaatttctaaaaacttccagaggatcttgcaaaaacaaggatttaagttcaaactcaacacaaaggttaccggagctaccaagaaaagtgacgggaaaatcgatgtaagcatcgaagcagcctctggcggaaaggccgaggtaataacttgcgatgtcctgcttgtctgtattggccgcagaccctttacaaagaaccttgggctcgaagagctgggaatagaactggatccacgcgggagaattccagtcaacacccgctttcagactaagattcccaacatttacgccatcggggatgttgtggctggtccaatgctcgctcataaagcagaagatgaaggtatcatctgcgtggagggaatggctgggggggccgtccacatagactataactgtgtaccctcggtgatatatacccatcccgaggtcgcgtgggtaggaaaaagcgaggaacagctgaaggaggaaggaattgagtataaggtcggcaagtttccattcgccgccaactcacgtgccaagactaacgccgacaccgatgggatggttaagattctgggccagaaaagtaccgatagggtgctgggcgctcatatcctaggtcccggtgccggcgagatggtgaatgaggccgcattagccctggagtacggtgcgagttgcgaagacattgcgagagtatgccatgcacatccaacgctgtccgaggccttccgcgaggcgaacctggctgcttcttttggtaagtctatcaatttctag

SEQ ID NO: 1765 - DNA, 1530 bp, Artificial Sequence
  derived and/or modified sequence
atgcagagctggagccgggtgtactgcagcctggccaagcggggccacttcaatcggatctcacacggactccagggcctaagcgcggtgccattacgaacttatgccgaccagcctattgacgccgacgtgacagtcattggctccggacctggggggtacgtggccgccattaaagccgctcagctcggattcaaaaccgtgtgtatcgagaaaaatgagacgctaggtggtacctgcctgaacgtcggatgcattccctccaaggctctgctgaacaactcccactactaccatatggcacatggcaaggacttcgcttccagaggtatcgaaatgtccgaagtaaggttgaatctagataaaatgatggagcagaagtctactgccgtgaaagcactgactgggggtatagctcacttgtttaaacagaataaggtggtgcacgtgaatgggtacgggaagatcacggggaagaaccaggttactgccaccaaagccgatggagggacacaggtgatagacaccaaaaatatcctcattgccacagggtccgaagttaccccttttccaggcatcacaattgacgaagataccattgtgagcagtaccggcgctctctccctgaaaaaggtgcctgagaaaatggttgtgattggagctggggttataggcgtggagctgggaagcgtatggcagcggctgggtgccgatgtaacagctgtcgagtttctcggacatgtaggcggcgtaggcatcgacatggagatctcaaagaatttccagcggattctccagaagcaggggtttaaattcaagttgaacacaaaggtcacaggagcaaccaaaaagagtgacggcaagattgacgtgagtattgaggctgcatccggggggaaggctgaggtgatcacatgcgacgtcctgctggtgtgtatcggcagaaggccctttacgaagaatctcggcctagaggaattaggtatcgaactcgatccccgagggaggatacctgtgaacactaggttccagactaaaattcctaacatttatgccatcggagacgtggtcgccggtcctatgctggctcacaaggcagaagacgagggtatcatttgtgttgagggtatggccgggggagcggtgcacattgactacaactgtgtaccatccgtgatctacacacacccggaggtggcttgggttgggaagtccgaagaacaactaaaagaggaaggcattgagtacaaagttggaaaatttccattcgctgcaaacagccgggcgaaaacaaacgccgacactgatggaatggtgaagatccttggtcagaagtctaccgacagagtgctaggggcccatatcctgggccccggtgcgggggagatggtcaatgaggcagcacttgctttggagtacggcgcttcatgcgaggatattgcacgcgtttgccatgcgcatcctacgttaagtgaagcgtttagagaagccaacttagctgcatcatttggcaagtctataaatttctag

SEQ ID NO: 1766 - DNA, 1380 bp, Artificial Sequence
  derived and/or modified sequence
atgctgatctacgtggccgccatcaaggccgcccagctgggcttcaagacagtttgcattgagaagaacgagaccctcggcgggacctgtctcaatgtcggctgcattccatccaaggctctgctgaataacagccattactatcatatggctcacggcaaagatttcgcatccagaggaattgagatgtcagaggtgcggttaaacctggataagatgatggagcaaaagtccactgccgtgaaagctctaacaggcggcatcgcccacttattcaaacagaacaaagtggtacacgtgaatggttacggtaagatcactggaaaaaaccaggttactgcaactaaagccgatgggggtacgcaggtcattgacactaagaacatccttatcgctactggctccgaggttaccccctttcctggcattactatcgatgaagacaccatcgtctcctcgactggcgctctatccttgaagaaagtgccagagaagatggtggtgattggggcaggagtgataggagttgagctgggctcagtgtggcagcggctaggtgcagatgtcacagcagttgagttcctcggacacgtaggcggcgtcggcatagacatggagatttccaagaactttcagcggattctgcagaaacagggctttaagttcaaactaaatacgaaggtgactggagccaccaagaaaagcgacgggaagattgacgtttctatagaggcagctagcggtggcaaggctgaagtcataacctgcgacgtgttgctggtgtgcatcggtagaaggccattcaccaaaaatcttgggttggaggagcttggcatcgaactagaccccaggggacgcatccccgtgaatacgcggtttcagacgaagatccctaacatttacgccattggggacgttgtcgccggcccgatgttagcacacaaggccgaagacgaaggaatcatatgtgtggaaggtatggctggaggggccgttcacattgactataactgtgtgcccagcgtgatatacacgcatcctgaggtcgcctgggtcggaaaatccgaagagcaactcaaggaagagggaattgaatataaggttggcaaattcccatttgcggccaacagtagagcgaaaaccaatgctgatactgacggtatggtaaagattctggggcagaagtctacggatagggtccttggggcgcacattctgggtcctggggccggagagatggttaatgaagccgcgctggcacttgagtatggggcgtcatgtgaggacatcgctcgggtgtgccatgcgcatccaactctcagcgaggctttccgagaagccaatctggccgcaagcttcggcaaatccatcaatttttag

SEQ ID NO: 1767 - DNA, 1530 bp, Artificial Sequence
  derived and/or modified sequence
atgcagtcctggagcagggtgtactgctcgttggccaagaggggccacttcaacagaatttctcatggcctccagggcttgagtgccgtgcctttacggacgtacgccgatcaacccattgatgccgacgtaactgtgattggctccgggcctggtgggtacgtcgctgccatcaaggctgctcagctaggttttaagaccgtgtgcatcgagaagaacgagacccttggcggaacatgcctgaatgttggctgcatcccctctaaagccctgctgaacaactcacactattatcacatggcccatggcaaagattttgccagtcgtggcatcgagatgagtgaggtaagactcaacctggataaaatgatggagcaaaaatctacagccgtgaaggccctgacaggaggaatcgcacacttgttcaaacagaacaaagtggttcatgtgaacggttatggaaaaattacagggaagaatcaggtgactgctaccaaggcggacgggggtacccaagttatagatacaaagaatatcctgatcgccacagggagcgaagtcacaccttttcccggtattacaattgacgaagataccatagtcagctccactggcgcacttagcctgaaaaaagttcctgagaagatggtggtgataggagccggagtgattggcgtggaactggggtctgtttggcaacgcctgggtgccgacgtcaccgccgtggagttcctcggtcatgtcgggggagtgggtatcgacatggaaatctctaagaacttccagaggatcctgcagaagcagggctttaaatttaagctaaacaccaaagttacgggtgcaaccaagaaatctgacggaaaaattgatgtaagtattgaggccgcttctggaggcaaagccgaagttataacctgtgacgtgctactcgtttgcatcggtcgacgcccttttacgaagaatctggggctcgaggagttaggcattgaacttgatcctcggggtcgcattccagtaaacacgaggttccaaacaaagataccgaacatttatgcaataggagatgtggtggctggaccaatgcttgcccacaaggccgaggacgagggcatcatttgtgtcgagggaatggcagggggtgctgtccacatcgactacaactgcgtccctagcgtgatctacacgcacccagaggtcgcttgggttggcaagtctgaagaacaactgaaggaggaaggcattgagtacaaggtcggtaagttcccttttgccgcaaattctcgagccaaaaccaacgctgacactgacgggatggttaaaatcttgggccagaagtcgacagatagggtcctcggcgctcacatcctgggtccaggagccggagagatggtgaatgaggctgctctggctttagaatatggagcatcatgtgaggatatcgccagggtgtgccatgctcacccaacactgagcgaggctttccgggaggcgaatctggctgcatctttcgggaaatccatcaatttctag

SEQ ID NO: 1768 - DNA, 1530 bp, Artificial Sequence
  derived and/or modified sequence
atgcagagctggagccgggtctattgctcactggccaagcgcggtcatttcaatcgtatctcacatggccttcaaggtctgtctgcagtccccttaagaacttatgctgaccaaccaatcgatgctgacgtgaccgtgatcggctcaggccctgggggatacgtagctgcgatcaaggccgctcagctcgggtttaaaacagtgtgcatcgaaaagaatgaaacactgggcggtacttgcctcaacgtggggtgtatcccctcaaaggcactcctgaacaacagtcactattaccacatggcacacggaaaggattttgcctcaaggggtatagagatgagtgaggttcgcctcaatctagataagatgatggagcaaaaaagcaccgctgtgaaggcccttaccggcggaatcgcccatcttttcaagcagaacaaggtagtccatgttaatggttatggtaaaattacaggcaaaaaccaggtgacagcaaccaaagccgacggaggcacccaggtgatcgataccaaaaacatcctgattgccacgggctctgaagtgacaccatttcctggtatcacaatcgacgaagacaccatagtttcgtcgaccggcgctctctctttgaaaaaagttccagagaaaatggttgttataggggcaggtgttataggggtcgagcttggtagtgtatggcagcgtttgggtgcagacgtaactgcagtagagtttctgggacacgtgggtggggtcgggattgatatggaaatttcaaagaacttccaaagaatcttgcagaaacagggctttaagtttaaactaaataccaaagtcaccggagctacaaagaagagcgacggtaaaattgacgtcagcatagaagcagctagcggcggaaaagcagaagtcatcacttgcgacgtactgctagtgtgcatagggagaagaccattcactaaaaacctagggctggaagagctggggattgaactggatcccagggggagaatcccagtgaacacccgtttccagactaaaatccccaatatctacgccatcggagacgtcgtggccggacctatgcttgcccacaaggccgaggacgaaggcatcatatgcgtggagggaatggccggtggcgctgtccatattgattataactgcgtcccttcagtcatatacacccatccagaagtggcttgggtgggaaaaagcgaggagcagttaaaggaggaaggtatcgaatacaaagtgggcaagttccccttcgctgctaattcaagggccaagacaaacgcagatactgatggcatggttaaaatcctgggacagaagagtacagatcgggtcctcggggcacatatcctgggcccaggcgctggcgagatggttaatgaggctgccttagccctcgaatacggcgcttcttgcgaagacatcgccagggtttgccacgcacaccctaccctgtctgaggcattcagagaggccaatcttgcagcttctttcggcaagagcataaatttctag

SEQ ID NO: 1769 - DNA, 1380 bp, Artificial Sequence
  derived and/or modified sequence
atgctgatctacgtagccgctatcaaggccgcacagttgggcttcaagactgtctgcattgaaaagaatgaaaccctaggcggaacctgcctgaacgtcggatgtattcccagtaaagcattgctcaataacagccattattatcacatggcacacggcaaggactttgcaagcagagggatcgagatgagcgaggtgaggctgaatttggacaagatgatggaacagaagagcactgccgtgaaggccctcacaggtggcattgcccacttattcaagcagaataaggtggtacacgtgaatggttatggcaaaattaccggcaagaatcaggtgacagccacaaaagctgatgggggaacccaggtgattgacacgaagaatattctgatcgcaacggggtctgaggtaacccctttccctgggattacaattgatgaagacactatcgtgtcgtccacaggcgcactttccctaaaaaaagttcctgagaagatggtggttataggagccggagtgatcggagtggagctgggatccgtttggcagcgcctaggagctgacgtgaccgcagttgaatttctaggacatgtgggcggagtgggcattgacatggaaatctctaaaaacttccaaagaattctgcagaaacagggcttcaaattcaaattgaacacaaaagttaccggcgcaacaaagaaatcggacgggaagatcgatgtctccatcgaggcagcaagcggcggaaaggctgaagtgatcacatgcgatgtcctgctggtgtgcataggtcgcaggccttttaccaagaatctcgggcttgaagaactgggcatcgaattggacccaaggggccgaatccctgttaataccaggttccagaccaagatccctaatatctatgcgatcggagatgtggtggccggacccatgcttgcacataaggccgaagacgaaggaattatctgcgtagagggcatggccggaggcgctgtgcatatcgactacaactgtgtgccgtctgtgatctatacccatcccgaggtggcctgggtggggaaatcagaagagcaactcaaggaggaaggtattgagtacaaggtaggtaaattccctttcgctgctaattctcgggctaagacaaacgctgacacagatgggatggtgaagattctggggcaaaaatctacagacagggttctgggcgctcatattttggggcctggggcaggtgagatggtaaacgaggccgcattagccttagagtacggcgctagctgcgaggacattgcaagggtatgtcacgcgcacccaactctgagcgaagcttttagagaagctaacctagccgctagttttggcaagtcaataaacttttag

SEQ ID NO: 1770 - DNA, 1530 bp, Artificial Sequence
  derived and/or modified sequence
atgcagagctggagcagagtgtactgcagcctggccaagagaggccacttcaacagaatcagccacggcctgcagggcctgagcgccgtgcccctgagaacctacgccgaccagcccatcgacgccgacgtgaccgtgatcggcagcggccccggcggctacgtggccgccatcaaggccgcccagctgggcttcaagaccgtgtgcatcgagaagaacgagaccctgggcggcacctgcctgaacgtgggctgcatccccagcaaggccctgctgaacaacagccactactaccacatggcccacggcaaggacttcgccagcagaggcatcgagatgagcgaggtgagactgaacctggacaagatgatggagcagaagagcaccgccgtgaaggccctgaccggcggcatcgcccacctgttcaagcagaacaaggtggtgcacgtgaacggctacggcaagatcaccggcaagaaccaggtgaccgccaccaaggccgacggcggcacccaggtgatcgacaccaagaacatcctgatcgccaccggcagcgaggtgacccccttccccggcatcaccatcgacgaggacaccatcgtgagcagcaccggcgccctgagcctgaagaaggtgcccgagaagatggtggtgatcggcgccggcgtgatcggcgtggagctgggcagcgtgtggcagagactgggcgccgacgtgaccgccgtggagttcctgggccacgtgggcggcgtgggcatcgacatggagatcagcaagaacttccagagaatcctgcagaagcagggcttcaagttcaagctgaacaccaaggtgaccggcgccaccaagaagagcgacggcaagatcgacgtgagcatcgaggccgccagcggcggcaaggccgaggtgatcacctgcgacgtgctgctggtgtgcatcggcagaagacccttcaccaagaacctgggcctggaggagctgggcatcgagctggaccccagaggcagaatccccgtgaacaccagattccagaccaagatccccaacatctacgccatcggcgacgtggtggccggccccatgctggcccacaaggccgaggacgagggcatcatctgcgtggagggcatggccggcggcgccgtgcacatcgactacaactgcgtgcccagcgtgatctacacccaccccgaggtggcctgggtgggcaagagcgaggagcagctgaaggaggagggcatcgagtacaaggtgggcaagttccccttcgccgccaacagcagagccaagaccaacgccgacaccgacggcatggtgaagatcctgggccagaagagcaccgacagagtgctgggcgcccacatcctgggccccggcgccggcgagatggtgaacgaggccgccctggccctggagtacggcgccagctgcgaggacatcgccagagtgtgccacgcccaccccaccctgagcgaggccttcagagaggccaacctggccgccagcttcggcaagagcatcaacttctag

SEQ ID NO: 1771 - DNA, 1380 bp, Artificial Sequence
  derived and/or modified sequence
atgctgatctacgtggccgccatcaaggccgcccagctgggcttcaagaccgtgtgcatcgagaagaacgagaccctgggcggcacctgcctgaacgtgggctgcatccccagcaaggccctgctgaacaacagccactactaccacatggcccacggcaaggacttcgccagcagaggcatcgagatgagcgaggtgagactgaacctggacaagatgatggagcagaagagcaccgccgtgaaggccctgaccggcggcatcgcccacctgttcaagcagaacaaggtggtgcacgtgaacggctacggcaagatcaccggcaagaaccaggtgaccgccaccaaggccgacggcggcacccaggtgatcgacaccaagaacatcctgatcgccaccggcagcgaggtgacccccttccccggcatcaccatcgacgaggacaccatcgtgagcagcaccggcgccctgagcctgaagaaggtgcccgagaagatggtggtgatcggcgccggcgtgatcggcgtggagctgggcagcgtgtggcagagactgggcgccgacgtgaccgccgtggagttcctgggccacgtgggcggcgtgggcatcgacatggagatcagcaagaacttccagagaatcctgcagaagcagggcttcaagttcaagctgaacaccaaggtgaccggcgccaccaagaagagcgacggcaagatcgacgtgagcatcgaggccgccagcggcggcaaggccgaggtgatcacctgcgacgtgctgctggtgtgcatcggcagaagacccttcaccaagaacctgggcctggaggagctgggcatcgagctggaccccagaggcagaatccccgtgaacaccagattccagaccaagatccccaacatctacgccatcggcgacgtggtggccggccccatgctggcccacaaggccgaggacgagggcatcatctgcgtggagggcatggccggcggcgccgtgcacatcgactacaactgcgtgcccagcgtgatctacacccaccccgaggtggcctgggtgggcaagagcgaggagcagctgaaggaggagggcatcgagtacaaggtgggcaagttccccttcgccgccaacagcagagccaagaccaacgccgacaccgacggcatggtgaagatcctgggccagaagagcaccgacagagtgctgggcgcccacatcctgggccccggcgccggcgagatggtgaacgaggccgccctggccctggagtacggcgccagctgcgaggacatcgccagagtgtgccacgcccaccccaccctgagcgaggccttcagagaggccaacctggccgccagcttcggcaagagcatcaacttctag

SEQ ID NO: 1772 - DNA, 2467 bp, Artificial Sequence
  derived and/or modified sequence
agtataagaatacattgtagctcgacattttggcaccagcccctaaagcattcccaccaccacccccgctgcgacaaagccctgcgctccttacgacagcgtacgacgccgagcctgacaggaacgcctcgtgcggtagaaccgcgcgggccaatcgcgctgctcccgggtgatgacgtaggctgcgcctgtgcatgcgcagggaggggagaccttggcggagcggcggaggcgcccagcggaggtgaaagtattggcggaaaggaaaatacagcggaaaaatgcagagctggagtcgtgtgtactgctccttggccaagagaggccatttcaatcgaatatctcatggcctacagggactttctgcagtgcctctgagaacttacgcagatcagccgattgatgctgatgtaacagttataggttctggtcctggaggatatgttgctgctattaaagctgcccagttaggcttcaagacagtctgcattgagaaaaatgaaacacttggtggaacatgcttgaatgttggttgtattccttctaaggctttattgaacaactctcattattaccatatggcccatggaaaagattttgcatctagaggaattgaaatgtccgaagttcgcttgaatttagacaagatgatggagcagaagagtactgcagtaaaagctttaacaggtggaattgcccacttattcaaacagaataaggttgttcatgtcaatggatatggaaagataactggcaaaaatcaagtcactgctacgaaagctgatggcggcactcaggttattgatacaaagaacattcttatagccacgggttcagaagttactccttttcctggaatcacgatagatgaagatacaatagtgtcatctacaggtgctttatctttaaaaaaagttccagaaaagatggttgttattggtgcaggagtaataggtgtagaattgggttcagtttggcaaagacttggtgcagatgtgacagcagttgaatttttaggtcatgtaggtggagttggaattgatatggagatatctaaaaactttcaacgcatccttcaaaaacaggggtttaaatttaaattgaatacaaaggttactggtgctaccaagaagtcagatggaaaaattgatgtttctattgaagctgcttctggtggtaaagctgaagttatcacttgtgatgtactcttggtttgcattggccgacgaccctttactaagaatttgggactagaagagctgggaattgaactagatcccagaggtagaattccagtcaataccagatttcaaactaaaattccaaatatctatgccattggtgatgtagttgctggtccaatgctggctcacaaagcagaggatgaaggcattatctgtgttgaaggaatggctggtggtgctgtgcacattgactacaattgtgtgccatcagtgatttacacacaccctgaagttgcttgggttggcaaatcagaagagcagttgaaagaagagggtattgagtacaaagttgggaaattcccatttgctgctaacagcagagctaagacaaatgctgacacagatggcatggtgaagatccttgggcagaaatcgacagacagagtactgggagcacatattcttggaccaggtgctggagaaatggtaaatgaagctgctcttgctttggaatatggagcatcctgtgaagatatagctagagtctgtcatgcacatccgaccttatcagaagcttttagagaagcaaatcttgctgcgtcatttggcaaatcaatcaacttttgaattagaagattatatatatttttttctgaaatttcctgggagcttttgtagaagtcacattcctgaacaggatattctcacagctccaagaatttctaggactgaattatgaaacttttggaaggtatttaataggtttggacaaaatggaatactcttatatctatattttacataaatttagtattttgtttcagtgcactaatgtgtaagacaaaaagctacttattgtagcatcctggaatatctccgtcaactcatattttcatgctgttcatgaaagattcaatgcccctgaatttaaatagcttttttctctgatacagaaaagttgaattttacatggctggagctagaatttgatatgtgaacagttgtgtttgaagcacagtgatcaagttatttttaatttggttttcacattggaaacaagtcagtcattcagatatgattcaaatgtctataaaccgaactgatgtaagtaaacggtctctcacttgttttatttaacctctaaattctttcattttaggggtagcatttgtgttgaagaggttttaaagcttccattgttgtctgcaactctgaagggtaattatatagttacccaaattaagagagtctatttacggaactcaaatacgtgggcattcaaa

SEQ ID NO: 1773 - DNA, 2041 bp, Artificial Sequence
  derived and/or modified sequence
atgcgcagggaggggagaccttggcggagcggcggaggcgcccagcggaggtgaaagtattggcggaaaggaaaatacagcggaaaaatgcagagctggagtcgtgtgtactgctccttggccaagagaggccatttcaatcgaatatctcatggcctacagggactttctgcagtgcctctgagaacttacgcagatcagccgattgatgctgatgtaacagttataggttctggtcctggaggatatgttgctgctattaaagctgcccagttaggcttcaagacagtctgcattgagaaaaatgaaacacttggtggaacatgcttgaatgttggttgtattccttctaaggctttattgaacaactctcattattaccatatggcccatggaaaagattttgcatctagaggaattgaaatgtccgaagttcgcttgaatttagacaagatgatggagcagaagagtactgcagtaaaagctttaacaggtggaattgcccacttattcaaacagaataaggttgttcatgtcaatggatatggaaagataactggcaaaaatcaagtcactgctacgaaagctgatggcggcactcaggttattgatacaaagaacattcttatagccacgggttcagaagttactccttttcctggaatcacgatagatgaagatacaatagtgtcatctacaggtgctttatctttaaaaaaagttccagaaaagatggttgttattggtgcaggagtaataggtgtagaattgggttcagtttggcaaagacttggtgcagatgtgacagcagttgaatttttaggtcatgtaggtggagttggaattgatatggagatatctaaaaactttcaacgcatccttcaaaaacaggggtttaaatttaaattgaatacaaaggttactggtgctaccaagaagtcagatggaaaaattgatgtttctattgaagctgcttctggtggtaaagctgaagttatcacttgtgatgtactcttggtttgcattggccgacgaccctttactaagaatttgggactagaagagctgggaattgaactagatcccagaggtagaattccagtcaataccagatttcaaactaaaattccaaatatctatgccattggtgatgtagttgctggtccaatgctggctcacaaagcagaggatgaaggcattatctgtgttgaaggaatggctggtggtgctgtgcacattgactacaattgtgtgccatcagtgatttacacacaccctgaagttgcttgggttggcaaatcagaagagcagttgaaagaagagggtattgagtacaaagttgggaaattcccatttgctgctaacagcagagctaagacaaatgctgacacagatggcatggtgaagatccttgggcagaaatcgacagacagagtactgggagcacatattcttggaccaggtgctggagaaatggtaaatgaagctgctcttgctttggaatatggagcatcctgtgaagatatagctagagtctgtcatgcacatccgaccttatcagaagcttttagagaagcaaatcttgctgcgtcatttggcaaatcaatcaacttttgaattagaagattatatatatttttttctgaaatttcctgggagcttttgtagaagtcacattcctgaacaggatattctcacagctccaagaatttctaggactgaattatgaaacttttggaagcatttgtcttcaacagaatgtcttcagcactttgttttgcctcatctgccctcagttttgcttcagagacctaaatatgaagaataaattacccagggaagactttcattctttctaaaggagaccagaatattggaaatggctcaaaaatgatgttgaaaaactatgtacttggaatcatatgtctgggaaacaactttctcccattcaacaaagtattgtatcttacagactgcaagtattcagtatagagattcctaaacagtattctgatataaatagaactagcatttaaaattt

SEQ ID NO: 1774 - DNA, 1802 bp, Artificial Sequence
  derived and/or modified sequence
atgcgcagggaggggagaccttggcggagcggcggaggcgcccagcggaggtgaaagtattggcggaaaggaaaatacagcggaaaaatgcagagctggagtcgtgtgtactgctccttggccaagagaggccatttcaatcgaatatctcatggcctacagggactttctgcagtgcctctgagaacttacgcagatcagccgagctttattgaacaactctcattattaccatatggcccatggaaaagattttgcatctagaggaattgaaatgtccgaagttcgcttgaatttagacaagatgatggagcagaagagtactgcagtaaaagctttaacaggtggaattgcccacttattcaaacagaataaggttgttcatgtcaatggatatggaaagataactggcaaaaatcaagtcactgctacgaaagctgatggcggcactcaggttattgatacaaagaacattcttatagccacgggttcagaagttactccttttcctggaatcacgatagatgaagatacaatagtgtcatctacaggtgctttatctttaaaaaaagttccagaaaagatggttgttattggtgcaggagtaataggtgtagaattgggttcagtttggcaaagacttggtgcagatgtgacagcagttgaatttttaggtcatgtaggtggagttggaattgatatggagatatctaaaaactttcaacgcatccttcaaaaacaggggtttaaatttaaattgaatacaaaggttactggtgctaccaagaagtcagatggaaaaattgatgtttctattgaagctgcttctggtggtaaagctgaagttatcacttgtgatgtactcttggtttgcattggccgacgaccctttactaagaatttgggactagaagagctgggaattgaactagatcccagaggtagaattccagtcaataccagatttcaaactaaaattccaaatatctatgccattggtgatgtagttgctggtccaatgctggctcacaaagcagaggatgaaggcattatctgtgttgaaggaatggctggtggtgctgtgcacattgactacaattgtgtgccatcagtgatttacacacaccctgaagttgcttgggttggcaaatcagaagagcagttgaaagaagagggtattgagtacaaagttgggaaattcccatttgctgctaacagcagagctaagacaaatgctgacacagatggcatggtgaagatccttgggcagaaatcgacagacagagtactgggagcacatattcttggaccaggtgctggagaaatggtaaatgaagctgctcttgctttggaatatggagcatcctgtgaagatatagctagagtctgtcatgcacatccgaccttatcagaagcttttagagaagcaaatcttgctgcgtcatttggcaaatcaatcaacttttgaattagaagattatatatatttttttctgaaatttcctgggagcttttgtagaagtcacattcctgaacaggatattctcacagctccaagaatttctaggactgaattatgaaacttttggaaggtatttaataggtttggacaaaatggaatactcttatatctatattttacataaatttagtattttgtttcagtgcactaatgtgtaagacaaaaagctacttattgtagcatcctggaatatctccgtcaactcatattttcatgctgttcatgaaagattcaatgcccctgaatttaaatagcttttttctctgatacagaaaagttg

SEQ ID NO: 1775 - DNA, 1863 bp, Artificial Sequence
  derived and/or modified sequence
atgctgatatatgttgctgctattaaagctgcccagttaggcttcaagacagtctgcattgagaaaaatgaaacacttggtggaacatgcttgaatgttggttgtattccttctaaggctttattgaacaactctcattattaccatatggcccatggaaaagattttgcatctagaggaattgaaatgtccgaagttcgcttgaatttagacaagatgatggagcagaagagtactgcagtaaaagctttaacaggtggaattgcccacttattcaaacagaataaggttgttcatgtcaatggatatggaaagataactggcaaaaatcaagtcactgctacgaaagctgatggcggcactcaggttattgatacaaagaacattcttatagccacgggttcagaagttactccttttcctggaatcacgatagatgaagatacaatagtgtcatctacaggtgctttatctttaaaaaaagttccagaaaagatggttgttattggtgcaggagtaataggtgtagaattgggttcagtttggcaaagacttggtgcagatgtgacagcagttgaatttttaggtcatgtaggtggagttggaattgatatggagatatctaaaaactttcaacgcatccttcaaaaacaggggtttaaatttaaattgaatacaaaggttactggtgctaccaagaagtcagatggaaaaattgatgtttctattgaagctgcttctggtggtaaagctgaagttatcacttgtgatgtactcttggtttgcattggccgacgaccctttactaagaatttgggactagaagagctgggaattgaactagatcccagaggtagaattccagtcaataccagatttcaaactaaaattccaaatatctatgccattggtgatgtagttgctggtccaatgctggctcacaaagcagaggatgaaggcattatctgtgttgaaggaatggctggtggtgctgtgcacattgactacaattgtgtgccatcagtgatttacacacaccctgaagttgcttgggttggcaaatcagaagagcagttgaaagaagagggtattgagtacaaagttgggaaattcccatttgctgctaacagcagagctaagacaaatgctgacacagatggcatggtgaagatccttgggcagaaatcgacagacagagtactgggagcacatattcttggaccaggtgctggagaaatggtaaatgaagctgctcttgctttggaatatggagcatcctgtgaagatatagctagagtctgtcatgcacatccgaccttatcagaagcttttagagaagcaaatcttgctgcgtcatttggcaaatcaatcaacttttgaattagaagattatatatatttttttctgaaatttcctgggagcttttgtagaagtcacattcctgaacaggatattctcacagctccaagaatttctaggactgaattatgaaacttttggaaggtatttaataggtttggacaaaatggaatactcttatatctatattttacataaatttagtattttgtttcagtgcactaatgtgtaagacaaaaagctacttattgtagcatcctggaatatctccgtcaactcatattttcatgctgttcatgaaagattcaatgcccctgaatttaaatagcttttttctctgatacagaaaagttgaattttacatggctggagctagaatttgatatgtgaacagttgtgtttgaagcacagtgatcaagttatttttaatttggttttcacattggaaacaagtcagtcattcagatatgattcaaatgtctataaaccgaactgatgtaagt

SEQ ID NO: 1776 - protein, 617 aa, Artificial Sequence
  derived and/or modified sequence
MREQLKGHETQTTCWDHPKMTELYQSLADLNNVRFSAYRTAMKLRRLQKALCLDLLSLSAACDALDQHNLKQNDQPMDILQIINCLTTIYDRLEQEHNNLVNVPLCVDMCLNWLLNVYDTGRTGRIRVLSFKTGIISLCKAHLEDKYRYLFKQVASSTGFCDQRRLGLLLHDSIQIPRQLGEVASFGGSNIEPSVRSCFQFANNKPEIEAALFLDWMRLEPQSMVWLPVLHRVAAAETAKHQAKCNICKECPIIGFRYRSLKHFNYDICQSCFFSGRVAKGHKMHYPMVEYCTPTTSGEDVRDFAKVLKNKFRTKRYFAKHPRMGYLPVQTVLEGDNMETPVTLINFWPVDSAPASSPQLSHDDTHSRIEHYASRLAEMENSNGSYLNDSISPNESIDDEHLLIQHYCQSLNQDSPLSQPRSPAQILISLESEERGELERILADLEEENRNLQAEYDRLKQQHEHKGLSPLPSPPEMMPTSPQSPRDAELIAEAKLLRQHKGRLEARMQILEDHNKQLESQLHRLRQLLEQPQAEAKVNGTTVSSPSTSLQRSDSSQPMLLRVVGSQTSDSMGEEDLLSPPQDTSTGLEEVMEQLNNSFPSSRGRNTPGKPMREDTM

SEQ ID NO: 1777 - DNA, 14069 bp, Artificial Sequence
  derived and/or modified sequence
cgttaaatgcaaacgctgctctggctcatgtgtttgctccgaggtataggttttgttcgactgacgtatcagatagtcagagtggttaccacaccgacgttgtagcagctgcataataaatgactgaaagaatcatgttaggcatgcccacctaacctaacttgaatcatgcgaaaggggagctgttggaattcaaatagactttctggttcccagcagtcggcagtaatagaatgctttcaggaagatgacagaatcaggagaaagatgctgttttgcactatcttgatttgttacagcagccaacttattggcatgatggagtgacaggaaaaacagctggcatggaagatgaaagagaagatgttcaaaagaaaacattcacaaaatgggtaaatgcacaattttctaagtttgggaagcagcatattgagaacctcttcagtgacctacaggatgggaggcgcctcctagacctcctcgaaggcctgacagggcaaaaactgccaaaagaaaaaggatccacaagagttcatgccctgaacaatgtcaacaaggcactgcgggttttgcagaacaataatgttgatttagtgaatattggaagtactgacatcgtagatggaaatcataaactgactcttggtttgatttggaatataatcctccactggcaggtcaaaaatgtaatgaaaaatatcatggctggattgcaacaaaccaacagtgaaaagattctcctgagctgggtccgacaatcaactcgtaattatccacaggttaatgtaatcaacttcaccaccagctggtctgatggcctggctttgaatgctctcatccatagtcataggccagacctatttgactggaatagtgtggtttgccagcagtcagccacacaacgactggaacatgcattcaacatcgccagatatcaattaggcatagagaaactactcgatcctgaagatgttgataccacctatccagataagaagtccatcttaatgtacatcacatcactcttccaagttttgcctcaacaagtgagcattgaagccatccaggaagtggaaatgttgccaaggccacctaaagtgactaaagaagaacattttcagttacatcatcaaatgcactattctcaacagatcacggtcagtctagcacagggatatgagagaacttcttcccctaagcctcgattcaagagctatgcctacacacaggctgcttatgtcaccacctctgaccctacacggagcccatttccttcacagcatttggaagctcctgaagacaagtcatttggcagttcattgatggagagtgaagtaaacctggaccgttatcaaacagctttagaagaagtattatcgtggcttctttctgctgaggacacattgcaagcacaaggagagatttctaatgatgtggaagtggtgaaagaccagtttcatactcatgaggggtacatgatggatttgacagcccatcagggccgggttggtaatattctacaattgggaagtaagctgattggaacaggaaaattatcagaagatgaagaaactgaagtacaagagcagatgaatctcctaaattcaagatgggaatgcctcagggtagctagcatggaaaaacaaagcaatttacatagagttttaatggatctccagaatcagaaactgaaagagttgaatgactggctaacaaaaacagaagaaagaacaaggaaaatggaggaagagcctcttggacctgatcttgaagacctaaaacgccaagtacaacaacataaggtgcttcaagaagatctagaacaagaacaagtcagggtcaattctctcactcacatggtggtggtagttgatgaatctagtggagatcacgcaactgctgctttggaagaacaacttaaggtattgggagatcgatgggcaaacatctgtagatggacagaagaccgctgggttcttttacaagacatccttctcaaatggcaacgtcttactgaagaacagtgcctttttagtgcatggctttcagaaaaagaagatgcagtgaacaagattcacacaactggctttaaagatcaaaatgaaatgttatcaagtcttcaaaaactggccgttttaaaagcggatctagaaaagaaaaagcaatccatgggcaaactgtattcactcaaacaagatcttctttcaacactgaagaataagtcagtgacccagaagacggaagcatggctggataactttgcccggtgttgggataatttagtccaaaaacttgaaaagagtacagcacagatttcacaggctgtcaccaccactcagccatcactaacacagacaactgtaatggaaacagtaactacggtgaccacaagggaacagatcctggtaaagcatgctcaagaggaacttccaccaccacctccccaaaagaagaggcagattactgtggattctgaaattaggaaaaggttggatgttgatataactgaacttcacagctggattactcgctcagaagctgtgttgcagagtcctgaatttgcaatctttcggaaggaaggcaacttctcagacttaaaagaaaaagtcaatgccatagagcgagaaaaagctgagaagttcagaaaactgcaagatgccagcagatcagctcaggccctggtggaacagatggtgaatgagggtgttaatgcagatagcatcaaacaagcctcagaacaactgaacagccggtggatcgaattctgccagttgctaagtgagagacttaactggctggagtatcagaacaacatcatcgctttctataatcagctacaacaattggagcagatgacaactactgctgaaaactggttgaaaatccaacccaccaccccatcagagccaacagcaattaaaagtcagttaaaaatttgtaaggatgaagtcaaccggctatcaggtcttcaacctcaaattgaacgattaaaaattcaaagcatagccctgaaagagaaaggacaaggacccatgttcctggatgcagactttgtggcctttacaaatcattttaagcaagtcttttctgatgtgcaggccagagagaaagagctacagacaatttttgacactttgccaccaatgcgctatcaggagaccatgagtgccatcaggacatgggtccagcagtcagaaaccaaactctccatacctcaacttagtgtcaccgactatgaaatcatggagcagagactcggggaattgcaggctttacaaagttctctgcaagagcaacaaagtggcctatactatctcagcaccactgtgaaagagatgtcgaagaaagcgccctctgaaattagccggaaatatcaatcagaatttgaagaaattgagggacgctggaagaagctctcctcccagctggttgagcattgtcaaaagctagaggagcaaatgaataaactccgaaaaattcagaatcacatacaaaccctgaagaaatggatggctgaagttgatgtttttctgaaggaggaatggcctgcccttggggattcagaaattctaaaaaagcagctgaaacagtgcagacttttagtcagtgatattcagacaattcagcccagtctaaacagtgtcaatgaaggtgggcagaagataaagaatgaagcagagccagagtttgcttcgagacttgagacagaactcaaagaacttaacactcagtgggatcacatgtgccaacaggtctatgccagaaaggaggccttgaagggaggtttggagaaaactgtaagcctccagaaagatctatcagagatgcacgaatggatgacacaagctgaagaagagtatcttgagagagattttgaatataaaactccagatgaattacagaaagcagttgaagagatgaagagagctaaagaagaggcccaacaaaaagaagcgaaagtgaaactccttactgagtctgtaaatagtgtcatagctcaagctccacctgtagcacaagaggccttaaaaaaggaacttgaaactctaaccaccaactaccagtggctctgcactaggctgaatgggaaatgcaagactttggaagaagtttgggcatgttggcatgagttattgtcatacttggagaaagcaaacaagtggctaaatgaagtagaatttaaacttaaaaccactgaaaacattcctggcggagctgaggaaatctctgaggtgctagattcacttgaaaatttgatgcgacattcagaggataacccaaatcagattcgcatattggcacagaccctaacagatggcggagtcatggatgagctaatcaatgaggaacttgagacatttaattctcgttggagggaactacatgaagaggctgtaaggaggcaaaagttgcttgaacagagcatccagtctgcccaggagactgaaaaatccttacacttaatccaggagtccctcacattcattgacaagcagttggcagcttatattgcagacaaggtggacgcagctcaaatgcctcaggaagcccagaaaatccaatctgatttgacaagtcatgagatcagtttagaagaaatgaagaaacataatcaggggaaggaggctgcccaaagagtcctgtctcagattgatgttgcacagaaaaaattacaagatgtctccatgaagtttcgattattccagaaaccagccaattttgagcagcgtctacaagaaagtaagatgattttagatgaagtgaagatgcacttgcctgcattggaaacaaagagtgtggaacaggaagtagtacagtcacagctaaatcattgtgtgaacttgtataaaagtctgagtgaagtgaagtctgaagtggaaatggtgataaagactggacgtcagattgtacagaaaaagcagacggaaaatcccaaagaacttgatgaaagagtaacagctttgaaattgcattataatgagctgggagcaaaggtaacagaaagaaagcaacagttggagaaatgcttgaaattgtcccgtaagatgcgaaaggaaatgaatgtcttgacagaatggctggcagctacagatatggaattgacaaagagatcagcagttgaaggaatgcctagtaatttggattctgaagttgcctggggaaaggctactcaaaaagagattgagaaacagaaggtgcacctgaagagtatcacagaggtaggagaggccttgaaaacagttttgggcaagaaggagacgttggtggaagataaactcagtcttctgaatagtaactggatagctgtcacctcccgagcagaagagtggttaaatcttttgttggaataccagaaacacatggaaacttttgaccagaatgtggaccacatcacaaagtggatcattcaggctgacacacttttggatgaatcagagaaaaagaaaccccagcaaaaagaagacgtgcttaagcgtttaaaggcagaactgaatgacatacgcccaaaggtggactctacacgtgaccaagcagcaaacttgatggcaaaccgcggtgaccactgcaggaaattagtagagccccaaatctcagagctcaaccatcgatttgcagccatttcacacagaattaagactggaaaggcctccattcctttgaaggaattggagcagtttaactcagatatacaaaaattgcttgaaccactggaggctgaaattcagcagggggtgaatctgaaagaggaagacttcaataaagatatgaatgaagacaatgagggtactgtaaaagaattgttgcaaagaggagacaacttacaacaaagaatcacagatgagagaaagcgagaggaaataaagataaaacagcagctgttacagacaaaacataatgctctcaaggatttgaggtctcaaagaagaaaaaaggctctagaaatttctcatcagtggtatcagtacaagaggcaggctgatgatctcctgaaatgcttggatgacattgaaaaaaaattagccagcctacctgagcccagagatgaaaggaaaataaaggaaattgatcgggaattgcagaagaagaaagaggagctgaatgcagtgcgtaggcaagctgagggcttgtctgaggatggggccgcaatggcagtggagccaactcagatccagctcagcaagcgctggcgggaaattgagagcaaatttgctcagtttcgaagactcaactttgcacaaattcacactgtccgtgaagaaacgatgatggtgatgactgaagacatgcctttggaaatttcttatgtgccttctacttatttgactgaaatcactcatgtctcacaagccctattagaagtggaacaacttctcaatgctcctgacctctgtgctaaggactttgaagatctctttaagcaagaggagtctctgaagaatataaaagatagtctacaacaaagctcaggtcggattgacattattcatagcaagaagacagcagcattgcaaagtgcaacgcctgtggaaagggtgaagctacaggaagctctctcccagcttgatttccaatgggaaaaagttaacaaaatgtacaaggaccgacaagggcgatttgacagatctgttgagaaatggcggcgttttcattatgatataaagatatttaatcagtggctaacagaagctgaacagtttctcagaaagacacaaattcctgagaattgggaacatgctaaatacaaatggtatcttaaggaactccaggatggcattgggcagcggcaaactgttgtcagaacattgaatgcaactggggaagaaataattcagcaatcctcaaaaacagatgccagtattctacaggaaaaattgggaagcctgaatctgcggtggcaggaggtctgcaaacagctgtcagacagaaaaaagaggctagaagaacaaaagaatatcttgtcagaatttcaaagagatttaaatgaatttgttttatggttggaggaagcagataacattgctagtatcccacttgaacctggaaaagagcagcaactaaaagaaaagcttgagcaagtcaagttactggtggaagagttgcccctgcgccagggaattctcaaacaattaaatgaaactggaggacccgtgcttgtaagtgctcccataagcccagaagagcaagataaacttgaaaataagctcaagcagacaaatctccagtggataaaggtttccagagctttacctgagaaacaaggagaaattgaagctcaaataaaagaccttgggcagcttgaaaaaaagcttgaagaccttgaagagcagttaaatcatctgctgctgtggttatctcctattaggaatcagttggaaatttataaccaaccaaaccaagaaggaccatttgacgttcaggaaactgaaatagcagttcaagctaaacaaccggatgtggaagagattttgtctaaagggcagcatttgtacaaggaaaaaccagccactcagccagtgaagaggaagttagaagatctgagctctgagtggaaggcggtaaaccgtttacttcaagagctgagggcaaagcagcctgacctagctcctggactgaccactattggagcctctcctactcagactgttactctggtgacacaacctgtggttactaaggaaactgccatctccaaactagaaatgccatcttccttgatgttggaggtacctgctctggcagatttcaaccgggcttggacagaacttaccgactggctttctctgcttgatcaagttataaaatcacagagggtgatggtgggtgaccttgaggatatcaacgagatgatcatcaagcagaaggcaacaatgcaggatttggaacagaggcgtccccagttggaagaactcattaccgctgcccaaaatttgaaaaacaagaccagcaatcaagaggctagaacaatcattacggatcgaattgaaagaattcagaatcagtgggatgaagtacaagaacaccttcagaaccggaggcaacagttgaatgaaatgttaaaggattcaacacaatggctggaagctaaggaagaagctgagcaggtcttaggacaggccagagccaagcttgagtcatggaaggagggtccctatacagtagatgcaatccaaaagaaaatcacagaaaccaagcagttggccaaagacctccgccagtggcagacaaatgtagatgtggcaaatgacttggccctgaaacttctccgggattattctgcagatgataccagaaaagtccacatgataacagagaatatcaatgcctcttggagaagcattcataaaagggtgagtgagcgagaggctgctttggaagaaactcatagattactgcaacagttccccctggacctggaaaagtttcttgcctggcttacagaagctgaaacaactgccaatgtcctacaggatgctacccgtaaggaaaggctcctagaagactccaagggagtaaaagagctgatgaaacaatggcaagacctccaaggtgaaattgaagctcacacagatgtttatcacaacctggatgaaaacagccaaaaaatcctgagatccctggaaggttccgatgatgcagtcctgttacaaagacgtttggataacatgaacttcaagtggagtgaacttcggaaaaagtctctcaacattaggtcccatttggaagccagttctgaccagtggaagcgtctgcacctttctctgcaggaacttctggtgtggctacagctgaaagatgatgaattaagccggcaggcacctattggaggcgactttccagcagttcagaagcagaacgatgtacatagggccttcaagagggaattgaaaactaaagaacctgtaatcatgagtactcttgagactgtacgaatatttctgacagagcagcctttggaaggactagagaaactctaccaggagcccagagagctgcctcctgaggagagagcccagaatgtcactcggcttctacgaaagcaggctgaggaggtcaatactgagtgggaaaaattgaacctgcactccgctgactggcagagaaaaatagatgagacccttgaaagactccaggaacttcaagaggccacggatgagctggacctcaagctgcgccaagctgaggtgatcaagggatcctggcagcccgtgggcgatctcctcattgactctctccaagatcacctcgagaaagtcaaggcacttcgaggagaaattgcgcctctgaaagagaacgtgagccacgtcaatgaccttgctcgccagcttaccactttgggcattcagctctcaccgtataacctcagcactctggaagacctgaacaccagatggaagcttctgcaggtggccgtcgaggaccgagtcaggcagctgcatgaagcccacagggactttggtccagcatctcagcactttctttccacgtctgtccagggtccctgggagagagccatctcgccaaacaaagtgccctactatatcaaccacgagactcaaacaacttgctgggaccatcccaaaatgacagagctctaccagtctttagctgacctgaataatgtcagattctcagcttataggactgccatgaaactccgaagactgcagaaggccctttgcttggatctcttgagcctgtcagctgcatgtgatgccttggaccagcacaacctcaagcaaaatgaccagcccatggatatcctgcagattattaattgtttgaccactatttatgaccgcctggagcaagagcacaacaatttggtcaacgtccctctctgcgtggatatgtgtctgaactggctgctgaatgtttatgatacgggacgaacagggaggatccgtgtcctgtcttttaaaactggcatcatttccctgtgtaaagcacatttggaagacaagtacagataccttttcaagcaagtggcaagttcaacaggattttgtgaccagcgcaggctgggcctccttctgcatgattctatccaaattccaagacagttgggtgaagttgcatcctttgggggcagtaacattgagccaagtgtccggagctgcttccaatttgctaataataagccagagatcgaagcggccctcttcctagactggatgagactggaaccccagtccatggtgtggctgcccgtcctgcacagagtggctgctgcagaaactgccaagcatcaggccaaatgtaacatctgcaaagagtgtccaatcattggattcaggtacaggagtctaaagcactttaattatgacatctgccaaagctgctttttttctggtcgagttgcaaaaggccataaaatgcactatcccatggtggaatattgcactccgactacatcaggagaagatgttcgagactttgccaaggtactaaaaaacaaatttcgaaccaaaaggtattttgcgaagcatccccgaatgggctacctgccagtgcagactgtcttagagggggacaacatggaaactcccgttactctgatcaacttctggccagtagattctgcgcctgcctcgtcccctcagctttcacacgatgatactcattcacgcattgaacattatgctagcaggctagcagaaatggaaaacagcaatggatcttatctaaatgatagcatctctcctaatgagagcatagatgatgaacatttgttaatccagcattactgccaaagtttgaaccaggactcccccctgagccagcctcgtagtcctgcccagatcttgatttccttagagagtgaggaaagaggggagctagagagaatcctagcagatcttgaggaagaaaacaggaatctgcaagcagaatatgaccgtctaaagcagcagcacgaacataaaggcctgtccccactgccgtcccctcctgaaatgatgcccacctctccccagagtccccgggatgctgagctcattgctgaggccaagctactgcgtcaacacaaaggccgcctggaagccaggatgcaaatcctggaagaccacaataaacagctggagtcacagttacacaggctaaggcagctgctggagcaaccccaggcagaggccaaagtgaatggcacaacggtgtcctctccttctacctctctacagaggtccgacagcagtcagcctatgctgctccgagtggttggcagtcaaacttcggactccatgggtgaggaagatcttctcagtcctccccaggacacaagcacagggttagaggaggtgatggagcaactcaacaactccttccctagttcaagaggaagaaatacccctggaaagccaatgagagaggacacaatgtaggaagtcttttccacatggcagatgatttgggcagagcgatggagtccttagtatcagtcatgacagatgaagaaggagcagaataaatgttttacaactcctgattcccgcatggtttttataatattcatacaacaaagaggattagacagtaagagtttacaagaaataaatctatatttttgtgaagggtagtggtattatactgtagatttcagtagtttctaagtctgttattgttttgttaacaatggcaggttttacacgtctatgcaattgtacaaaaaagttataagaaaactacatgtaaaatcttgatagctaaataacttgccatttctttatatggaacgcattttgggttgtttaaaaatttataacagttataaagaaagattgtaaactaaagtgtgctttataaaaaaaagttgtttataaaaacccctaaaaacaaaacaaacacacacacacacacatacacacacacacacaaaactttgaggcagcgcattgttttgcatccttttggcgtgatatccatatgaaattcatggctttttctttttttgcatattaaagataagacttcctctaccaccacaccaaatgactactacacactgctcatttgagaactgtcagctgagtggggcaggcttgagttttcatttcatatatctatatgtctataagtatataaatactatagttatatagataaagagatacgaatttctatagactgactttttccattttttaaatgttcatgtcacatcctaatagaaagaaattacttctagtcagtcatccaggcttacctgcttggtctagaatggatttttcccggagccggaagccaggaggaaactacaccacactaaaacattgtctacagctccagatgtttctcattttaaacaactttccactgacaacgaaagtaaagtaaagtattggatttttttaaagggaacatgtgaatgaatacacaggacttattatatcagagtgagtaatcggttggttggttgattgattgattgattgatacattcagcttcctgctgctagcaatgccacgatttagatttaatgatgcttcagtggaaatcaatcagaaggtattctgaccttgtgaacatcagaaggtattttttaactcccaagcagtagcaggacgatgatagggctggagggctatggattcccagcccatccctgtgaaggagtaggccactctttaagtgaaggattggatgattgttcataatacataaagttctctgtaattacaactaaattattatgccctcttctcacagtcaaaaggaactgggtggtttggtttttgttgcttttttagatttattgtcccatgtgggatgagtttttaaatgccacaagacataatttaaaataaataaactttgggaaaaggtgtaaaacagtagccccatcacatttgtgatactgacaggtatcaacccagaagcccatgaactgtgtttccatcctttgcatttctctgcgagtagttccacacaggtttgtaagtaagtaagaaagaaggcaaattgattcaaatgttacaaaaaaacccttcttggtggattagacaggttaaatatataaacaaacaaacaaaaattgctcaaaaaagaggagaaaagctcaagaggaaaagctaaggactggtaggaaaaagctttactctttcatgccattttatttctttttgatttttaaatcattcattcaatagataccaccgtgtgacctataattttgcaaatctgttacctctgacatcaagtgtaattagcttttggagagtgggctgacatcaagtgtaattagcttttggagagtgggttttgtccattattaataattaattaattaacatcaaacacggcttctcatgctatttctacctcactttggttttggggtgttcctgataattgtgcacacctgagttcacagcttcaccacttgtccattgcgttattttctttttcctttataattctttctttttccttcataattttcaaaagaaaacccaaagctctaaggtaacaaattaccaaattacatgaagatttggtttttgtcttgcatttttttcctttatgtgacgctggaccttttctttacccaaggatttttaaaactcagatttaaaacaaggggttactttacatcctactaagaagtttaagtaagtaagtttcattctaaaatcagaggtaaatagagtgcataaataattttgttttaatctttttgtttttcttttagacacattagctctggagtgagtctgtcataatatttgaacaaaaattgagagctttattgctgcattttaagcataattaatttggacattatttcgtgttgtgttctttataaccaccaagtattaaactgtaaatcataatgtaactgaagcataaacatcacatggcatgttttgtcattgttttcaggtactgagttcttacttgagtatcataatatattgtgttttaacaccaacactgtaacatttacgaattatttttttaaacttcagttttactgcattttcacaacatatcagacttcaccaaatatatgccttactattgtattatagtactgctttactgtgtatctcaataaagcacgcagttatgttac

SEQ ID NO: 1778 - DNA, 13764 bp, Artificial Sequence
  derived and/or modified sequence
tattacaaaagagtcaagaaattaaaaaagcaaaagtttataaataatgaaagagaagatgttcaaaagaaaacattcacaaaatgggtaaatgcacaattttctaagtttgggaagcagcatattgagaacctcttcagtgacctacaggatgggaggcgcctcctagacctcctcgaaggcctgacagggcaaaaactgccaaaagaaaaaggatccacaagagttcatgccctgaacaatgtcaacaaggcactgcgggttttgcagaacaataatgttgatttagtgaatattggaagtactgacatcgtagatggaaatcataaactgactcttggtttgatttggaatataatcctccactggcaggtcaaaaatgtaatgaaaaatatcatggctggattgcaacaaaccaacagtgaaaagattctcctgagctgggtccgacaatcaactcgtaattatccacaggttaatgtaatcaacttcaccaccagctggtctgatggcctggctttgaatgctctcatccatagtcataggccagacctatttgactggaatagtgtggtttgccagcagtcagccacacaacgactggaacatgcattcaacatcgccagatatcaattaggcatagagaaactactcgatcctgaagatgttgataccacctatccagataagaagtccatcttaatgtacatcacatcactcttccaagttttgcctcaacaagtgagcattgaagccatccaggaagtggaaatgttgccaaggccacctaaagtgactaaagaagaacattttcagttacatcatcaaatgcactattctcaacagatcacggtcagtctagcacagggatatgagagaacttcttcccctaagcctcgattcaagagctatgcctacacacaggctgcttatgtcaccacctctgaccctacacggagcccatttccttcacagcatttggaagctcctgaagacaagtcatttggcagttcattgatggagagtgaagtaaacctggaccgttatcaaacagctttagaagaagtattatcgtggcttctttctgctgaggacacattgcaagcacaaggagagatttctaatgatgtggaagtggtgaaagaccagtttcatactcatgaggggtacatgatggatttgacagcccatcagggccgggttggtaatattctacaattgggaagtaagctgattggaacaggaaaattatcagaagatgaagaaactgaagtacaagagcagatgaatctcctaaattcaagatgggaatgcctcagggtagctagcatggaaaaacaaagcaatttacatagagttttaatggatctccagaatcagaaactgaaagagttgaatgactggctaacaaaaacagaagaaagaacaaggaaaatggaggaagagcctcttggacctgatcttgaagacctaaaacgccaagtacaacaacataaggtgcttcaagaagatctagaacaagaacaagtcagggtcaattctctcactcacatggtggtggtagttgatgaatctagtggagatcacgcaactgctgctttggaagaacaacttaaggtattgggagatcgatgggcaaacatctgtagatggacagaagaccgctgggttcttttacaagacatccttctcaaatggcaacgtcttactgaagaacagtgcctttttagtgcatggctttcagaaaaagaagatgcagtgaacaagattcacacaactggctttaaagatcaaaatgaaatgttatcaagtcttcaaaaactggccgttttaaaagcggatctagaaaagaaaaagcaatccatgggcaaactgtattcactcaaacaagatcttctttcaacactgaagaataagtcagtgacccagaagacggaagcatggctggataactttgcccggtgttgggataatttagtccaaaaacttgaaaagagtacagcacagatttcacaggctgtcaccaccactcagccatcactaacacagacaactgtaatggaaacagtaactacggtgaccacaagggaacagatcctggtaaagcatgctcaagaggaacttccaccaccacctccccaaaagaagaggcagattactgtggattctgaaattaggaaaaggttggatgttgatataactgaacttcacagctggattactcgctcagaagctgtgttgcagagtcctgaatttgcaatctttcggaaggaaggcaacttctcagacttaaaagaaaaagtcaatgccatagagcgagaaaaagctgagaagttcagaaaactgcaagatgccagcagatcagctcaggccctggtggaacagatggtgaatgagggtgttaatgcagatagcatcaaacaagcctcagaacaactgaacagccggtggatcgaattctgccagttgctaagtgagagacttaactggctggagtatcagaacaacatcatcgctttctataatcagctacaacaattggagcagatgacaactactgctgaaaactggttgaaaatccaacccaccaccccatcagagccaacagcaattaaaagtcagttaaaaatttgtaaggatgaagtcaaccggctatcaggtcttcaacctcaaattgaacgattaaaaattcaaagcatagccctgaaagagaaaggacaaggacccatgttcctggatgcagactttgtggcctttacaaatcattttaagcaagtcttttctgatgtgcaggccagagagaaagagctacagacaatttttgacactttgccaccaatgcgctatcaggagaccatgagtgccatcaggacatgggtccagcagtcagaaaccaaactctccatacctcaacttagtgtcaccgactatgaaatcatggagcagagactcggggaattgcaggctttacaaagttctctgcaagagcaacaaagtggcctatactatctcagcaccactgtgaaagagatgtcgaagaaagcgccctctgaaattagccggaaatatcaatcagaatttgaagaaattgagggacgctggaagaagctctcctcccagctggttgagcattgtcaaaagctagaggagcaaatgaataaactccgaaaaattcagaatcacatacaaaccctgaagaaatggatggctgaagttgatgtttttctgaaggaggaatggcctgcccttggggattcagaaattctaaaaaagcagctgaaacagtgcagacttttagtcagtgatattcagacaattcagcccagtctaaacagtgtcaatgaaggtgggcagaagataaagaatgaagcagagccagagtttgcttcgagacttgagacagaactcaaagaacttaacactcagtgggatcacatgtgccaacaggtctatgccagaaaggaggccttgaagggaggtttggagaaaactgtaagcctccagaaagatctatcagagatgcacgaatggatgacacaagctgaagaagagtatcttgagagagattttgaatataaaactccagatgaattacagaaagcagttgaagagatgaagagagctaaagaagaggcccaacaaaaagaagcgaaagtgaaactccttactgagtctgtaaatagtgtcatagctcaagctccacctgtagcacaagaggccttaaaaaaggaacttgaaactctaaccaccaactaccagtggctctgcactaggctgaatgggaaatgcaagactttggaagaagtttgggcatgttggcatgagttattgtcatacttggagaaagcaaacaagtggctaaatgaagtagaatttaaacttaaaaccactgaaaacattcctggcggagctgaggaaatctctgaggtgctagattcacttgaaaatttgatgcgacattcagaggataacccaaatcagattcgcatattggcacagaccctaacagatggcggagtcatggatgagctaatcaatgaggaacttgagacatttaattctcgttggagggaactacatgaagaggctgtaaggaggcaaaagttgcttgaacagagcatccagtctgcccaggagactgaaaaatccttacacttaatccaggagtccctcacattcattgacaagcagttggcagcttatattgcagacaaggtggacgcagctcaaatgcctcaggaagcccagaaaatccaatctgatttgacaagtcatgagatcagtttagaagaaatgaagaaacataatcaggggaaggaggctgcccaaagagtcctgtctcagattgatgttgcacagaaaaaattacaagatgtctccatgaagtttcgattattccagaaaccagccaattttgagcagcgtctacaagaaagtaagatgattttagatgaagtgaagatgcacttgcctgcattggaaacaaagagtgtggaacaggaagtagtacagtcacagctaaatcattgtgtgaacttgtataaaagtctgagtgaagtgaagtctgaagtggaaatggtgataaagactggacgtcagattgtacagaaaaagcagacggaaaatcccaaagaacttgatgaaagagtaacagctttgaaattgcattataatgagctgggagcaaaggtaacagaaagaaagcaacagttggagaaatgcttgaaattgtcccgtaagatgcgaaaggaaatgaatgtcttgacagaatggctggcagctacagatatggaattgacaaagagatcagcagttgaaggaatgcctagtaatttggattctgaagttgcctggggaaaggctactcaaaaagagattgagaaacagaaggtgcacctgaagagtatcacagaggtaggagaggccttgaaaacagttttgggcaagaaggagacgttggtggaagataaactcagtcttctgaatagtaactggatagctgtcacctcccgagcagaagagtggttaaatcttttgttggaataccagaaacacatggaaacttttgaccagaatgtggaccacatcacaaagtggatcattcaggctgacacacttttggatgaatcagagaaaaagaaaccccagcaaaaagaagacgtgcttaagcgtttaaaggcagaactgaatgacatacgcccaaaggtggactctacacgtgaccaagcagcaaacttgatggcaaaccgcggtgaccactgcaggaaattagtagagccccaaatctcagagctcaaccatcgatttgcagccatttcacacagaattaagactggaaaggcctccattcctttgaaggaattggagcagtttaactcagatatacaaaaattgcttgaaccactggaggctgaaattcagcagggggtgaatctgaaagaggaagacttcaataaagatatgaatgaagacaatgagggtactgtaaaagaattgttgcaaagaggagacaacttacaacaaagaatcacagatgagagaaagcgagaggaaataaagataaaacagcagctgttacagacaaaacataatgctctcaaggatttgaggtctcaaagaagaaaaaaggctctagaaatttctcatcagtggtatcagtacaagaggcaggctgatgatctcctgaaatgcttggatgacattgaaaaaaaattagccagcctacctgagcccagagatgaaaggaaaataaaggaaattgatcgggaattgcagaagaagaaagaggagctgaatgcagtgcgtaggcaagctgagggcttgtctgaggatggggccgcaatggcagtggagccaactcagatccagctcagcaagcgctggcgggaaattgagagcaaatttgctcagtttcgaagactcaactttgcacaaattcacactgtccgtgaagaaacgatgatggtgatgactgaagacatgcctttggaaatttcttatgtgccttctacttatttgactgaaatcactcatgtctcacaagccctattagaagtggaacaacttctcaatgctcctgacctctgtgctaaggactttgaagatctctttaagcaagaggagtctctgaagaatataaaagatagtctacaacaaagctcaggtcggattgacattattcatagcaagaagacagcagcattgcaaagtgcaacgcctgtggaaagggtgaagctacaggaagctctctcccagcttgatttccaatgggaaaaagttaacaaaatgtacaaggaccgacaagggcgatttgacagatctgttgagaaatggcggcgttttcattatgatataaagatatttaatcagtggctaacagaagctgaacagtttctcagaaagacacaaattcctgagaattgggaacatgctaaatacaaatggtatcttaaggaactccaggatggcattgggcagcggcaaactgttgtcagaacattgaatgcaactggggaagaaataattcagcaatcctcaaaaacagatgccagtattctacaggaaaaattgggaagcctgaatctgcggtggcaggaggtctgcaaacagctgtcagacagaaaaaagaggctagaagaacaaaagaatatcttgtcagaatttcaaagagatttaaatgaatttgttttatggttggaggaagcagataacattgctagtatcccacttgaacctggaaaagagcagcaactaaaagaaaagcttgagcaagtcaagttactggtggaagagttgcccctgcgccagggaattctcaaacaattaaatgaaactggaggacccgtgcttgtaagtgctcccataagcccagaagagcaagataaacttgaaaataagctcaagcagacaaatctccagtggataaaggtttccagagctttacctgagaaacaaggagaaattgaagctcaaataaaagaccttgggcagcttgaaaaaaagcttgaagaccttgaagagcagttaaatcatctgctgctgtggttatctcctattaggaatcagttggaaatttataaccaaccaaaccaagaaggaccatttgacgttcaggaaactgaaatagcagttcaagctaaacaaccggatgtggaagagattttgtctaaagggcagcatttgtacaaggaaaaaccagccactcagccagtgaagaggaagttagaagatctgagctctgagtggaaggcggtaaaccgtttacttcaagagctgagggcaaagcagcctgacctagctcctggactgaccactattggagcctctcctactcagactgttactctggtgacacaacctgtggttactaaggaaactgccatctccaaactagaaatgccatcttccttgatgttggaggtacctgctctggcagatttcaaccgggcttggacagaacttaccgactggctttctctgcttgatcaagttataaaatcacagagggtgatggtgggtgaccttgaggatatcaacgagatgatcatcaagcagaaggcaacaatgcaggatttggaacagaggcgtccccagttggaagaactcattaccgctgcccaaaatttgaaaaacaagaccagcaatcaagaggctagaacaatcattacggatcgaattgaaagaattcagaatcagtgggatgaagtacaagaacaccttcagaaccggaggcaacagttgaatgaaatgttaaaggattcaacacaatggctggaagctaaggaagaagctgagcaggtcttaggacaggccagagccaagcttgagtcatggaaggagggtccctatacagtagatgcaatccaaaagaaaatcacagaaaccaagcagttggccaaagacctccgccagtggcagacaaatgtagatgtggcaaatgacttggccctgaaacttctccgggattattctgcagatgataccagaaaagtccacatgataacagagaatatcaatgcctcttggagaagcattcataaaagggtgagtgagcgagaggctgctttggaagaaactcatagattactgcaacagttccccctggacctggaaaagtttcttgcctggcttacagaagctgaaacaactgccaatgtcctacaggatgctacccgtaaggaaaggctcctagaagactccaagggagtaaaagagctgatgaaacaatggcaagacctccaaggtgaaattgaagctcacacagatgtttatcacaacctggatgaaaacagccaaaaaatcctgagatccctggaaggttccgatgatgcagtcctgttacaaagacgtttggataacatgaacttcaagtggagtgaacttcggaaaaagtctctcaacattaggtcccatttggaagccagttctgaccagtggaagcgtctgcacctttctctgcaggaacttctggtgtggctacagctgaaagatgatgaattaagccggcaggcacctattggaggcgactttccagcagttcagaagcagaacgatgtacatagggccttcaagagggaattgaaaactaaagaacctgtaatcatgagtactcttgagactgtacgaatatttctgacagagcagcctttggaaggactagagaaactctaccaggagcccagagagctgcctcctgaggagagagcccagaatgtcactcggcttctacgaaagcaggctgaggaggtcaatactgagtgggaaaaattgaacctgcactccgctgactggcagagaaaaatagatgagacccttgaaagactccaggaacttcaagaggccacggatgagctggacctcaagctgcgccaagctgaggtgatcaagggatcctggcagcccgtgggcgatctcctcattgactctctccaagatcacctcgagaaagtcaaggcacttcgaggagaaattgcgcctctgaaagagaacgtgagccacgtcaatgaccttgctcgccagcttaccactttgggcattcagctctcaccgtataacctcagcactctggaagacctgaacaccagatggaagcttctgcaggtggccgtcgaggaccgagtcaggcagctgcatgaagcccacagggactttggtccagcatctcagcactttctttccacgtctgtccagggtccctgggagagagccatctcgccaaacaaagtgccctactatatcaaccacgagactcaaacaacttgctgggaccatcccaaaatgacagagctctaccagtctttagctgacctgaataatgtcagattctcagcttataggactgccatgaaactccgaagactgcagaaggccctttgcttggatctcttgagcctgtcagctgcatgtgatgccttggaccagcacaacctcaagcaaaatgaccagcccatggatatcctgcagattattaattgtttgaccactatttatgaccgcctggagcaagagcacaacaatttggtcaacgtccctctctgcgtggatatgtgtctgaactggctgctgaatgtttatgatacgggacgaacagggaggatccgtgtcctgtcttttaaaactggcatcatttccctgtgtaaagcacatttggaagacaagtacagataccttttcaagcaagtggcaagttcaacaggattttgtgaccagcgcaggctgggcctccttctgcatgattctatccaaattccaagacagttgggtgaagttgcatcctttgggggcagtaacattgagccaagtgtccggagctgcttccaatttgctaataataagccagagatcgaagcggccctcttcctagactggatgagactggaaccccagtccatggtgtggctgcccgtcctgcacagagtggctgctgcagaaactgccaagcatcaggccaaatgtaacatctgcaaagagtgtccaatcattggattcaggtacaggagtctaaagcactttaattatgacatctgccaaagctgctttttttctggtcgagttgcaaaaggccataaaatgcactatcccatggtggaatattgcactccgactacatcaggagaagatgttcgagactttgccaaggtactaaaaaacaaatttcgaaccaaaaggtattttgcgaagcatccccgaatgggctacctgccagtgcagactgtcttagagggggacaacatggaaactcccgttactctgatcaacttctggccagtagattctgcgcctgcctcgtcccctcagctttcacacgatgatactcattcacgcattgaacattatgctagcaggctagcagaaatggaaaacagcaatggatcttatctaaatgatagcatctctcctaatgagagcatagatgatgaacatttgttaatccagcattactgccaaagtttgaaccaggactcccccctgagccagcctcgtagtcctgcccagatcttgatttccttagagagtgaggaaagaggggagctagagagaatcctagcagatcttgaggaagaaaacaggaatctgcaagcagaatatgaccgtctaaagcagcagcacgaacataaaggcctgtccccactgccgtcccctcctgaaatgatgcccacctctccccagagtccccgggatgctgagctcattgctgaggccaagctactgcgtcaacacaaaggccgcctggaagccaggatgcaaatcctggaagaccacaataaacagctggagtcacagttacacaggctaaggcagctgctggagcaaccccaggcagaggccaaagtgaatggcacaacggtgtcctctccttctacctctctacagaggtccgacagcagtcagcctatgctgctccgagtggttggcagtcaaacttcggactccatgggtgaggaagatcttctcagtcctccccaggacacaagcacagggttagaggaggtgatggagcaactcaacaactccttccctagttcaagaggaagaaatacccctggaaagccaatgagagaggacacaatgtaggaagtcttttccacatggcagatgatttgggcagagcgatggagtccttagtatcagtcatgacagatgaagaaggagcagaataaatgttttacaactcctgattcccgcatggtttttataatattcatacaacaaagaggattagacagtaagagtttacaagaaataaatctatatttttgtgaagggtagtggtattatactgtagatttcagtagtttctaagtctgttattgttttgttaacaatggcaggttttacacgtctatgcaattgtacaaaaaagttataagaaaactacatgtaaaatcttgatagctaaataacttgccatttctttatatggaacgcattttgggttgtttaaaaatttataacagttataaagaaagattgtaaactaaagtgtgctttataaaaaaaagttgtttataaaaacccctaaaaacaaaacaaacacacacacacacacatacacacacacacacaaaactttgaggcagcgcattgttttgcatccttttggcgtgatatccatatgaaattcatggctttttctttttttgcatattaaagataagacttcctctaccaccacaccaaatgactactacacactgctcatttgagaactgtcagctgagtggggcaggcttgagttttcatttcatatatctatatgtctataagtatataaatactatagttatatagataaagagatacgaatttctatagactgactttttccattttttaaatgttcatgtcacatcctaatagaaagaaattacttctagtcagtcatccaggcttacctgcttggtctagaatggatttttcccggagccggaagccaggaggaaactacaccacactaaaacattgtctacagctccagatgtttctcattttaaacaactttccactgacaacgaaagtaaagtaaagtattggatttttttaaagggaacatgtgaatgaatacacaggacttattatatcagagtgagtaatcggttggttggttgattgattgattgattgatacattcagcttcctgctgctagcaatgccacgatttagatttaatgatgcttcagtggaaatcaatcagaaggtattctgaccttgtgaacatcagaaggtattttttaactcccaagcagtagcaggacgatgatagggctggagggctatggattcccagcccatccctgtgaaggagtaggccactctttaagtgaaggattggatgattgttcataatacataaagttctctgtaattacaactaaattattatgccctcttctcacagtcaaaaggaactgggtggtttggtttttgttgcttttttagatttattgtcccatgtgggatgagtttttaaatgccacaagacataatttaaaataaataaactttgggaaaaggtgtaaaacagtagccccatcacatttgtgatactgacaggtatcaacccagaagcccatgaactgtgtttccatcctttgcatttctctgcgagtagttccacacaggtttgtaagtaagtaagaaagaaggcaaattgattcaaatgttacaaaaaaacccttcttggtggattagacaggttaaatatataaacaaacaaacaaaaattgctcaaaaaagaggagaaaagctcaagaggaaaagctaaggactggtaggaaaaagctttactctttcatgccattttatttctttttgatttttaaatcattcattcaatagataccaccgtgtgacctataattttgcaaatctgttacctctgacatcaagtgtaattagcttttggagagtgggctgacatcaagtgtaattagcttttggagagtgggttttgtccattattaataattaattaattaacatcaaacacggcttctcatgctatttctacctcactttggttttggggtgttcctgataattgtgcacacctgagttcacagcttcaccacttgtccattgcgttattttctttttcctttataattctttctttttccttcataattttcaaaagaaaacccaaagctctaaggtaacaaattaccaaattacatgaagatttggtttttgtcttgcatttttttcctttatgtgacgctggaccttttctttacccaaggatttttaaaactcagatttaaaacaaggggttactttacatcctactaagaagtttaagtaagtaagtttcattctaaaatcagaggtaaatagagtgcataaataattttgttttaatctttttgtttttcttttagacacattagctctggagtgagtctgtcataatatttgaacaaaaattgagagctttattgctgcattttaagcataattaatttggacattatttcgtgttgtgttctttataaccaccaagtattaaactgtaaatcataatgtaactgaagcataaacatcacatggcatgttttgtcattgttttcaggtactgagttcttacttgagtatcataatatattgtgttttaacaccaacactgtaacatttacgaattatttttttaaacttcagttttactgcattttcacaacatatcagacttcaccaaatatatgccttactattgtattatagtactgctttactgtgtatctcaataaagcacgcagttatgttac

SEQ ID NO: 1779 - DNA, 14083 bp, Artificial Sequence
  derived and/or modified sequence
tgctgtctgtgaagctgaatctgtgagaacacctcactattcacggcaaccggagtggaagaaacaggtgcaaaaagattgtgtgtttgtctgcttttgtgaggctggtcagagattctgtgcctgctttatctgtgcttggctatgactctacctccaggtttaccataccccatagaatgtgtaagagaaaagtaccaacagggaaatcagcaaaaagctttcctatgaaggtgtgtagccagcctccgcagaatttgaaatgtctgaggtctcatctggtgagtaaaagctgcagataaatgcaacagccattcagaagaatgataaattccacaagcattcagaagcaggcttccctaaagatgaaagagaagatgttcaaaagaaaacattcacaaaatgggtaaatgcacaattttctaagtttgggaagcagcatattgagaacctcttcagtgacctacaggatgggaggcgcctcctagacctcctcgaaggcctgacagggcaaaaactgccaaaagaaaaaggatccacaagagttcatgccctgaacaatgtcaacaaggcactgcgggttttgcagaacaataatgttgatttagtgaatattggaagtactgacatcgtagatggaaatcataaactgactcttggtttgatttggaatataatcctccactggcaggtcaaaaatgtaatgaaaaatatcatggctggattgcaacaaaccaacagtgaaaagattctcctgagctgggtccgacaatcaactcgtaattatccacaggttaatgtaatcaacttcaccaccagctggtctgatggcctggctttgaatgctctcatccatagtcataggccagacctatttgactggaatagtgtggtttgccagcagtcagccacacaacgactggaacatgcattcaacatcgccagatatcaattaggcatagagaaactactcgatcctgaagatgttgataccacctatccagataagaagtccatcttaatgtacatcacatcactcttccaagttttgcctcaacaagtgagcattgaagccatccaggaagtggaaatgttgccaaggccacctaaagtgactaaagaagaacattttcagttacatcatcaaatgcactattctcaacagatcacggtcagtctagcacagggatatgagagaacttcttcccctaagcctcgattcaagagctatgcctacacacaggctgcttatgtcaccacctctgaccctacacggagcccatttccttcacagcatttggaagctcctgaagacaagtcatttggcagttcattgatggagagtgaagtaaacctggaccgttatcaaacagctttagaagaagtattatcgtggcttctttctgctgaggacacattgcaagcacaaggagagatttctaatgatgtggaagtggtgaaagaccagtttcatactcatgaggggtacatgatggatttgacagcccatcagggccgggttggtaatattctacaattgggaagtaagctgattggaacaggaaaattatcagaagatgaagaaactgaagtacaagagcagatgaatctcctaaattcaagatgggaatgcctcagggtagctagcatggaaaaacaaagcaatttacatagagttttaatggatctccagaatcagaaactgaaagagttgaatgactggctaacaaaaacagaagaaagaacaaggaaaatggaggaagagcctcttggacctgatcttgaagacctaaaacgccaagtacaacaacataaggtgcttcaagaagatctagaacaagaacaagtcagggtcaattctctcactcacatggtggtggtagttgatgaatctagtggagatcacgcaactgctgctttggaagaacaacttaaggtattgggagatcgatgggcaaacatctgtagatggacagaagaccgctgggttcttttacaagacatccttctcaaatggcaacgtcttactgaagaacagtgcctttttagtgcatggctttcagaaaaagaagatgcagtgaacaagattcacacaactggctttaaagatcaaaatgaaatgttatcaagtcttcaaaaactggccgttttaaaagcggatctagaaaagaaaaagcaatccatgggcaaactgtattcactcaaacaagatcttctttcaacactgaagaataagtcagtgacccagaagacggaagcatggctggataactttgcccggtgttgggataatttagtccaaaaacttgaaaagagtacagcacagatttcacaggctgtcaccaccactcagccatcactaacacagacaactgtaatggaaacagtaactacggtgaccacaagggaacagatcctggtaaagcatgctcaagaggaacttccaccaccacctccccaaaagaagaggcagattactgtggattctgaaattaggaaaaggttggatgttgatataactgaacttcacagctggattactcgctcagaagctgtgttgcagagtcctgaatttgcaatctttcggaaggaaggcaacttctcagacttaaaagaaaaagtcaatgccatagagcgagaaaaagctgagaagttcagaaaactgcaagatgccagcagatcagctcaggccctggtggaacagatggtgaatgagggtgttaatgcagatagcatcaaacaagcctcagaacaactgaacagccggtggatcgaattctgccagttgctaagtgagagacttaactggctggagtatcagaacaacatcatcgctttctataatcagctacaacaattggagcagatgacaactactgctgaaaactggttgaaaatccaacccaccaccccatcagagccaacagcaattaaaagtcagttaaaaatttgtaaggatgaagtcaaccggctatcaggtcttcaacctcaaattgaacgattaaaaattcaaagcatagccctgaaagagaaaggacaaggacccatgttcctggatgcagactttgtggcctttacaaatcattttaagcaagtcttttctgatgtgcaggccagagagaaagagctacagacaatttttgacactttgccaccaatgcgctatcaggagaccatgagtgccatcaggacatgggtccagcagtcagaaaccaaactctccatacctcaacttagtgtcaccgactatgaaatcatggagcagagactcggggaattgcaggctttacaaagttctctgcaagagcaacaaagtggcctatactatctcagcaccactgtgaaagagatgtcgaagaaagcgccctctgaaattagccggaaatatcaatcagaatttgaagaaattgagggacgctggaagaagctctcctcccagctggttgagcattgtcaaaagctagaggagcaaatgaataaactccgaaaaattcagaatcacatacaaaccctgaagaaatggatggctgaagttgatgtttttctgaaggaggaatggcctgcccttggggattcagaaattctaaaaaagcagctgaaacagtgcagacttttagtcagtgatattcagacaattcagcccagtctaaacagtgtcaatgaaggtgggcagaagataaagaatgaagcagagccagagtttgcttcgagacttgagacagaactcaaagaacttaacactcagtgggatcacatgtgccaacaggtctatgccagaaaggaggccttgaagggaggtttggagaaaactgtaagcctccagaaagatctatcagagatgcacgaatggatgacacaagctgaagaagagtatcttgagagagattttgaatataaaactccagatgaattacagaaagcagttgaagagatgaagagagctaaagaagaggcccaacaaaaagaagcgaaagtgaaactccttactgagtctgtaaatagtgtcatagctcaagctccacctgtagcacaagaggccttaaaaaaggaacttgaaactctaaccaccaactaccagtggctctgcactaggctgaatgggaaatgcaagactttggaagaagtttgggcatgttggcatgagttattgtcatacttggagaaagcaaacaagtggctaaatgaagtagaatttaaacttaaaaccactgaaaacattcctggcggagctgaggaaatctctgaggtgctagattcacttgaaaatttgatgcgacattcagaggataacccaaatcagattcgcatattggcacagaccctaacagatggcggagtcatggatgagctaatcaatgaggaacttgagacatttaattctcgttggagggaactacatgaagaggctgtaaggaggcaaaagttgcttgaacagagcatccagtctgcccaggagactgaaaaatccttacacttaatccaggagtccctcacattcattgacaagcagttggcagcttatattgcagacaaggtggacgcagctcaaatgcctcaggaagcccagaaaatccaatctgatttgacaagtcatgagatcagtttagaagaaatgaagaaacataatcaggggaaggaggctgcccaaagagtcctgtctcagattgatgttgcacagaaaaaattacaagatgtctccatgaagtttcgattattccagaaaccagccaattttgagcagcgtctacaagaaagtaagatgattttagatgaagtgaagatgcacttgcctgcattggaaacaaagagtgtggaacaggaagtagtacagtcacagctaaatcattgtgtgaacttgtataaaagtctgagtgaagtgaagtctgaagtggaaatggtgataaagactggacgtcagattgtacagaaaaagcagacggaaaatcccaaagaacttgatgaaagagtaacagctttgaaattgcattataatgagctgggagcaaaggtaacagaaagaaagcaacagttggagaaatgcttgaaattgtcccgtaagatgcgaaaggaaatgaatgtcttgacagaatggctggcagctacagatatggaattgacaaagagatcagcagttgaaggaatgcctagtaatttggattctgaagttgcctggggaaaggctactcaaaaagagattgagaaacagaaggtgcacctgaagagtatcacagaggtaggagaggccttgaaaacagttttgggcaagaaggagacgttggtggaagataaactcagtcttctgaatagtaactggatagctgtcacctcccgagcagaagagtggttaaatcttttgttggaataccagaaacacatggaaacttttgaccagaatgtggaccacatcacaaagtggatcattcaggctgacacacttttggatgaatcagagaaaaagaaaccccagcaaaaagaagacgtgcttaagcgtttaaaggcagaactgaatgacatacgcccaaaggtggactctacacgtgaccaagcagcaaacttgatggcaaaccgcggtgaccactgcaggaaattagtagagccccaaatctcagagctcaaccatcgatttgcagccatttcacacagaattaagactggaaaggcctccattcctttgaaggaattggagcagtttaactcagatatacaaaaattgcttgaaccactggaggctgaaattcagcagggggtgaatctgaaagaggaagacttcaataaagatatgaatgaagacaatgagggtactgtaaaagaattgttgcaaagaggagacaacttacaacaaagaatcacagatgagagaaagcgagaggaaataaagataaaacagcagctgttacagacaaaacataatgctctcaaggatttgaggtctcaaagaagaaaaaaggctctagaaatttctcatcagtggtatcagtacaagaggcaggctgatgatctcctgaaatgcttggatgacattgaaaaaaaattagccagcctacctgagcccagagatgaaaggaaaataaaggaaattgatcgggaattgcagaagaagaaagaggagctgaatgcagtgcgtaggcaagctgagggcttgtctgaggatggggccgcaatggcagtggagccaactcagatccagctcagcaagcgctggcgggaaattgagagcaaatttgctcagtttcgaagactcaactttgcacaaattcacactgtccgtgaagaaacgatgatggtgatgactgaagacatgcctttggaaatttcttatgtgccttctacttatttgactgaaatcactcatgtctcacaagccctattagaagtggaacaacttctcaatgctcctgacctctgtgctaaggactttgaagatctctttaagcaagaggagtctctgaagaatataaaagatagtctacaacaaagctcaggtcggattgacattattcatagcaagaagacagcagcattgcaaagtgcaacgcctgtggaaagggtgaagctacaggaagctctctcccagcttgatttccaatgggaaaaagttaacaaaatgtacaaggaccgacaagggcgatttgacagatctgttgagaaatggcggcgttttcattatgatataaagatatttaatcagtggctaacagaagctgaacagtttctcagaaagacacaaattcctgagaattgggaacatgctaaatacaaatggtatcttaaggaactccaggatggcattgggcagcggcaaactgttgtcagaacattgaatgcaactggggaagaaataattcagcaatcctcaaaaacagatgccagtattctacaggaaaaattgggaagcctgaatctgcggtggcaggaggtctgcaaacagctgtcagacagaaaaaagaggctagaagaacaaaagaatatcttgtcagaatttcaaagagatttaaatgaatttgttttatggttggaggaagcagataacattgctagtatcccacttgaacctggaaaagagcagcaactaaaagaaaagcttgagcaagtcaagttactggtggaagagttgcccctgcgccagggaattctcaaacaattaaatgaaactggaggacccgtgcttgtaagtgctcccataagcccagaagagcaagataaacttgaaaataagctcaagcagacaaatctccagtggataaaggtttccagagctttacctgagaaacaaggagaaattgaagctcaaataaaagaccttgggcagcttgaaaaaaagcttgaagaccttgaagagcagttaaatcatctgctgctgtggttatctcctattaggaatcagttggaaatttataaccaaccaaaccaagaaggaccatttgacgttcaggaaactgaaatagcagttcaagctaaacaaccggatgtggaagagattttgtctaaagggcagcatttgtacaaggaaaaaccagccactcagccagtgaagaggaagttagaagatctgagctctgagtggaaggcggtaaaccgtttacttcaagagctgagggcaaagcagcctgacctagctcctggactgaccactattggagcctctcctactcagactgttactctggtgacacaacctgtggttactaaggaaactgccatctccaaactagaaatgccatcttccttgatgttggaggtacctgctctggcagatttcaaccgggcttggacagaacttaccgactggctttctctgcttgatcaagttataaaatcacagagggtgatggtgggtgaccttgaggatatcaacgagatgatcatcaagcagaaggcaacaatgcaggatttggaacagaggcgtccccagttggaagaactcattaccgctgcccaaaatttgaaaaacaagaccagcaatcaagaggctagaacaatcattacggatcgaattgaaagaattcagaatcagtgggatgaagtacaagaacaccttcagaaccggaggcaacagttgaatgaaatgttaaaggattcaacacaatggctggaagctaaggaagaagctgagcaggtcttaggacaggccagagccaagcttgagtcatggaaggagggtccctatacagtagatgcaatccaaaagaaaatcacagaaaccaagcagttggccaaagacctccgccagtggcagacaaatgtagatgtggcaaatgacttggccctgaaacttctccgggattattctgcagatgataccagaaaagtccacatgataacagagaatatcaatgcctcttggagaagcattcataaaagggtgagtgagcgagaggctgctttggaagaaactcatagattactgcaacagttccccctggacctggaaaagtttcttgcctggcttacagaagctgaaacaactgccaatgtcctacaggatgctacccgtaaggaaaggctcctagaagactccaagggagtaaaagagctgatgaaacaatggcaagacctccaaggtgaaattgaagctcacacagatgtttatcacaacctggatgaaaacagccaaaaaatcctgagatccctggaaggttccgatgatgcagtcctgttacaaagacgtttggataacatgaacttcaagtggagtgaacttcggaaaaagtctctcaacattaggtcccatttggaagccagttctgaccagtggaagcgtctgcacctttctctgcaggaacttctggtgtggctacagctgaaagatgatgaattaagccggcaggcacctattggaggcgactttccagcagttcagaagcagaacgatgtacatagggccttcaagagggaattgaaaactaaagaacctgtaatcatgagtactcttgagactgtacgaatatttctgacagagcagcctttggaaggactagagaaactctaccaggagcccagagagctgcctcctgaggagagagcccagaatgtcactcggcttctacgaaagcaggctgaggaggtcaatactgagtgggaaaaattgaacctgcactccgctgactggcagagaaaaatagatgagacccttgaaagactccaggaacttcaagaggccacggatgagctggacctcaagctgcgccaagctgaggtgatcaagggatcctggcagcccgtgggcgatctcctcattgactctctccaagatcacctcgagaaagtcaaggcacttcgaggagaaattgcgcctctgaaagagaacgtgagccacgtcaatgaccttgctcgccagcttaccactttgggcattcagctctcaccgtataacctcagcactctggaagacctgaacaccagatggaagcttctgcaggtggccgtcgaggaccgagtcaggcagctgcatgaagcccacagggactttggtccagcatctcagcactttctttccacgtctgtccagggtccctgggagagagccatctcgccaaacaaagtgccctactatatcaaccacgagactcaaacaacttgctgggaccatcccaaaatgacagagctctaccagtctttagctgacctgaataatgtcagattctcagcttataggactgccatgaaactccgaagactgcagaaggccctttgcttggatctcttgagcctgtcagctgcatgtgatgccttggaccagcacaacctcaagcaaaatgaccagcccatggatatcctgcagattattaattgtttgaccactatttatgaccgcctggagcaagagcacaacaatttggtcaacgtccctctctgcgtggatatgtgtctgaactggctgctgaatgtttatgatacgggacgaacagggaggatccgtgtcctgtcttttaaaactggcatcatttccctgtgtaaagcacatttggaagacaagtacagataccttttcaagcaagtggcaagttcaacaggattttgtgaccagcgcaggctgggcctccttctgcatgattctatccaaattccaagacagttgggtgaagttgcatcctttgggggcagtaacattgagccaagtgtccggagctgcttccaatttgctaataataagccagagatcgaagcggccctcttcctagactggatgagactggaaccccagtccatggtgtggctgcccgtcctgcacagagtggctgctgcagaaactgccaagcatcaggccaaatgtaacatctgcaaagagtgtccaatcattggattcaggtacaggagtctaaagcactttaattatgacatctgccaaagctgctttttttctggtcgagttgcaaaaggccataaaatgcactatcccatggtggaatattgcactccgactacatcaggagaagatgttcgagactttgccaaggtactaaaaaacaaatttcgaaccaaaaggtattttgcgaagcatccccgaatgggctacctgccagtgcagactgtcttagagggggacaacatggaaactcccgttactctgatcaacttctggccagtagattctgcgcctgcctcgtcccctcagctttcacacgatgatactcattcacgcattgaacattatgctagcaggctagcagaaatggaaaacagcaatggatcttatctaaatgatagcatctctcctaatgagagcatagatgatgaacatttgttaatccagcattactgccaaagtttgaaccaggactcccccctgagccagcctcgtagtcctgcccagatcttgatttccttagagagtgaggaaagaggggagctagagagaatcctagcagatcttgaggaagaaaacaggaatctgcaagcagaatatgaccgtctaaagcagcagcacgaacataaaggcctgtccccactgccgtcccctcctgaaatgatgcccacctctccccagagtccccgggatgctgagctcattgctgaggccaagctactgcgtcaacacaaaggccgcctggaagccaggatgcaaatcctggaagaccacaataaacagctggagtcacagttacacaggctaaggcagctgctggagcaaccccaggcagaggccaaagtgaatggcacaacggtgtcctctccttctacctctctacagaggtccgacagcagtcagcctatgctgctccgagtggttggcagtcaaacttcggactccatgggtgaggaagatcttctcagtcctccccaggacacaagcacagggttagaggaggtgatggagcaactcaacaactccttccctagttcaagaggaagaaatacccctggaaagccaatgagagaggacacaatgtaggaagtcttttccacatggcagatgatttgggcagagcgatggagtccttagtatcagtcatgacagatgaagaaggagcagaataaatgttttacaactcctgattcccgcatggtttttataatattcatacaacaaagaggattagacagtaagagtttacaagaaataaatctatatttttgtgaagggtagtggtattatactgtagatttcagtagtttctaagtctgttattgttttgttaacaatggcaggttttacacgtctatgcaattgtacaaaaaagttataagaaaactacatgtaaaatcttgatagctaaataacttgccatttctttatatggaacgcattttgggttgtttaaaaatttataacagttataaagaaagattgtaaactaaagtgtgctttataaaaaaaagttgtttataaaaacccctaaaaacaaaacaaacacacacacacacacatacacacacacacacaaaactttgaggcagcgcattgttttgcatccttttggcgtgatatccatatgaaattcatggctttttctttttttgcatattaaagataagacttcctctaccaccacaccaaatgactactacacactgctcatttgagaactgtcagctgagtggggcaggcttgagttttcatttcatatatctatatgtctataagtatataaatactatagttatatagataaagagatacgaatttctatagactgactttttccattttttaaatgttcatgtcacatcctaatagaaagaaattacttctagtcagtcatccaggcttacctgcttggtctagaatggatttttcccggagccggaagccaggaggaaactacaccacactaaaacattgtctacagctccagatgtttctcattttaaacaactttccactgacaacgaaagtaaagtaaagtattggatttttttaaagggaacatgtgaatgaatacacaggacttattatatcagagtgagtaatcggttggttggttgattgattgattgattgatacattcagcttcctgctgctagcaatgccacgatttagatttaatgatgcttcagtggaaatcaatcagaaggtattctgaccttgtgaacatcagaaggtattttttaactcccaagcagtagcaggacgatgatagggctggagggctatggattcccagcccatccctgtgaaggagtaggccactctttaagtgaaggattggatgattgttcataatacataaagttctctgtaattacaactaaattattatgccctcttctcacagtcaaaaggaactgggtggtttggtttttgttgcttttttagatttattgtcccatgtgggatgagtttttaaatgccacaagacataatttaaaataaataaactttgggaaaaggtgtaaaacagtagccccatcacatttgtgatactgacaggtatcaacccagaagcccatgaactgtgtttccatcctttgcatttctctgcgagtagttccacacaggtttgtaagtaagtaagaaagaaggcaaattgattcaaatgttacaaaaaaacccttcttggtggattagacaggttaaatatataaacaaacaaacaaaaattgctcaaaaaagaggagaaaagctcaagaggaaaagctaaggactggtaggaaaaagctttactctttcatgccattttatttctttttgatttttaaatcattcattcaatagataccaccgtgtgacctataattttgcaaatctgttacctctgacatcaagtgtaattagcttttggagagtgggctgacatcaagtgtaattagcttttggagagtgggttttgtccattattaataattaattaattaacatcaaacacggcttctcatgctatttctacctcactttggttttggggtgttcctgataattgtgcacacctgagttcacagcttcaccacttgtccattgcgttattttctttttcctttataattctttctttttccttcataattttcaaaagaaaacccaaagctctaaggtaacaaattaccaaattacatgaagatttggtttttgtcttgcatttttttcctttatgtgacgctggaccttttctttacccaaggatttttaaaactcagatttaaaacaaggggttactttacatcctactaagaagtttaagtaagtaagtttcattctaaaatcagaggtaaatagagtgcataaataattttgttttaatctttttgtttttcttttagacacattagctctggagtgagtctgtcataatatttgaacaaaaattgagagctttattgctgcattttaagcataattaatttggacattatttcgtgttgtgttctttataaccaccaagtattaaactgtaaatcataatgtaactgaagcataaacatcacatggcatgttttgtcattgttttcaggtactgagttcttacttgagtatcataatatattgtgttttaacaccaacactgtaacatttacgaattatttttttaaacttcagttttactgcattttcacaacatatcagacttcaccaaatatatgccttactattgtattatagtactgctttactgtgtatctcaataaagcacgcagttatgttac

SEQ ID NO: 1780 - DNA, 11034 bp, Artificial Sequence
  derived and/or modified sequence
atactggacgaacgcgaggacgtccaaaaaaaaacttttaccaagtgggtcaatgcgcaatttagcaagtttggaaagcaacacatagaaaacctgtttagcgacctgcaggatggtcgcagactgttggatctgcttgaaggtttgacgggacagaagttacctaaagaaaaagggtccacccgcgtccacgcactgaataacgttaataaggctctcagagtcttgcagaacaacaatgtcgacttagtcaacatcggaagcaccgatattgtcgatggcaaccataagctaactctgggattgatctggaacatcattctgcattggcaggtcaaaaatgtcatgaaaaacatcatggcgggcctccagcagacgaacagcgaaaagatactgttgagctgggttagacaatcgactagaaactatccacaggtcaacgtaatcaactttaccacctcgtggtcagacggcctggccctgaatgctcttatccactcccaccggcccgaccttttcgactggaattccgtcgtgtgccagcagagtgcaacacagcggctggagcacgcctttaacattgctcgctaccaactcggcattgagaagctgctagatcccgaggatgtagataccacgtaccccgataagaagagcatactcatgtacatcaccagcttattccaggttctaccacagcaggttagtattgaagccattcaggaagttgagatgcttccccgtccacccaaggtcactaaggaagaacactttcagctccaccatcagatgcactattctcagcagataacagtcagcctagctcaagggtacgagaggaccagctccccaaaacctcggttcaagagctatgcctacacacaggcagcttatgtgacaacaagtgacccaacccgtagcccctttccatcccagcatctagaagctcctgaagacaagtcgtttggaagttctctcatggaatcagaggtcaatttggaccgataccagaccgcactcgaggaggtattgtcatggttattgtccgccgaagataccctgcaggcccagggagaaattagcaatgacgtggaggtggtgaaagatcagtttcatacgcacgaggggtacatgatggatctgacagctcatcagggccgcgtgggtaacatcctccaattaggatccaaactaatcggcacaggaaaactgtccgaggatgaagagactgaggtccaagaacagatgaatttactgaactcgcggtgggagtgcctgagggtggcgagtatggagaagcaaagcaacttgcaccgagtgttgatggatctgcaaaaccagaagctcaaagagctgaatgattggttaaccaaaactgaggaacggacacgaaaaatggaggaggaacctttaggccccgacctggaagaccttaagagacaggtgcagcaacataaggttttgcaggaagacctggagcaggagcaagtccgtgtgaatagtctgacacatatggtggtggtcgtagatgagagctctggggatcatgccactgccgcacttgaggaacaactgaaagttctcggcgaccgctgggcgaatatctgcaggtggacggaagatcgctgggtcttgcttcaggatattctactcaagtggcagcggctgaccgaggaacagtgtctgttctctgcctggttatcagaaaaagaagatgctgtcaacaaaatccacaccacaggtttcaaggatcaaaacgagatgttgtcgtccctgcagaagttggctgtgctgaaagctgatctagaaaaaaaaaaacagagtatgggaaaactgtactctctgaaacaggatttgctgtctacattgaaaaataagagtgtgacccaaaaaactgaagcctggctcgacaactttgcgcggtgttgggataacctggtgcagaagctggagaaaagtactgcgcagatctcacaggccgtgacaaccactcagcccagtctgacccaaaccacagtgatggagacagttacgactgtgaccacccgggagcagattctggtcaaacacgcgcaggaagagctcccacctccccctcctcagaagaagaggcagattaccgtggacagtgagatccggaagcgtctggatgtggatatcaccgagcttcacagttggattacacggagtgaagcagtgcttcagagtcccgagttcgctattttccgtaaagagggcaatttttccgatctgaaagaaaaggttaatgctattgaacgcgagaaagcagaaaaatttaggaaactccaagatgcttctcgaagcgctcaagccctcgtcgaacaaatggtgaatgaaggggtcaatgcagactcgatcaagcaggcctccgagcagctgaacagtagatggatcgagttctgccagttgctgagtgagagactcaattggttggagtaccagaataacattatagctttctataaccagttacagcagttggagcaaatgacaaccactgccgagaactggttaaagatccagcctacgaccccttccgaacccaccgcaattaagtctcagttaaaaatctgtaaagacgaggtgaatcgtttgagcgacctgcagccccagatcgagcggctgaaaattcagagcattgcactgaaggagaagggtcaagggcccatgtttctggacgctgattttgtagccttcacaaaccatttcaaacaggttttcagcgatgtccaggccagagaaaaagaactccagaccatcttcgatactcttcccccaatgagatatcaagagaccatgagtgccattaggacatgggtgcagcagtctgagacaaagctctccataccacaattgagtgtgaccgactatgagataatggaacaacgcttgggcgagttgcaagcgctgcagtctagcctgcaggagcagcaaagcggactgtactacctcagtacaacagtgaaggagatgagcaagaaagccccatctgaaattagccgaaaatatcagagcgagttcgaggagatcgagggtcggtggaagaaactgagcagtcagctcgtggagcattgtcaaaagctcgaggaacagatgaataagctacgcaagatccaaaatcatatacaaacccttaagaagtggatggcagaagtagatgtcttcttgaaggaagagtggcccgccctgggggattctgaaatactgaaaaagcagctcaaacagtgtcggctccttgtgtctgatattcagactattcagcctagccttaattctgtgaacgaaggcggtcagaagatcaagaacgaagccgagcctgagtttgccagtcggcttgaaacggagttgaaagaactgaacactcaatgggaccacatgtgccagcaggtttacgcacggaaagaggctctgaagggcgggcttgaaaagacggtgagcttgcaaaaagatctgtctgagatgcacgagtggatgacacaggcagaagaagaataccttgagcgcgactttgagtacaaaacccctgatgaactccagaaagcagtggaggaaatgaaaagggcaaaagaagaggcccaacaaaaagaagccaaggtgaagcttctcactgagagcgtgaatagcgtcatcgcccaagcccccccggtggcccaggaagcgctgaagaaagagttggaaacattaacaaccaattatcaatggctctgcactcggcttaatggcaaatgtaagacattggaagaggtctgggcctgctggcatgagctgctcagctatctggaaaaagccaacaaatggcttaatgaagtggagtttaaactgaagactacagagaatatccccgggggcgccgaggaaatctcggaagtcttggactctttggaaaatctgatgcggcactccgaagacaatcctaatcagatcaggattctggcacagacattgacagatggaggcgttatggacgagcttattaatgaagagctggagaccttcaactcccggtggagagaacttcatgaggaggctgtaaggcgccagaaacttttggagcagagcattcaatcagcacaagaaacagaaaaatccctccacttgatacaggagtcattgactttcattgacaagcagctagccgcctatatagccgacaaagtggatgctgcacagatgccccaggaggcccagaagattcagtcagatctaaccagtcatgagatctcactggaagagatgaagaaacacaaccaaggcaaagaagcagctcagagggtgctgagccaaattgatgtcgcccagaagaagctgcaagacgttagcatgaagttccgcttgtttcagaaacctgcgaactttgagcaacggctccaagagtcaaagatgatactagatgaggtgaaaatgcacctcccagccctggagacgaagagtgtggagcaagaagtggtccagagccagttgaaccactgtgtgaacttgtacaagtccctgtccgaggttaagagcgaagtggagatggtaataaagacaggcaggcagattgtccagaaaaagcagaccgaaaacccgaaggaattggacgaacgcgtgactgccctgaagctgcattacaacgagctgggtgcaaaagtgacagaacgcaagcagcagctagagaaatgcctgaagctgtcccggaagatgaggaaagagatgaatgttctcacagaatggctagccgcaaccgacatggagctgaccaaacgatccgccgtagaaggtatgccaagtaatcttgactctgaagttgcctggggcaaggctacgcagaaagagatagagaagcagaaggtccatctgaagtctatcacagaggtgggggaagctctgaaaacagtgcttgggaagaaggaaaccctcgtcgaagataagctgtcgcttttgaactcgaattggattgccgtgacctcaagggcagaagagtggctgaacctgttactggagtatcagaagcatatggaaactttcgatcaaaacgtggatcatatcacaaaatggattattcaggccgatacccttttggacgaatccgaaaagaagaagccccaacagaaggaagacgtcctcaagcgcctgaaggcagaacttaatgatattcgacctaaggttgactcaacacgggatcaagctgcaaatttgatggcaaacagaggcgatcattgtagaaaattggttgagccacagatctccgaactgaaccatcgcttcgccgcaatcagtcatcgcataaaaacgggtaaagcgagcatcccactgaaggagctggagcaattcaattccgacattcaaaaactgttggagcctctcgaagccgagatccaacaaggggtcaatcttaaagaagaggacttcaacaaggacatgaacgaggacaacgaaggtactgtcaaggagctgctccaacgcggggataacctgcaacagcgtattaccgacgagcggaaaagagaagaaatcaagatcaagcagcagttgctccaaaccaagcacaacgccctcaaggacctgaggagccagaggaggaaaaaggcgttagaaatctctcatcagtggtaccagtacaagagacaggctgacgacctgctaaagtgtttggatgacatcgaaaagaaattggccagtctgccagaaccgcgtgatgagcggaagatcaaggaaattgatcgggagctgcagaaaaaaaaggaggagctgaatgcagtgcgaaggcaggcagagggcctctccgaggatggcgcggccatggctgttgaacccacccagatccagctctccaagcggtggcgcgagattgaaagcaaatttgcccagttccgcagattaaattttgcacaaattcacaccgtgagggaagaaactatgatggttatgactgaggacatgcccttggagatctcctatgtcccttccacctatcttactgagattacgcacgtaagccaggcattactggaagttgagcaactgctgaatgccccagatctgtgcgccaaagattttgaagacctatttaagcaagaagagtccctaaagaatattaaggactctcttcagcagagcagcgggaggatcgatattatccacagcaagaaaactgccgccctgcagtcagcaaccccggtcgagcgcgtgaagctgcaggaggcgttgtctcagctcgacttccagtgggaaaaagtcaacaagatgtacaaggaccgccaagggcggttcgaccgttcagtggaaaagtggcgaagattccactacgacattaaaatctttaaccagtggctgaccgaagcggagcagtttcttcgtaaaacacagatccctgaaaactgggagcacgccaaatataaatggtacctgaaagagttacaggacgggattggacagcgacaaaccgtagtgaggactttaaacgctacaggggaggaaattattcagcaatcatccaaaaccgatgcttctattctacaagagaaattgggatcacttaacctgaggtggcaagaggtgtgcaaacagcttagtgatcgcaaaaagcgactggaggagcaaaagaatatcctgtccgaatttcagagggatctgaacgaattcgtcctttggcttgaagaagctgataacatagcctctattccacttgaaccaggtaaggaacagcagctcaaagaaaagctggagcaggtcaagctgctggtggaagagctaccactgaggcaaggaatcttgaagcagttgaatgagactggcggccctgtgctcgtctccgcaccgattagcccggaggaacaggacaagctcgaaaataagcttaaacagaccaatctccagtggattaaagtgagccgggcgctgcctgaaaaacagggcgagatcgaggcccagataaaagacctcgggcaactggagaagaaacttgaggatctcgaggagcagctgaatcatctgctgctttggctttcgcccattcggaatcagctggagatctataaccagcctaaccaggaaggcccttttgacgtgaaagaaactgagattgccgtccaggcaaaacaacccgatgtggaagaaatcctgtcaaaaggtcagcacctatataaggaaaaaccagctacacagcccgtgaagcgtaagttagaggatctctcatctgagtggaaggccgtcaacagactcctgcaggaactgagggctaagcagccagatctcgcaccagggcttacaacgatcggagctagtccaactcagaccgtcacactggtgacacaacctgtcgtgacaaaagaaaccgccatctctaagcttgagatgcccagctccctcatgctggaggtcccagctttggcggattttaaccgagcatggactgaactgactgattggctcagtctgctcgaccaggtcatcaagtcccagcgggtcatggttggagatttggaggatattaacgagatgatcattaagcagaaggccaccatgcaagatctggagcagcgacggccccagctcgaagaactgatcactgcagcccagaatctaaagaataaaactagtaaccaggaagctcgcactattatcacagatcgcatcgagaggatccagaatcagtgggacgaagtgcaggagcacctgcagaaccgtcggcagcagctgaatgagatgctgaaagactctacacaatggttggaggctaaagaagaagctgagcaggtcctgggccaggctcgggctaagctcgagtcttggaaggagggaccctacacggtcgacgccatccagaagaaaatcactgagactaaacagctcgccaaagatttaaggcaatggcaaaccaatgtagacgtggctaatgatttggctctcaagctcctgagggactacagcgctgacgatactcggaaagtccacatgataacagaaaatataaacgcgtcatggagatctatccataagagagtgagtgagcgggaggctgcccttgaggaaacacaccgcctactgcagcagtttcccttggacctagagaagtttctggcctggctgacagaagcagaaaccaccgctaatgtccttcaggatgccacccgcaaagagagactgctggaggactccaaaggcgtgaaggagctcatgaaacaatggcaagacctgcagggcgaaatagaggctcacactgacgtataccataacctcgatgagaatagtcagaagatcctacggtccctggaggggtcagatgacgctgtgctattgcagcgacgcttggataatatgaatttcaagtggagcgagctcaggaaaaaaagtttgaacatcagaagtcaccttgaagcatctagtgatcagtggaaaaggctgcacctgtcactgcaggagctgctcgtgtggcttcaactgaaggatgacgagttgagtagacaggccccaattggcggggatttccccgccgtccagaaacaaaacgacgtgcacagggcctttaaaagggagctgaaaaccaaggaaccagttattatgtctacattggaaaccgtcaggatcttcctcacggagcaaccactagagggcctggaaaagctgtaccaggagcccagggaactgcccccggaggaacgcgctcaaaatgtcactcgcctattacgcaagcaggcagaggaagtcaatactgaatgggagaaattgaacttgcacagcgccgattggcaaaggaagattgatgaaactttggaaagactgcgcgaactgcaagaagccaccgatgaactggacttgaagctgagacaggctgaggttattaaagggagctggcaacccgtgggggatctgctgattgatagcctacaagaccatctggagaaggtaaaagcactcagaggcgagattgcccctttgaaggagaatgtgtctcatgtaaacgacctggctcgccagttaactacactggggatccaactatcaccatataatctcagtacccttgaagacctgaacacccgatggaagttgctgcaagtggccgtggaggaccgcgtcaggcagcttcacgaggcgcaccgtgatttcggcccggcctcccagcatttcttgagcacgagcgttcaggggccgtgggagcgggcaatctctccaaacaaggtgccctattacattaaccacgagacacagactacttgctgggaccatcccaagatgacagaactctaccaatctctggctgacctgaataatgtccggttttctgcctaccggactgccatgaagctgcgccgcttgcagaaagccctatgtctcgacctcttgtctttatcagctgcatgcgacgcactggaccagcacaatctgaaacagaatgaccaacccatggatatcctccaaatcataaattgtctgaccaccatctacgatcggctggagcaggagcacaacaatctggtgaacgtgccactttgcgtggatatgtgcctcaattggctgctgaatgtctatgatactgggcgcactggtcgaatccgtgttctgtctttcaagacaggaataatcagcctatgtaaagctcatctggaggacaaatacagatacctgttcaagcaggttgcctcttccacaggattttgcgatcagagaagactcggcctcctgcttcacgactctatacagattcctcgacaactcggcgaggttgcctcatttggaggatctaatatcgaaccctccgttcggagttgtttccagtttgctaataacaaacccgagattgaggccgctctcttcttagactggatgagacttgaaccacaatcaatggtctggctgccagtcctacatcgcgtagcagctgccgaaaccgccaagcaccaggccaaatgcaatatttgtaaagagtgcccaattattggctttcggtataggtcattgaaacatttcaactatgacatatgccaatcatgctttttctctggtcgggtcgcgaaagggcacaaaatgcactatcctatggtcgagtattgcacccctaccacgtcaggcgaggacgtgagggattttgccaaagttctgaaaaataagtttcggaccaagcgctatttcgcaaagcaccctcgcatgggatatctccccgtacagaccgttttggaaggtgataacatggaaacacctgtaacattaattaacttttggcctgtggacagcgcgcccgcttccagcccacagctgtctcacgacgatactcactctaggatcgagcattatgcatcaagattagcagaaatggaaaattccaatggctcctatttgaacgactctatttcccctaacgagtccatcgacgatgagcatctcctcatccagcattattgccagtccttgaaccaggattcacctctgtcgcagccgcgctctcctgcacaaatattgatcagcctcgagtctgaggaaaggggggagttagaacgcatcctggcggacctggaggaagaaaatagaaatctgcaggccgagtatgacagactcaaacagcagcacgaacataaaggtctgagtcctctgcccagcccacccgagatgatgcccactagcccacaaagcccaagagacgccgaattaatagcagaagccaagctgctgcggcaacataaaggcagattagaggcccggatgcaaatactggaggaccacaataagcagctagaaagtcaactgcaccgccttagacagctcctagagcagccacaggctgaagctaaggtaaatgggacaacggtgtccagcccgtctacttccttgcagaggtcagattcctctcagcccatgctgttacgcgtggtcggaagccagacaagtgatagcatgggcgaagaggatctgctgtccccccctcaggacacatccacaggactcgaggaggtaatggagcaacttaataatagcttcccttcaagtagagggcggaataccccaggaaaaccaatgcgcgaggatactccgtag

SEQ ID NO: 1781 - DNA, 11034 bp, Artificial Sequence
  derived and/or modified sequence
atcctggatgagcgggaggatgtgcagaagaagaccttcaccaagtgggtgaatgcccagttcagcaagtttgggaagcagcacatcgagaacctcttcagtgacctgcaggacggccggcggctgctggacctgctggagggcctgaccggccagaagctgcccaaggagaagggcagcaccagggtgcacgccctgaacaacgtgaacaaggccctgcgggtgctgcagaacaacaacgtggacctggtgaacatcggcagcacagacatcgtggatggcaaccacaagctgaccctgggcctcatctggaacatcatcctgcactggcaggtgaagaatgtgatgaagaacatcatggccggcctgcagcagaccaacagcgagaagatcctgctgtcctgggtgcggcagagcaccaggaactacccccaggtgaatgtcatcaacttcaccacctcctggagcgatggcctggccctgaatgccctgatccacagccacaggccagacctgtttgactggaacagcgtggtgtgccagcagagcgccacccagaggctggagcacgccttcaacatcgcccgctaccagctgggcatcgagaagctgctggaccctgaagatgtggacaccacctacccagacaagaagagcatcctgatgtacatcaccagcctcttccaggtgctgccccagcaggtgtccattgaggccatccaggaggtggagatgctgcccaggcctcccaaggtgaccaaggaggagcacttccagctgcaccaccagatgcactacagccagcagatcaccgtgtccctggcccagggctatgaaagaaccagcagccccaagccccgcttcaagagctatgcctacacccaggccgcctacgtgaccaccagtgaccccaccaggagccccttccccagccagcacctggaggcccctgaggacaagagctttggcagcagcctgatggagagcgaggtgaacctggaccgctaccagacagccctggaggaggtgctgtcctggctgctgtctgctgaggacaccctgcaggcccagggcgagatcagcaatgatgtggaggtggtgaaggaccagttccacacccatgagggctacatgatggacctgacagcccaccagggccgggtgggcaacatcctgcagctgggcagcaagctgattggaacaggcaagctgtctgaagatgaggagacagaggtgcaggagcagatgaacctgctgaacagccgctgggagtgcctgcgggtggcctccatggagaagcagagcaacctgcaccgggtgctgatggacctgcagaaccagaagctgaaggagctgaatgactggctgaccaagacagaggagaggaccaggaagatggaggaggagcccctgggccctgacctggaggacctgaagaggcaggtgcagcagcacaaggtgctgcaggaggacctggagcaggagcaggtgcgggtgaacagcctgacccacatggtggtggtggtggatgagagcagcggggaccacgccacagctgccctggaggagcagctgaaggtgctgggggaccgctgggccaacatctgccgctggacagaggaccgctgggtgctgctgcaggacatcctgctgaagtggcagaggctgacagaggagcagtgcctcttcagcgcctggctgtctgagaaggaggatgctgtgaacaagatccacaccaccggcttcaaggaccagaatgagatgctgagcagcctgcagaagctggccgtgctgaaggctgacctggagaagaagaagcagagcatgggcaagctgtacagcctgaagcaggacctgctgagcaccctgaagaacaagtctgtgacccagaagacagaggcctggctggacaactttgcccgctgctgggacaacctggtgcagaagctggagaagagcacagcccagatcagccaggccgtgaccaccacccagcccagcctgacccagaccaccgtgatggagaccgtgaccaccgtgaccacccgggagcagatcctggtgaagcacgcccaggaggagctgcccccacctccaccccagaagaagaggcagatcaccgtggacagcgagatcaggaagaggctggatgtggacatcacagagctgcacagctggatcaccaggtctgaggccgtgctgcagagccctgagtttgccatcttcaggaaggagggcaacttcagtgacctgaaggagaaggtgaatgccatcgagcgggagaaggccgagaagttcaggaagctgcaggatgccagccgcagcgcccaggccctggtggagcagatggtgaatgaaggagtgaatgctgacagcatcaagcaggccagcgagcagctgaacagccgctggattgagttctgccagctgctgtctgagcggctgaactggctggagtaccagaacaacatcatcgccttctacaaccagctgcagcagctggagcagatgaccaccacagctgagaactggctgaagatccagcccaccaccccatctgagcccacagccatcaagagccagctgaagatctgcaaggatgaggtgaaccggctgagtgacctgcagccccagatcgagcggctgaagatccagagcatcgccctgaaggagaagggccagggccccatgttcctggatgctgactttgtggccttcaccaaccacttcaagcaggtgttcagtgatgtgcaggcccgggagaaggagctgcagaccatctttgacaccctgccccccatgagataccaggagaccatgtctgccatccgcacctgggtgcagcagagcgagaccaagctgagcatcccccagctgtctgtgacagattatgagatcatggagcagaggctgggggagctgcaggccctgcagagcagcctgcaggagcagcagagcggcctgtactacctgagcaccaccgtgaaggagatgagcaagaaggcccccagcgagatcagcaggaagtaccagagcgagtttgaggagattgagggccgctggaagaagctgagcagccagctggtggagcactgccagaagctggaggagcagatgaacaagctgaggaagatccagaaccacatccagaccctgaagaagtggatggccgaggtggatgtgttcctgaaggaggagtggccagccctgggggacagcgagatcctgaagaagcagctgaagcagtgccgcctgctggtgtctgacatccagaccatccagcccagcctgaacagcgtgaatgaaggaggccagaagatcaagaatgaagctgagcctgagtttgccagccggctggagacagagctgaaggagctgaacacccagtgggaccacatgtgccagcaggtgtatgccaggaaggaggccctgaagggcggcctggagaagacagtgtccctgcagaaggacctgtctgagatgcatgagtggatgacccaggccgaggaggagtacctggagcgggactttgagtacaagaccccagatgagctgcagaaggctgtggaggagatgaagagggccaaggaggaggcccagcagaaggaggccaaggtgaagctgctgacagagagcgtgaacagcgtgattgcccaggcccctcctgtggcccaggaggccctgaagaaggagctggagaccctgaccaccaactaccagtggctgtgcacccggctgaatggcaagtgcaagaccctggaggaggtgtgggcctgctggcatgagctgctgagctacctggagaaggccaacaagtggctgaatgaggtggagttcaagctgaagaccacagagaacatccctgggggcgctgaggagatcagcgaggtgctggacagcctggagaacctgatgaggcacagcgaggacaaccccaaccagatccgcatcctggcccagaccctgacagatggcggcgtgatggatgagctgatcaatgaggagctggagaccttcaacagccgctggagggagctgcacgaggaggccgtgcggcggcagaagctgctggagcagagcatccagagcgcccaggagacagagaagagcctgcacctgatccaggagagcctgaccttcatcgacaagcagctggccgcctacatcgctgacaaggtggatgctgcccagatgccccaggaggcccagaagatccagagcgacctgaccagccatgagatcagcctggaggagatgaagaagcacaaccagggcaaggaggccgcccagagggtgctgagccagattgatgtggcccagaagaagctgcaggatgtgtccatgaagttccgcctcttccagaagccagccaactttgagcagaggctgcaggagagcaagatgatcctggatgaggtgaagatgcacctgcctgccctggagaccaagtctgtggagcaggaggtggtgcagagccagctgaaccactgtgtgaacctgtacaagagcctgtctgaggtgaagtctgaggtggagatggtgatcaagacaggccggcagatcgtgcagaagaagcagacagagaaccccaaggagctggatgagcgggtgacagccctgaagctgcactacaatgagctgggcgccaaggtgacagagaggaagcagcagctggagaagtgcctgaagctgagcaggaagatgaggaaggagatgaatgtgctgacagagtggctggccgccacagacatggagctgaccaagaggtctgctgtggagggcatgcccagcaacctggacagcgaggtggcctggggcaaggccacccagaaggagattgagaagcagaaggtgcacctgaagagcatcacagaggtgggggaggccctgaagacagtgctgggcaagaaggagaccctggtggaggacaagctgagcctgctgaacagcaactggattgctgtgaccagcagagctgaggagtggctgaacctgctgctggagtaccagaagcacatggagacctttgaccagaatgtggaccacatcaccaagtggatcatccaggccgacaccctgctggatgaaagtgagaagaagaagccccagcagaaggaggatgtgctgaagaggctgaaggccgagctgaatgacatccggcccaaggtggacagcacccgggaccaggccgccaacctgatggccaacagaggagaccactgcaggaagctggtggagccccagatcagcgagctgaaccacagatttgctgccatcagccaccgcatcaagacaggcaaggccagcatccccctgaaggagctggagcagttcaacagcgacatccagaagctgctggagcccctggaggccgagatccagcagggcgtgaacctgaaggaggaggacttcaacaaggacatgaatgaagataatgaaggaacagtgaaggagctgctgcagagaggagacaacctgcagcagaggatcacagatgagaggaagcgggaggagatcaagatcaagcagcagctgctgcagaccaagcacaatgccctgaaggacctgcggagccagaggaggaagaaggccctggagatcagccaccagtggtaccagtacaagaggcaggctgatgacctgctgaagtgcctggatgacatcgagaagaagctggccagcctgcctgagcccagagatgagaggaagatcaaggagattgaccgggagctgcagaagaagaaggaggagctgaatgctgtgcggcggcaggccgagggcctgtctgaagatggagctgccatggctgtggagcccacccagatccagctgagcaagcgctggagagaaattgagagcaagtttgcccagttccggcggctgaactttgcccagatccacacagtgcgggaggagaccatgatggtgatgacagaggacatgcccctggagatctcctatgtgcccagcacctacctgacagagatcacccacgtgtcccaggccctgctggaggtggagcagctgctgaatgccccagacctgtgtgccaaggactttgaagatctcttcaagcaggaggagagcctgaagaacatcaaggacagcctgcagcagagcagcggcagaattgacatcatccacagcaagaagacagctgccctgcagagcgccacccctgtggagcgggtgaagctgcaggaggccctgagccagctggacttccagtgggagaaggtgaacaagatgtacaaggaccggcagggccgctttgacagatctgtggagaagtggaggcgcttccactatgacatcaagatcttcaaccagtggctgacagaagctgagcagttcctgaggaagacccagatccctgagaactgggagcacgccaagtacaagtggtacctgaaggagctgcaggacggcatcggccagaggcagacagtggtgaggaccctgaatgccactggagaggagatcatccagcagagcagcaagacagatgccagcatcctgcaggagaagctgggcagcctgaacctgcgctggcaggaggtgtgcaagcagctgagtgacaggaagaagaggctggaggagcagaagaacatcctgtctgagttccagagggacctgaatgaatttgtgctgtggctggaggaggccgacaacatcgccagcatccccctggagcccgggaaggagcagcagctgaaggagaagctggagcaggtgaagctgctggtggaggagctgcccctgcggcagggcatcctgaagcagctgaatgaaacaggaggccctgtgctggtgtctgcccccatcagccctgaggagcaggacaagctggagaacaagctgaagcagaccaacctgcagtggatcaaggtgtcccgggccctgcctgagaagcagggcgagattgaggcccagatcaaggacctgggccagctggagaagaagctggaggacctggaggagcagctgaaccacctgctgctgtggctgagccccatccggaaccagctggagatctacaaccagcccaaccaggagggcccctttgatgtgaaggagacagaaattgctgtgcaggccaagcagccagatgtggaggagatcctgagcaagggccagcacctgtacaaggagaagccagccacccagcctgtgaagaggaagctggaggacctgagcagcgagtggaaggctgtgaaccggctgctgcaggagctgcgggccaagcagcctgacctggcccctggcctgaccaccatcggggccagccccacccagacagtgaccctggtgacccagcctgtggtgaccaaggagacagccatcagcaagctggagatgcccagcagcctgatgctggaggtgcctgccctggccgacttcaacagagcctggacagagctgacagactggctgagcctgctggaccaggtgatcaagagccagagggtgatggtgggggacctggaggacatcaatgagatgatcatcaagcagaaggccaccatgcaggacctggagcagaggcggccccagctggaggagctgatcacagctgcccagaacctgaagaacaagaccagcaaccaggaggcccggaccatcatcacagaccgcatcgagcgcatccagaaccagtgggatgaggtgcaggagcacctgcagaacagacggcagcagctgaatgagatgctgaaggacagcacccagtggctggaggccaaggaggaggccgagcaggtgctgggccaggcccgggccaagctggagagctggaaggagggcccctacacagtggatgccatccagaagaagatcacagagaccaagcagctggccaaggacctgcggcagtggcagaccaacgtggatgtggccaatgacctggccctgaagctgctgcgggactacagcgcagatgacaccaggaaggtgcacatgatcacagagaacatcaatgcctcctggaggagcatccacaagagggtgtctgagcgggaggccgccctggaggagacccaccggctgctgcagcagttccccctggacctggagaagttcctggcctggctgacagaggccgagaccacagccaacgtgctgcaggatgccaccaggaaggagcggctgctggaggacagcaaaggagtgaaggagctgatgaagcagtggcaggacctgcagggcgagattgaggcccacacagatgtgtaccacaacctggatgagaacagccagaagatcctgcggagcctggagggcagtgatgatgctgtgctgctgcagaggcggctggacaacatgaacttcaagtggagcgagctgaggaagaagagcctgaacatccgcagccacctggaggccagcagtgaccagtggaagaggctgcacctgagcctgcaggagctgctggtgtggctgcagctgaaggatgatgagctgagccggcaggcccccatcggcggggacttccctgctgtgcagaagcagaatgatgtgcaccgggccttcaagcgggagctgaagaccaaggagcccgtcatcatgagcaccctggagaccgtgcgcatcttcctgacagagcagcccctggagggcctggagaagctgtaccaggagccccgggagctgcccccagaggagcgggcccagaatgtgacccggctgctgaggaagcaggccgaggaggtgaacacagagtgggagaagctgaacctgcacagcgctgactggcagaggaagattgatgagaccctggagcggctgcgggagctgcaggaggccacagatgagctggacctgaagctgcggcaggccgaggtgatcaagggctcctggcagcctgtgggggacctgctgattgacagcctgcaggaccacctggagaaggtgaaggccctgcggggggagatcgcccccctgaaggaaaatgtgagccacgtgaatgacctggcccggcagctgaccaccctgggcatccagctgagcccctacaacctgagcaccctggaggacctgaacacccgctggaagctgctgcaggtggccgtggaggacagagtgcggcagctgcacgaggcccaccgggactttggacctgccagccagcacttcctgagcacctctgtgcagggcccctgggagcgggccatcagccccaacaaggtgccctactacatcaaccacgagacccagaccacctgctgggaccaccccaagatgacagagctgtaccagagcctggccgacctgaacaacgtgcgcttcagcgcctacagaacagccatgaagctgcggcggctgcagaaggccctgtgcctggacctgctgagcctgtctgctgcctgtgatgccctggaccagcacaacctgaagcagaatgaccagcccatggacatcctgcagatcatcaactgcctgaccaccatctatgaccggctggagcaggagcacaacaacctggtgaatgtgcccctgtgtgtggacatgtgcctgaactggctgctgaatgtgtatgacaccggccgcacaggccgcatccgggtgctgtccttcaagacaggcatcatcagcctgtgcaaggcccacctggaggacaagtaccgctacctgttcaagcaggtggccagcagcacaggcttctgtgaccagaggcggctgggcctgctgctgcatgacagcatccagatcccccggcagctgggggaggtggccagctttggaggcagcaacatcgagcccagcgtgcgcagctgcttccagtttgccaacaacaagccagaaattgaggccgccctcttcctggactggatgaggctggagccccagagcatggtgtggctgcctgtgctgcaccgggtggccgctgctgagacagccaagcaccaggccaagtgcaacatctgcaaggagtgccccatcatcggcttccgctaccgcagcctgaagcacttcaactatgacatctgccagagctgcttcttcagcggccgggtggccaagggccacaagatgcactaccccatggtggagtactgcacccccaccaccagcggagaagatgtgcgggactttgccaaggtgctgaagaacaagttccgcaccaagcgctactttgccaagcaccccaggatgggctacctgcctgtgcagacagtgctggagggggacaacatggagacccctgtgaccctcatcaacttctggcctgtggacagcgccccagccagcagcccccagctgagccatgatgacacccacagcagaattgagcactacgccagccggctggccgagatggagaacagcaatggcagctacctgaatgacagcatcagccccaatgaaagcattgatgatgagcacctgctgatccagcactactgccagagcctgaaccaggacagccccctgagccagcccaggagccctgcccagatcctgatcagcctggagagcgaggagcggggggagctggagcgcatcctggccgacctggaggaggagaacagaaacctgcaggccgagtatgaccggctgaagcagcagcacgagcacaagggcctgagccccctgcccagccccccagagatgatgcccaccagcccccagagccccagagatgctgagctgattgctgaggccaagctgctgcggcagcacaagggccgcctggaggccaggatgcagatcctggaggaccacaacaagcagctggagagccagctgcaccggctgcggcagctgctggagcagccccaggccgaggccaaggtgaatggcaccaccgtgagcagccccagcaccagcctgcagaggagtgacagcagccagcccatgctgctgcgggtggtgggcagccagaccagtgacagcatgggagaggaggacctgctgagccccccccaggacaccagcacaggcctggaggaggtgatggagcagctgaacaacagcttccccagcagccggggcaggaacacccctgggaagcccatgagggaggacaccccctag

SEQ ID NO: 1782 - DNA, 11034 bp, Artificial Sequence
  derived and/or modified sequence
atcctggacgagcgggaggacgtgcagaagaagaccttcaccaagtgggttaacgcgcagtttagtaaatttgggaagcagcacatcgagaatctgttctctgatctgcaagatgggcggcgactcttggatctgttagaaggcctgactggtcaaaagctgcctaaagagaaagggtcgactagggttcacgcccttaacaacgtcaataaggctctgcgggtgctccagaacaacaatgttgatctggtgaatattgggagcacagatatagtggatggcaaccacaaactgaccttgggactcatctggaacatcattcttcattggcaggtcaagaatgtgatgaaaaacatcatggctggcctgcagcagaccaactcagagaaaattttactgtcttgggtcaggcagtccactcggaattacccccaggtgaatgtgataaactttacaacgagctggagcgatgggttggcacttaatgcactcattcactcccaccgtccagacttattcgactggaattccgtggtgtgtcagcagtccgccactcaacgactggaacatgctttcaacatcgcccgttaccaactcggcatagagaaattgctggacccagaagacgtcgataccacttaccctgacaagaagtctattctaatgtacatcacaagtctgttccaagtcctccctcaacaggtgtctatcgaggctatccaggaagtagagatgctgcctcgccccccaaaggtcaccaaggaagagcatttccagctccatcatcaaatgcactatagccagcaaatcacagtctctttggcgcagggctacgaacgtacgtcttcccctaaaccgcgctttaaatcatacgcatatacccaggctgcctatgtgaccacctcagatccaacacggtcccctttcccctcacagcacctcgaggcacccgaagataaaagctttggcagttccctcatggagtccgaagtgaacctggatcggtaccagaccgcattggaggaggtcttaagttggctgctgagcgccgaggatacgcttcaggcacagggcgagataagtaacgacgtcgaggtagtgaaggaccagttccacacacatgagggctatatgatggatctgaccgctcaccagggccgtgtaggcaacatcctccaacttggaagcaagcttatcgggactggaaaactctccgaggatgaggagaccgaagtgcaagagcagatgaatctgctcaattcacgctgggaatgcctcagggtggcgtcgatggagaaacagtccaatctgcaccgggtgctgatggatctgcaaaatcaaaagttgaaggagctgaacgactggctgaccaagaccgaagaacgaactcggaagatggaggaggagccgttgggacccgaccttgaagatctgaagagacaagtccagcagcacaaagtgctccaagaagacctggaacaggaacaggtgagggtaaacagcctcacacacatggttgtggtggtggacgaaagcagtggcgaccacgcaaccgcagcactggaggagcagctgaaagtgctgggcgacaggtgggccaatatctgcagatggactgaggatagatgggttctcctgcaggacatcctgctgaagtggcagaggctgaccgaggagcagtgcctcttcagcgcctggctgtcagaaaaggaagacgccgtcaacaaaatacatacaacgggctttaaggatcaaaacgaaatgctatcctcgctgcagaagctggccgtcctgaaggctgacctggaaaagaaaaagcagagtatggggaaattatactccctcaagcaggaccttcttagcactctaaagaacaagagcgtaacccagaaaacggaagcatggctcgataactttgcccggtgctgggacaacttagttcagaaattggagaagtctactgctcagatctcccaggctgtgacgactacgcaaccgagcctcacacaaacaaccgtcatggagacagttacaaccgtgacaactcgggagcagattctggtcaagcacgcgcaggaagagctgcctccgcctcccccacagaaaaaacgacaaattacagtggactcagaaatacgcaaaagactggacgtggatatcaccgaactacactcctggatcaccaggtctgaagcagtactccagtcccctgaatttgctatctttagaaaggagggcaatttcagcgatttaaaggagaaagtgaacgcgatcgagcgggagaaggccgagaaatttagaaagctccaggacgcctctcgcagcgcccaggcactagtagagcaaatggtcaacgagggcgtgaatgcagactctataaagcaggcctctgaacagttgaattctcggtggattgagttttgtcagctactgtcagagagactaaactggttggagtatcagaacaatattatcgctttctacaatcagctgcaacagctcgagcagatgaccaccacagctgaaaactggctaaagattcagcccacaaccccaagcgaaccaacagctattaaaagtcaacttaagatatgtaaggacgaagtgaataggctaagcgacctgcagcctcagattgagagactcaagattcagagcatcgcattaaaggaaaagggacagggccctatgttcctcgacgccgactttgttgcattcactaaccactttaaacaggtgttttccgatgtgcaggcccgggaaaaagagcttcaaactatcttcgacactctgcctcccatgcggtaccaggagaccatgtctgccattagaacgtgggtgcagcagtccgagactaagctgtcaattcctcaactgtcggtgaccgattacgagatcatggagcagcgcctgggggaactccaggcccttcagtcgtcactgcaagaacaacagagcgggttgtattacttgagtacaacagtcaaggaaatgtccaaaaaggccccttccgagataagtcgaaaataccaaagcgagttcgaggagatcgaagggcgctggaagaaattaagctctcagcttgtggaacattgccagaaactggaagaacagatgaacaaactgagaaagatccagaaccatatacagacactgaagaagtggatggctgaggtcgacgttttcctcaaggaggagtggcctgcgctcggagatagtgagatcctgaagaaacagctgaagcagtgtcgactgctggtgtcggacatccagaccattcagcctagtctgaactctgtcaatgaaggcggtcagaagattaaaaacgaagccgagcccgaattcgctagtcgactggagaccgagctaaaggaactgaatactcagtgggaccacatgtgtcaacaagtttacgctcgaaaggaagccctgaaaggtgggctggaaaaaactgtctcactgcagaaagacctgagcgagatgcacgaatggatgactcaggctgaggaagaatacctggagcgcgattttgagtacaagacccccgacgaactgcagaaagctgtcgaagagatgaagagagcaaaggaggaggcacagcagaaagaagccaaggtaaaactgttgacagagagtgtcaactcagtgatcgcacaggctccccctgtcgcccaagaggctttaaagaaggagttggagaccctgaccaccaactatcagtggctatgtactcgcctgaacggaaagtgtaagactcttgaagaggtctgggcctgctggcatgagcttctctcttacctggaaaaagccaataaatggctcaatgaagtcgagttcaaactaaaaacaaccgaaaacattccagggggagccgaggagattagcgaggtcctggacagtctggagaatctcatgcggcactccgaggacaaccctaaccagatacggatcttggcccaaacccttaccgatggcggagtgatggacgagctaatcaatgaggaactggaaacatttaacagccgatggcgcgagcttcacgaggaagcggttaggcgacagaagctccttgagcagtctatccagagcgctcaggagaccgaaaagtcattacatcttattcaggagagtttaaccttcatagataaacaactggccgcgtacatagccgacaaagtggacgctgctcaaatgccccaagaggcacagaaaatccagagtgacctcacgtctcatgagatttctctcgaggagatgaagaaacacaaccaggggaaagaagcagcccaacgcgtcctgtctcagattgacgtggcacagaaaaagttgcaagacgtcagcatgaagttccgattgtttcaaaagcccgcaaacttcgagcagcgactccaggaatccaagatgatactggatgaggtcaaaatgcacttacccgctctggaaactaagtctgttgagcaagaggtggtgcagagccaactgaaccattgcgtgaatctatacaagtcactatctgaggtcaagtccgaagttgagatggtgatcaaaactggcaggcaaatagtgcagaagaaacagactgagaatccgaaggagttggatgagagggtgaccgccctcaaactccattataacgagctgggagccaaagtaactgaaagaaagcaacagctagagaagtgcctaaagctctctaggaagatgagaaaggagatgaacgtacttactgagtggctggcagcaacagacatggagcttactaagaggagtgcagttgagggcatgccaagcaatctcgacagtgaggtggcctgggggaaggctacgcagaaggaaattgaaaaacaaaaagttcacctgaaatctatcacagaggtcggagaggcactaaaaaccgtcctagggaagaaggagacacttgtcgaagacaaattgagcctgttgaattccaattggatcgcagtgacaagtagggccgaggagtggcttaacctcctgctggaataccagaagcacatggagacattcgaccagaatgttgaccacattaccaaatggattatccaggcagataccctgctggacgaatcagagaaaaagaagccccaacagaaagaagatgttctgaaacgtctcaaagcagaacttaacgacatcaggcccaaagtcgactcaacccgggatcaagctgcaaatttaatggctaaccggggcgatcactgtaggaagctagtggagcctcagatctcagagctgaaccaccgctttgcagccattagtcacagaattaaaactgggaaagcgtccattccgctaaaagagctggaacagttcaacagcgatatacagaaattacttgaacccctggaggctgagatccagcaaggtgttaatctgaaagaggaggacttcaacaaagacatgaacgaagataacgagggaactgtgaaagagctcctgcaacggggtgacaatctgcagcagagaattactgatgaacgcaagagagaggagattaaaatcaagcagcagttactgcaaacaaagcataatgctctgaaagatttgcgcagtcagcgacgcaaaaaagcactagagatatcgcatcagtggtaccaatacaaacgtcaagctgatgacctgctgaaatgcctggacgacatagaaaaaaaacttgcatctctcccagagccccgtgacgaacggaaaataaaggagatcgacagagagcttcagaaaaaaaaggaagagttaaacgcagtgaggcgccaggctgagggcttatcggaagatggagccgccatggccgtggagccaacacaaattcagctctccaagcgatggagagaaatcgagagcaagttcgctcaatttaggcggctgaatttcgcacagatccataccgtgcgggaagaaacgatgatggtcatgactgaagacatgccgctggagatctcatacgtgccatcgacatatctcactgaaatcacacacgttagtcaagccctactcgaggttgaacagctgctgaatgcccctgacctgtgtgcaaaggattttgaggacctattcaagcaagaggaatctctcaaaaatataaaggattccttgcagcagtcctctggtagaattgatatcatccatagtaaaaagaccgcagcactgcagtccgctacacccgttgagagggtcaaactacaggaagccctgagccaactggactttcagtgggagaaagtgaacaagatgtataaggatcggcagggaaggttcgaccgcagtgtggagaaatggcgccgcttccactacgatatcaagatcttcaaccagtggctgacggaagccgaacaattcttgcggaagacacagattcccgagaactgggagcacgctaaatataagtggtacctgaaagagctccaggatgggatcggccaaaggcagacggtggtccggacccttaacgccaccggcgaggagataatccagcagtcttctaagacagacgcctccatcctacaagaaaagctggggtccctcaacctccgctggcaggaagtgtgcaagcagttgtctgacaggaagaaacggctcgaggagcagaaaaacattctgtctgaattccagcgcgatctcaacgagtttgtattgtggctagaggaggctgacaatattgccagcattccattggagccaggaaaagagcagcagctaaaggagaagctggagcaggtcaaattgcttgtcgaggagctcccactccggcagggaatcttaaaacagctcaatgaaacaggagggccagtgttggtctcagcccccattagtccagaagagcaagacaagctcgaaaataagctcaagcagactaatctgcaatggatcaaggtgtctcgagctctgcctgagaagcagggcgaaatagaagcccagatcaaagatttaggccagctggagaaaaaattagaggacctggaagagcagctaaaccatctgttactgtggctgtctcccataagaaatcagctggagatctataaccaaccgaatcaggagggaccttttgacgtcaaagagacggagattgccgtacaggcaaagcaaccagacgtggaagagatccttagtaaagggcaacacctctataaggaaaagcctgcgacacagcctgtgaaaaggaagctggaagacctctccagcgaatggaaagcagtgaaccgattgctgcaggagttacgagccaaacaacccgacttagcccccgggttaactaccataggggccagcccaacacaaacagtgacgctcgtgacacagccagtagtaaccaaggaaaccgccatctcgaaactggagatgccctctagtctcatgttggaagtgcccgctctggctgatttcaatcgcgcctggactgaactaaccgattggttatccttactcgaccaagttataaagagccagagggtcatggtcggagatttggaggatattaatgagatgatcatcaagcagaaagctacgatgcaggatctagaacagcgtagaccacagctcgaagagctgatcactgctgcccagaatctaaagaataagacatcaaatcaggaagccaggactatcatcaccgaccgaatcgagcgcatacagaatcagtgggatgaggtccaagagcacttgcagaatagaaggcaacagttgaacgaaatgctgaaagactccacccagtggctggaagcgaaagaggaggctgaacaggtgttgggccaggctcgcgcaaagctcgaatcttggaaagagggaccttacacggtggatgcaatccagaaaaagatcaccgaaactaagcagctggcgaaggatttgcgccagtggcaaacgaatgtagacgtggccaatgacctcgctcttaagctcttgcgcgactactcagccgacgacactcggaaagtgcacatgattactgagaacattaatgcttcatggagatccattcacaagcgagtgagcgagagagaggctgccctggaggagacgcacagactattgcagcagtttcctttggatctggaaaaatttctagcttggttgacagaggccgagactacagccaatgtgctgcaggacgccacacgtaaggagcggttgctcgaagactcaaagggtgtaaaggaacttatgaagcagtggcaggacttgcagggagaaattgaggcccacacagatgtgtatcacaacttagacgaaaacagtcagaagatcctacggtccttagaagggagtgacgatgctgtgctgttgcagcgtcgcctcgataacatgaattttaagtggtccgagcttcgtaagaagtccctcaacatccggtcccatcttgaagcctcctccgatcagtggaagagactgcatctcagcctgcaagagctcttagtatggctgcagctgaaggacgatgaactgagtcggcaggcccccatcggaggagacttccccgccgtccagaaacagaacgatgtgcacagggccttcaaaagagagctcaaaactaaagagcctgtgatcatgtcaaccctcgagacagtgaggattttcctgaccgagcagcctttggagggcctggagaagttgtaccaggaaccacgggagctcccccccgaagaacgcgcccagaacgttactcgcctgctgcgtaaacaggctgaagaggtgaacacagagtgggagaagctgaacctacactccgctgactggcaacggaaaatcgacgaaactctggaacggctccgggaactacaggaagctaccgacgaactagatcttaagctccggcaggctgaggtgatcaagggctcctggcaaccagtgggagatctgcttatcgatagcctgcaggaccacctggagaaagtcaaagccctccggggcgaaattgccccccttaaggaaaatgtctcacacgtgaacgatctggcccggcagctgacaactctgggcattcagctttctccgtacaacctgtccactttggaggatctcaacacccgttggaagctgctgcaggtggccgtggaggaccgggtgcggcagttgcacgaggctcaccgtgatttcggacccgcgagtcagcactttctttcgaccagtgtgcaggggccatgggagcgggccatctctccgaataaagtaccatattacataaatcatgaaacccaaacaacttgctgggatcacccgaaaatgaccgaattgtatcagtctctggcagatttgaataacgtgaggttttccgcttatagaactgctatgaaattgcgaaggctccagaaggcactctgtcttgacctgctgtccctctctgcagcttgtgatgctctcgatcagcataacttgaagcagaacgatcagcccatggacatcctgcagataatcaactgcctgaccactatctacgaccggctggaacaagaacacaacaatctcgtcaatgtccctctgtgcgtcgacatgtgcctaaactggctgctcaatgtctacgatacaggtagaacaggtaggattcgagtcctgagcttcaagacagggatcattagcttgtgtaaagcgcacctggaggacaaatatcgttatctcttcaaacaagtggcttcatccaccggcttctgcgatcagagacgccttgggctgttgctgcacgatagtatacagatacccagacagctgggagaggtcgcaagcttcggcggatcaaatatcgagcccagcgtgagatcttgcttccaatttgccaataacaagccggagattgaagccgccctgtttcttgattggatgaggctggagccgcaatccatggtgtggctaccagtgttgcatagagtggctgccgctgagacagccaagcatcaagccaagtgtaatatttgcaaggagtgtccaattatcggcttccgctatagaagcctcaagcacttcaactatgatatctgtcagtcatgtttctttagcggccgggtggccaagggccacaaaatgcattaccccatggttgagtactgcactcccacaacatcaggggaggacgtgcgggatttcgccaaagttctgaagaacaaattcaggaccaaaagatactttgctaaacacccaagaatgggatacctgcccgtgcaaactgtattggaaggtgataatatggagacgcctgtcaccttaattaacttctggccagtcgattcagccccagccagctctccccagttatcacacgacgacactcactcccgaattgagcattacgcttccaggctggccgaaatggaaaactcaaatgggtcatatctaaatgatagtatctcgcctaatgaaagtatagacgacgagcacttgttgatccaacactactgccagtccctaaatcaggattctccactgtctcagcctcgaagccccgcacagattttgataagcctggaaagtgaagaaaggggagagctagaacgcatcttggctgacctcgaggaggagaaccgcaacctgcaagcggagtacgaccggctcaaacagcagcatgaacataaaggtctttcccctttaccttctccgcctgagatgatgcctacgagtccacagagccctcgagacgccgagcttattgccgaggctaagctactcagacaacacaaaggccgcctggaagcgcgcatgcaaatactcgaggatcataacaaacagctggagtcccagttacaccgacttcgccagctgctagagcagccccaggctgaagccaaggtcaatgggaccaccgtatcttctccctctacctcgttacagcggtctgactccagccagcctatgttgttgcgagttgtgggtagccaaaccagcgactcgatgggggaagaagacctgctgagtccaccacaggatacgagtacagggcttgaagaggttatggagcagctgaataacagttttccatcttctagaggtaggaacacaccaggcaaaccaatgcgagaggatactccctag

SEQ ID NO: 1783 - DNA, 11034 bp, Artificial Sequence
  derived and/or modified sequence
atcctggatgagcgtgaggacgtgcaaaagaagactttcaccaagtgggtgaacgcacaattctccaagtttggcaaacaacacatagagaacctgttcagtgacctccaagatgggcgtagactgctcgacctgctggaagggctcaccgggcaaaagttgcctaaggagaaaggctctactcgcgttcacgctctgaataatgtgaacaaagcgctgagagtgctgcagaacaataacgttgatctggtgaatatcgggagcaccgacattgtggacggcaaccataaactgacgctcgggctcatttggaatattatcctccattggcaggttaagaacgtgatgaaaaatataatggcgggtttacagcagaccaattcggagaaaattctgctcagttgggtgcggcagagcaccagaaactatccccaggtgaatgtgattaactttaccacttcatggtcagatgggctcgccctgaatgctctcatacattcacataggcctgatctcttcgactggaattctgtggtgtgccaacaaagcgccacccaaaggttagaacacgccttcaacattgcgcgatatcagctaggaatagaaaagctccttgatcccgaagacgtagacacaacataccccgacaaaaaaagtatccttatgtacatcacaagtctgttccaggtgttgcctcagcaggtgtcaattgaggccattcaggaggtcgaaatgctaccacgaccaccaaaagtaaccaaggaggagcatttccaacttcaccatcagatgcactacagtcaacagatcaccgtctctctggctcagggctatgagaggacctcttctcccaagccacgctttaagtcctatgcctacacgcaagctgcctacgtgacgacctcagaccctaccagatcaccctttccaagccaacatctggaagcacccgaggataagagctttggttccagtctgatggaaagtgaggtgaatttggatagatatcaaaccgcattagaggaagtgctgagctggcttctgagcgccgaagatactctgcaggcgcagggcgagatctcaaacgatgttgaagttgtgaaagatcagttccatacccatgaggggtacatgatggacctgacagctcatcagggcagagtgggtaacattttgcagctgggcagcaagctgatcggaaccggtaagctgtccgaggatgaggaaacggaggtgcaagagcagatgaaccttctgaacagcaggtgggagtgcctgagggttgcatccatggaaaaacagtccaacctccaccgggtactaatggacctgcaaaatcaaaagcttaaagagctgaacgattggctaactaaaactgaggaacgaacaagaaagatggaggaggagcctctcggtcctgaccttgaagacctgaagcggcaggttcagcagcacaaagttcttcaggaagacctggagcaggaacaggtgagagtcaactccttgacacacatggtggtggttgtggatgaatcatccggcgaccatgccactgccgctctggaagagcagctaaaagtccttggtgataggtgggctaacatctgccgatggaccgaggataggtgggtcctgcttcaggatatcctactgaaatggcagcggctcactgaggaacaatgtctgtttagcgcatggctgagcgaaaaggaagatgccgtcaacaagatccataccactggatttaaggaccaaaatgagatgttgagtagtttgcagaagctggctgtgctgaaggctgatctcgagaagaagaaacaatcaatgggaaagctgtactctctgaaacaggacctgttgtctaccttaaagaacaaatccgtaacccaaaaaactgaggcttggctcgataattttgctagatgttgggataacctcgtgcaaaagctcgagaagtccaccgctcagatttcgcaggctgtgaccaccacgcagccatcactgacgcagaccaccgtcatggagactgtcaccacggtcacaaccagagagcagatcctagttaaacacgcccaggaggaactgccccctccaccaccccaaaaaaaacggcagattactgtggactccgaaattcgtaagcgactggatgttgacattactgagctgcacagctggattactcgatctgaggcagtgctgcagtcgcccgagtttgcaatattcagaaaggaaggcaacttctcagacttaaaagaaaaagtcaatgctatagagagagagaaagcagagaagttcaggaagctgcaggacgcttcccggagtgcacaagctctcgtggaacagatggtgaacgaaggggtcaacgcggactctataaagcaggcatccgaacagctgaattccaggtggatcgaattctgccaacttctttcagaaaggctgaactggctcgaataccaaaacaacattatcgctttctataaccaactgcagcagttggagcagatgaccaccaccgccgagaattggctaaaaatacaacctaccacacccagtgaacctaccgctatcaagtctcaactgaagatctgtaaggatgaagtgaaccggctttctgacctgcaacctcagattgaaagacttaagattcaaagcattgcgctcaaagagaagggtcagggacccatgtttctggatgcagacttcgttgcattcacaaaccacttcaaacaggttttctctgatgttcaggctcgggagaaggaactccagactatcttcgacaccctccccccaatgcgatatcaagagaccatgtccgcaattaggacctgggttcaacagtccgaaacgaagctgtctataccccaactctcggtgacagattacgagattatggaacagagactgggggagttgcaagccctccaatcttcccttcaggagcaacaatcggggctatactacctttctaccacagtcaaagaaatgagtaagaaagcccctagtgaaattagccgaaagtaccagtcagagtttgaggagatcgaaggaaggtggaaaaagctgtccagccagctggtcgaacactgccagaagctcgaggaacagatgaataaactgcggaagatccagaaccatatacaaaccctgaaaaaatggatggcggaggtggacgtctttctgaaagaggagtggccagcactgggggatagcgaaatcctcaagaagcagctgaagcagtgccggctgttggtgtctgacatccagactatacagccttcactcaacagtgtgaatgaaggcggtcagaaaataaagaacgaggccgaacccgaattcgcgtccaggctcgagaccgagttgaaggagttgaacactcagtgggaccatatgtgccaacaggtgtacgcacgtaaagaagctctgaaaggtgggctggagaaaaccgttagcctgcagaaggacctgtccgaaatgcacgaatggatgacgcaggctgaagaagaatatttggagagggactttgaatacaaaacacctgacgagcttcagaaggccgtggaagaaatgaaacgagccaaagaggaagcacaacagaaagaagcgaaagtcaaattgctgacagaatccgtgaatagcgtgattgctcaggccccacccgtggcccaggaagctctgaagaaagaactggagaccctgacaaccaactaccagtggttatgtacccggctcaatggaaagtgcaaaaccctcgaggaggtgtgggcatgctggcatgaacttctgtcatatctcgaaaaagccaacaagtggctcaatgaggttgaattcaaactgaaaaccacagaaaatatcccagggggagccgaggaaatctctgaagtactggacagcctcgagaatttgatgcgtcactccgaggataaccccaaccagattagaattcttgcacagaccttaaccgacggtggggtcatggatgaacttatcaacgaagagttggaaacatttaactcgcggtggagggaactccatgaagaagccgttcggaggcagaaacttctggagcagtctattcagagcgcacaggagacggagaaatctctgcacctgatccaagaatcactgactttcatcgacaaacaattagccgcatacattgccgacaaagtggatgcagcccaaatgccacaggaggcacagaaaatccagtctgatctgacatcccatgagatttccctggaggaaatgaagaaacataaccaagggaaggaggccgcacagcgagtgctgtcccagatagacgtcgcacagaaaaaactccaggatgtgagcatgaagtttagacttttccaaaagccagccaattttgagcagaggctccaggaaagtaagatgatactggatgaagtgaaaatgcatctccctgctctggagactaagtccgtggaacaggaagtggtgcagtcccagctcaatcactgcgtgaacctttacaaatctctgtccgaggtcaagagcgaggtcgaaatggtcattaagactggcaggcaaatcgtccaaaaaaagcagacagagaatcctaaggaattggacgaacgggtaacagctctgaagctgcattacaacgagctgggtgccaaggttacggagaggaagcaacaactggagaagtgcctgaaattgtcccgcaaaatgcggaaggagatgaatgttttaacagagtggcttgcagccacggatatggagcttaccaagcggtcagccgtggaggggatgcccagtaacctggattctgaagtggcgtggggcaaagcgactcaaaaagaaatcgagaagcaaaaagtgcatctgaaaagcatcacggaggtgggcgaggctcttaaaaccgtactgggaaaaaaagagacactcgtggaagataagctcagcttgctgaatagcaactggattgcagtgacatcaagagccgaagagtggctgaatctgcttttggaataccaaaagcacatggaaaccttcgatcagaacgtggaccacataaccaagtggattatccaagctgatacactcctcgatgagtctgagaaaaagaagccacagcagaaggaagacgtgctcaagcgccttaaagcggagctcaacgacataaggcccaaagtagacagcaccagagatcaagccgctaacttgatggccaatcggggtgatcattgcagaaaacttgtagagccacagatcagtgaacttaatcacaggtttgccgctattagtcacaggattaaaacgggcaaggcctccatccccttaaaagaacttgaacagttcaatagcgacatacagaaacttctcgaacccctggaggccgagatccaacagggcgtgaatttgaaagaagaagatttcaacaaagacatgaacgaagataatgaaggaacagtcaaagaactcttgcaacggggagataacctccagcagcgcatcaccgatgagcgtaaacgggaagagattaaaatcaagcagcagttgctgcagaccaaacataatgctctgaaagaccttcgctcacagcgaaggaagaaagccttggaaatcagccatcaatggtatcagtacaagcggcaggcagacgacttactaaagtgcctggatgacatagagaagaagctagcctctcttccagaaccacgcgatgaacggaaaatcaaggaaattgatagggaactccaaaaaaaaaaagaggagctgaatgccgtccgacgccaggcagaaggactttctgaagatggtgcagccatggcggtggaaccaactcagattcagctttcaaaacggtggcgtgagatagagagcaagtttgctcagttccgacggctcaactttgctcagatccacacggtgcgcgaggagacaatgatggttatgactgaggacatgccgctggagatatcgtacgttcctagtacataccttaccgagatcacacatgtgtcgcaagctctgctggaagtggagcagctcctgaacgcacctgatctgtgcgccaaagacttcgaggacttattcaagcaagaagagtctttaaaaaatattaaggattccctacagcaatcctctggcagaatcgacataatacactccaagaagaccgctgcactccagtcggcaactcctgtcgaaagggtgaagttgcaggaagccctctctcagttagactttcagtgggaaaaggttaataagatgtacaaagacagacagggcaggttcgacaggagtgttgagaaatggcgacgcttccactatgatattaaaattttcaaccagtggttgactgaagccgaacaatttctgaggaagacacagataccagagaattgggaacacgctaagtacaagtggtacctcaaggagctccaggacggtattggacagcgccagaccgtcgtaaggaccctgaatgccactggggaggagataatccagcagagcagtaagaccgacgcttcaattttgcaggagaaactgggctcccttaacctgagatggcaggaggtctgtaagcagctctcagatagaaaaaagagacttgaggagcagaagaatatacttagcgagtttcaaagggatctgaatgagttcgtcctctggctcgaggaagcagataatatagcctctatccctctcgagcctggcaaagaacagcagctgaaggaaaagctcgaacaggttaagctattagtcgaagagctccccttgagacaagggattctgaagcagctgaatgagactgggggaccggtcctcgtatcagctcctatttcacccgaggagcaggataaactagaaaacaaactgaagcagacaaacctacagtggatcaaggtatccagggcactgcctgagaaacaaggcgagattgaagcccaaatcaaggatctcgggcagctggagaaaaagcttgaagacctggaagagcagctaaatcacttgctgctttggctctcaccaatccggaaccagctggaaatctataaccagcccaaccaggagggaccatttgatgtgaaggagacagagatcgcagtccaagcaaaacagccagacgttgaagagattctatccaagggccagcacctgtacaaggaaaaaccggctactcagcccgttaaacggaagctggaggatttgtcctccgagtggaaggccgtgaacagacttctgcaggaacttcgtgcgaagcagcccgaccttgcgcctggactgacaaccataggcgcatctccgacacagacggtgactctggtgacccaaccggtggttacgaaggaaaccgcaatcagtaagttggagatgccttccagtttgatgctcgaggtcccagcgttagcagattttaatcgggcatggactgaacttactgattggctgtcccttttagaccaggtcattaagtcacagcgagtgatggtgggagatctcgaggacatcaatgagatgatcattaaacagaaggccactatgcaggacctagagcagagacggccacagctggaggagctgatcacggcagcccagaatctgaagaacaagaccagcaaccaggaggctcggacgataattaccgaccggatcgagaggatacaaaaccagtgggacgaagtgcaagaacatctacagaaccgccgacaacagctgaacgaaatgttaaaggattcaactcagtggctcgaggcgaaggaagaagcggaacaggtcctgggtcaagctcgtgccaaactagaaagctggaaagagggaccctatactgtcgacgccatccagaagaaaatcaccgagacgaaacaactggccaaggacctccgtcagtggcaaaccaatgtggatgtcgccaacgatctggccctcaagctgctgagggattattctgctgacgacacccgaaaagtgcacatgataactgagaacatcaacgcatcctggcggtcgattcataagagagtcagcgagagagaagcagcactggaagagacacaccgattgttacagcagttccccctcgatctcgaaaagttccttgcgtggctcacagaggctgagaccaccgccaacgtgctgcaagatgctacaaggaaagagcggctgctggaagatagcaaaggtgtgaaagagctcatgaaacagtggcaggaccttcaaggcgaaatcgaagcacacacagatgtataccacaacttagatgaaaatagccaaaaaattttgagatcgttggaagggagtgacgacgctgtgctccttcagcggagactggacaacatgaattttaagtggtcagagctccgcaaaaaatcactgaacatcaggtctcacttagaggcctctagcgaccagtggaagagattacatctctcactgcaggaattgttagtctggctccaactgaaagacgacgagctctcgaggcaagcaccgattggcggtgatttccccgctgtccagaagcagaacgacgtgcatcgtgccttcaaacgggaattgaagacaaaggagcctgtcattatgtccacgctcgaaactgtgcggatctttctgactgagcagcctctggagggcctggaaaaattgtaccaggagcctagggagttgcctcccgaagaacgcgctcagaatgttacacgcctgctgcgcaaacaggctgaagaggtgaataccgagtgggaaaaactcaacttacatagcgcagattggcagagaaagattgacgagactttagaaagattgcgtgaattgcaagaggcaactgacgaactcgacctgaaacttcgacaagccgaagtcattaaaggatcctggcagccggtgggcgatctactgatagacagtctgcaagatcatctggagaaggtgaaagccttacgcggagaaattgcaccactgaaggagaatgtgtcacacgtgaacgatctcgcacgccaacttacgacattagggatacagcttagcccatacaacctgtccacactcgaagacctgaacacaagatggaaattgcttcaggttgcagtggaggatcgcgtgcgccagctgcacgaggcgcacagagatttcgggccagcctcccagcactttctgtctaccagcgtgcaaggcccatgggagcgcgcaatttcacctaacaaagtgccgtattacatcaatcacgagactcaaactacttgctgggatcatccaaagatgaccgagctgtaccagagccttgcagatcttaataacgtacgcttctccgcgtatagaacagccatgaaacttaggaggcttcagaaggcactttgcctggacttgctgagtctgagcgcagcctgcgacgccctggatcagcataatctaaaacagaacgatcagcctatggatattctgcaaattatcaattgtctgaccaccatttatgatcggctggaacaggagcacaataacctggtgaatgtgcccctctgcgtggatatgtgtctcaattggctcctgaacgtttacgacactggacggacaggccgaatccgagtgcttagctttaagacaggaatcatttctctgtgtaaggcacacttggaagataagtatcgctatctctttaaacaagtcgcctcatccactgggttctgtgaccagaggcgtctggggctgctcctacacgattccatccagatcccacgccagttaggtgaagtcgcctcattcggcggaagcaacattgaacccagcgttcggtcgtgcttccagtttgcaaacaacaaacctgagattgaggctgctctattcttggactggatgcgactcgagccgcagagtatggtctggctgccggtgttacatcgtgtggccgcagcggagaccgctaaacatcaggctaagtgtaacatatgcaaagaatgtccaataataggatttcgataccggtcactgaagcattttaactacgatatctgtcagtcttgctttttcagcggtcgagtcgccaagggacataaaatgcactatccaatggtcgagtattgtactccaactactagcggagaggacgtacgcgactttgctaaagtgctcaagaataagttcaggacaaaacgctatttcgctaaacatccgaggatgggatacctgccggttcagacggtcctggagggtgataacatggagacgcccgtcactctgatcaacttctggccagtcgatagcgccccagcctcgtcgccacaacttagtcatgacgacacccattcgagaatcgagcattacgcatcacgtctggccgaaatggaaaacagtaatggctcgtatctgaatgactcaatctctcctaatgagagtatagatgatgagcatctactgatacagcactactgccagagcctaaaccaggactcccctctatcccagccgcgatctccggctcagatcctgatttccttggagtctgaggagagaggcgagctggaaaggattctggcagacctggaagaggaaaaccgcaacctgcaagcagagtatgacaggctgaaacaacagcatgaacacaagggactttcgcctctgccctcaccgccagagatgatgcccacttctcctcagtcccctcgcgacgctgagctgatcgcagaggcaaagctcttacgtcagcataaggggcgtcttgaagcccgaatgcaaatcctcgaggaccacaataaacagctggagtcacagctgcatagactccgacagctccttgagcaaccccaagccgaggccaaagtgaatgggacgacagtcagttccccctctacatctcttcagcgctccgatagctctcagcctatgctgctgcgcgttgtgggcagtcagaccagcgattccatgggtgaggaagatcttctgtcccctccccaggacacctctacaggcctcgaagaggttatggaacagctgaataatagtttcccttcaagccgcggacgaaatacccccggtaagccgatgagggaggatacaccctaa

SEQ ID NO: 1784 - DNA, 11034 bp, Artificial Sequence
  derived and/or modified sequence
atcctggacgagagagaggacgtgcagaagaagaccttcaccaagtgggtgaacgcccagttcagcaagttcggcaagcagcacatcgagaacctgttcagcgacctgcaggacggcagaagactgctggacctgctggagggcctgaccggccagaagctgcccaaggagaagggcagcaccagagtgcacgccctgaacaacgtgaacaaggccctgagagtgctgcagaacaacaacgtggacctggtgaacatcggcagcaccgacatcgtggacggcaaccacaagctgaccctgggcctgatctggaacatcatcctgcactggcaggtgaagaacgtgatgaagaacatcatggccggcctgcagcagaccaacagcgagaagatcctgctgagctgggtgagacagagcaccagaaactacccccaggtgaacgtgatcaacttcaccaccagctggagcgacggcctggccctgaacgccctgatccacagccacagacccgacctgttcgactggaacagcgtggtgtgccagcagagcgccacccagagactggagcacgccttcaacatcgccagataccagctgggcatcgagaagctgctggaccccgaggacgtggacaccacctaccccgacaagaagagcatcctgatgtacatcaccagcctgttccaggtgctgccccagcaggtgagcatcgaggccatccaggaggtggagatgctgcccagaccccccaaggtgaccaaggaggagcacttccagctgcaccaccagatgcactacagccagcagatcaccgtgagcctggcccagggctacgagagaaccagcagccccaagcccagattcaagagctacgcctacacccaggccgcctacgtgaccaccagcgaccccaccagaagccccttccccagccagcacctggaggcccccgaggacaagagcttcggcagcagcctgatggagagcgaggtgaacctggacagataccagaccgccctggaggaggtgctgagctggctgctgagcgccgaggacaccctgcaggcccagggcgagatcagcaacgacgtggaggtggtgaaggaccagttccacacccacgagggctacatgatggacctgaccgcccaccagggcagagtgggcaacatcctgcagctgggcagcaagctgatcggcaccggcaagctgagcgaggacgaggagaccgaggtgcaggagcagatgaacctgctgaacagcagatgggagtgcctgagagtggccagcatggagaagcagagcaacctgcacagagtgctgatggacctgcagaaccagaagctgaaggagctgaacgactggctgaccaagaccgaggagagaaccagaaagatggaggaggagcccctgggccccgacctggaggacctgaagagacaggtgcagcagcacaaggtgctgcaggaggacctggagcaggagcaggtgagagtgaacagcctgacccacatggtggtggtggtggacgagagcagcggcgaccacgccaccgccgccctggaggagcagctgaaggtgctgggcgacagatgggccaacatctgcagatggaccgaggacagatgggtgctgctgcaggacatcctgctgaagtggcagagactgaccgaggagcagtgcctgttcagcgcctggctgagcgagaaggaggacgccgtgaacaagatccacaccaccggcttcaaggaccagaacgagatgctgagcagcctgcagaagctggccgtgctgaaggccgacctggagaagaagaagcagagcatgggcaagctgtacagcctgaagcaggacctgctgagcaccctgaagaacaagagcgtgacccagaagaccgaggcctggctggacaacttcgccagatgctgggacaacctggtgcagaagctggagaagagcaccgcccagatcagccaggccgtgaccaccacccagcccagcctgacccagaccaccgtgatggagaccgtgaccaccgtgaccaccagagagcagatcctggtgaagcacgcccaggaggagctgccccccccccccccccagaagaagagacagatcaccgtggacagcgagatcagaaagagactggacgtggacatcaccgagctgcacagctggatcaccagaagcgaggccgtgctgcagagccccgagttcgccatcttcagaaaggagggcaacttcagcgacctgaaggagaaggtgaacgccatcgagagagagaaggccgagaagttcagaaagctgcaggacgccagcagaagcgcccaggccctggtggagcagatggtgaacgagggcgtgaacgccgacagcatcaagcaggccagcgagcagctgaacagcagatggatcgagttctgccagctgctgagcgagagactgaactggctggagtaccagaacaacatcatcgccttctacaaccagctgcagcagctggagcagatgaccaccaccgccgagaactggctgaagatccagcccaccacccccagcgagcccaccgccatcaagagccagctgaagatctgcaaggacgaggtgaacagactgagcgacctgcagccccagatcgagagactgaagatccagagcatcgccctgaaggagaagggccagggccccatgttcctggacgccgacttcgtggccttcaccaaccacttcaagcaggtgttcagcgacgtgcaggccagagagaaggagctgcagaccatcttcgacaccctgccccccatgagataccaggagaccatgagcgccatcagaacctgggtgcagcagagcgagaccaagctgagcatcccccagctgagcgtgaccgactacgagatcatggagcagagactgggcgagctgcaggccctgcagagcagcctgcaggagcagcagagcggcctgtactacctgagcaccaccgtgaaggagatgagcaagaaggcccccagcgagatcagcagaaagtaccagagcgagttcgaggagatcgagggcagatggaagaagctgagcagccagctggtggagcactgccagaagctggaggagcagatgaacaagctgagaaagatccagaaccacatccagaccctgaagaagtggatggccgaggtggacgtgttcctgaaggaggagtggcccgccctgggcgacagcgagatcctgaagaagcagctgaagcagtgcagactgctggtgagcgacatccagaccatccagcccagcctgaacagcgtgaacgagggcggccagaagatcaagaacgaggccgagcccgagttcgccagcagactggagaccgagctgaaggagctgaacacccagtgggaccacatgtgccagcaggtgtacgccagaaaggaggccctgaagggcggcctggagaagaccgtgagcctgcagaaggacctgagcgagatgcacgagtggatgacccaggccgaggaggagtacctggagagagacttcgagtacaagacccccgacgagctgcagaaggccgtggaggagatgaagagagccaaggaggaggcccagcagaaggaggccaaggtgaagctgctgaccgagagcgtgaacagcgtgatcgcccaggccccccccgtggcccaggaggccctgaagaaggagctggagaccctgaccaccaactaccagtggctgtgcaccagactgaacggcaagtgcaagaccctggaggaggtgtgggcctgctggcacgagctgctgagctacctggagaaggccaacaagtggctgaacgaggtggagttcaagctgaagaccaccgagaacatccccggcggcgccgaggagatcagcgaggtgctggacagcctggagaacctgatgagacacagcgaggacaaccccaaccagatcagaatcctggcccagaccctgaccgacggcggcgtgatggacgagctgatcaacgaggagctggagaccttcaacagcagatggagagagctgcacgaggaggccgtgagaagacagaagctgctggagcagagcatccagagcgcccaggagaccgagaagagcctgcacctgatccaggagagcctgaccttcatcgacaagcagctggccgcctacatcgccgacaaggtggacgccgcccagatgccccaggaggcccagaagatccagagcgacctgaccagccacgagatcagcctggaggagatgaagaagcacaaccagggcaaggaggccgcccagagagtgctgagccagatcgacgtggcccagaagaagctgcaggacgtgagcatgaagttcagactgttccagaagcccgccaacttcgagcagagactgcaggagagcaagatgatcctggacgaggtgaagatgcacctgcccgccctggagaccaagagcgtggagcaggaggtggtgcagagccagctgaaccactgcgtgaacctgtacaagagcctgagcgaggtgaagagcgaggtggagatggtgatcaagaccggcagacagatcgtgcagaagaagcagaccgagaaccccaaggagctggacgagagagtgaccgccctgaagctgcactacaacgagctgggcgccaaggtgaccgagagaaagcagcagctggagaagtgcctgaagctgagcagaaagatgagaaaggagatgaacgtgctgaccgagtggctggccgccaccgacatggagctgaccaagagaagcgccgtggagggcatgcccagcaacctggacagcgaggtggcctggggcaaggccacccagaaggagatcgagaagcagaaggtgcacctgaagagcatcaccgaggtgggcgaggccctgaagaccgtgctgggcaagaaggagaccctggtggaggacaagctgagcctgctgaacagcaactggatcgccgtgaccagcagagccgaggagtggctgaacctgctgctggagtaccagaagcacatggagaccttcgaccagaacgtggaccacatcaccaagtggatcatccaggccgacaccctgctggacgagagcgagaagaagaagccccagcagaaggaggacgtgctgaagagactgaaggccgagctgaacgacatcagacccaaggtggacagcaccagagaccaggccgccaacctgatggccaacagaggcgaccactgcagaaagctggtggagccccagatcagcgagctgaaccacagattcgccgccatcagccacagaatcaagaccggcaaggccagcatccccctgaaggagctggagcagttcaacagcgacatccagaagctgctggagcccctggaggccgagatccagcagggcgtgaacctgaaggaggaggacttcaacaaggacatgaacgaggacaacgagggcaccgtgaaggagctgctgcagagaggcgacaacctgcagcagagaatcaccgacgagagaaagagagaggagatcaagatcaagcagcagctgctgcagaccaagcacaacgccctgaaggacctgagaagccagagaagaaagaaggccctggagatcagccaccagtggtaccagtacaagagacaggccgacgacctgctgaagtgcctggacgacatcgagaagaagctggccagcctgcccgagcccagagacgagagaaagatcaaggagatcgacagagagctgcagaagaagaaggaggagctgaacgccgtgagaagacaggccgagggcctgagcgaggacggcgccgccatggccgtggagcccacccagatccagctgagcaagagatggagagagatcgagagcaagttcgcccagttcagaagactgaacttcgcccagatccacaccgtgagagaggagaccatgatggtgatgaccgaggacatgcccctggagatcagctacgtgcccagcacctacctgaccgagatcacccacgtgagccaggccctgctggaggtggagcagctgctgaacgcccccgacctgtgcgccaaggacttcgaggacctgttcaagcaggaggagagcctgaagaacatcaaggacagcctgcagcagagcagcggcagaatcgacatcatccacagcaagaagaccgccgccctgcagagcgccacccccgtggagagagtgaagctgcaggaggccctgagccagctggacttccagtgggagaaggtgaacaagatgtacaaggacagacagggcagattcgacagaagcgtggagaagtggagaagattccactacgacatcaagatcttcaaccagtggctgaccgaggccgagcagttcctgagaaagacccagatccccgagaactgggagcacgccaagtacaagtggtacctgaaggagctgcaggacggcatcggccagagacagaccgtggtgagaaccctgaacgccaccggcgaggagatcatccagcagagcagcaagaccgacgccagcatcctgcaggagaagctgggcagcctgaacctgagatggcaggaggtgtgcaagcagctgagcgacagaaagaagagactggaggagcagaagaacatcctgagcgagttccagagagacctgaacgagttcgtgctgtggctggaggaggccgacaacatcgccagcatccccctggagcccggcaaggagcagcagctgaaggagaagctggagcaggtgaagctgctggtggaggagctgcccctgagacagggcatcctgaagcagctgaacgagaccggcggccccgtgctggtgagcgcccccatcagccccgaggagcaggacaagctggagaacaagctgaagcagaccaacctgcagtggatcaaggtgagcagagccctgcccgagaagcagggcgagatcgaggcccagatcaaggacctgggccagctggagaagaagctggaggacctggaggagcagctgaaccacctgctgctgtggctgagccccatcagaaaccagctggagatctacaaccagcccaaccaggagggccccttcgacgtgaaggagaccgagatcgccgtgcaggccaagcagcccgacgtggaggagatcctgagcaagggccagcacctgtacaaggagaagcccgccacccagcccgtgaagagaaagctggaggacctgagcagcgagtggaaggccgtgaacagactgctgcaggagctgagagccaagcagcccgacctggcccccggcctgaccaccatcggcgccagccccacccagaccgtgaccctggtgacccagcccgtggtgaccaaggagaccgccatcagcaagctggagatgcccagcagcctgatgctggaggtgcccgccctggccgacttcaacagagcctggaccgagctgaccgactggctgagcctgctggaccaggtgatcaagagccagagagtgatggtgggcgacctggaggacatcaacgagatgatcatcaagcagaaggccaccatgcaggacctggagcagagaagaccccagctggaggagctgatcaccgccgcccagaacctgaagaacaagaccagcaaccaggaggccagaaccatcatcaccgacagaatcgagagaatccagaaccagtgggacgaggtgcaggagcacctgcagaacagaagacagcagctgaacgagatgctgaaggacagcacccagtggctggaggccaaggaggaggccgagcaggtgctgggccaggccagagccaagctggagagctggaaggagggcccctacaccgtggacgccatccagaagaagatcaccgagaccaagcagctggccaaggacctgagacagtggcagaccaacgtggacgtggccaacgacctggccctgaagctgctgagagactacagcgccgacgacaccagaaaggtgcacatgatcaccgagaacatcaacgccagctggagaagcatccacaagagagtgagcgagagagaggccgccctggaggagacccacagactgctgcagcagttccccctggacctggagaagttcctggcctggctgaccgaggccgagaccaccgccaacgtgctgcaggacgccaccagaaaggagagactgctggaggacagcaagggcgtgaaggagctgatgaagcagtggcaggacctgcagggcgagatcgaggcccacaccgacgtgtaccacaacctggacgagaacagccagaagatcctgagaagcctggagggcagcgacgacgccgtgctgctgcagagaagactggacaacatgaacttcaagtggagcgagctgagaaagaagagcctgaacatcagaagccacctggaggccagcagcgaccagtggaagagactgcacctgagcctgcaggagctgctggtgtggctgcagctgaaggacgacgagctgagcagacaggcccccatcggcggcgacttccccgccgtgcagaagcagaacgacgtgcacagagccttcaagagagagctgaagaccaaggagcccgtgatcatgagcaccctggagaccgtgagaatcttcctgaccgagcagcccctggagggcctggagaagctgtaccaggagcccagagagctgccccccgaggagagagcccagaacgtgaccagactgctgagaaagcaggccgaggaggtgaacaccgagtgggagaagctgaacctgcacagcgccgactggcagagaaagatcgacgagaccctggagagactgagagagctgcaggaggccaccgacgagctggacctgaagctgagacaggccgaggtgatcaagggcagctggcagcccgtgggcgacctgctgatcgacagcctgcaggaccacctggagaaggtgaaggccctgagaggcgagatcgcccccctgaaggagaacgtgagccacgtgaacgacctggccagacagctgaccaccctgggcatccagctgagcccctacaacctgagcaccctggaggacctgaacaccagatggaagctgctgcaggtggccgtggaggacagagtgagacagctgcacgaggcccacagagacttcggccccgccagccagcacttcctgagcaccagcgtgcagggcccctgggagagagccatcagccccaacaaggtgccctactacatcaaccacgagacccagaccacctgctgggaccaccccaagatgaccgagctgtaccagagcctggccgacctgaacaacgtgagattcagcgcctacagaaccgccatgaagctgagaagactgcagaaggccctgtgcctggacctgctgagcctgagcgccgcctgcgacgccctggaccagcacaacctgaagcagaacgaccagcccatggacatcctgcagatcatcaactgcctgaccaccatctacgacagactggagcaggagcacaacaacctggtgaacgtgcccctgtgcgtggacatgtgcctgaactggctgctgaacgtgtacgacaccggcagaaccggcagaatcagagtgctgagcttcaagaccggcatcatcagcctgtgcaaggcccacctggaggacaagtacagatacctgttcaagcaggtggccagcagcaccggcttctgcgaccagagaagactgggcctgctgctgcacgacagcatccagatccccagacagctgggcgaggtggccagcttcggcggcagcaacatcgagcccagcgtgagaagctgcttccagttcgccaacaacaagcccgagatcgaggccgccctgttcctggactggatgagactggagccccagagcatggtgtggctgcccgtgctgcacagagtggccgccgccgagaccgccaagcaccaggccaagtgcaacatctgcaaggagtgccccatcatcggcttcagatacagaagcctgaagcacttcaactacgacatctgccagagctgcttcttcagcggcagagtggccaagggccacaagatgcactaccccatggtggagtactgcacccccaccaccagcggcgaggacgtgagagacttcgccaaggtgctgaagaacaagttcagaaccaagagatacttcgccaagcaccccagaatgggctacctgcccgtgcagaccgtgctggagggcgacaacatggagacccccgtgaccctgatcaacttctggcccgtggacagcgcccccgccagcagcccccagctgagccacgacgacacccacagcagaatcgagcactacgccagcagactggccgagatggagaacagcaacggcagctacctgaacgacagcatcagccccaacgagagcatcgacgacgagcacctgctgatccagcactactgccagagcctgaaccaggacagccccctgagccagcccagaagccccgcccagatcctgatcagcctggagagcgaggagagaggcgagctggagagaatcctggccgacctggaggaggagaacagaaacctgcaggccgagtacgacagactgaagcagcagcacgagcacaagggcctgagccccctgcccagcccccccgagatgatgcccaccagcccccagagccccagagacgccgagctgatcgccgaggccaagctgctgagacagcacaagggcagactggaggccagaatgcagatcctggaggaccacaacaagcagctggagagccagctgcacagactgagacagctgctggagcagccccaggccgaggccaaggtgaacggcaccaccgtgagcagccccagcaccagcctgcagagaagcgacagcagccagcccatgctgctgagagtggtgggcagccagaccagcgacagcatgggcgaggaggacctgctgagccccccccaggacaccagcaccggcctggaggaggtgatggagcagctgaacaacagcttccccagcagcagaggcagaaacacccccggcaagcccatgagagaggacaccccctag

SEQ ID NO: 1785 - DNA, 11031 bp, Artificial Sequence
  derived and/or modified sequence
attttagatgaaagagaagatgttcaaaagaaaacattcacaaaatgggtaaatgcacaattttctaagtttgggaagcagcatattgagaacctcttcagtgacctacaggatgggaggcgcctcctagacctcctcgaaggcctgacagggcaaaaactgccaaaagaaaaaggatccacaagagttcatgccctgaacaatgtcaacaaggcactgcgggttttgcagaacaataatgttgatttagtgaatattggaagtactgacatcgtagatggaaatcataaactgactcttggtttgatttggaatataatcctccactggcaggtcaaaaatgtaatgaaaaatatcatggctggattgcaacaaaccaacagtgaaaagattctcctgagctgggtccgacaatcaactcgtaattatccacaggttaatgtaatcaacttcaccaccagctggtctgatggcctggctttgaatgctctcatccatagtcataggccagacctatttgactggaatagtgtggtttgccagcagtcagccacacaacgactggaacatgcattcaacatcgccagatatcaattaggcatagagaaactactcgatcctgaagatgttgataccacctatccagataagaagtccatcttaatgtacatcacatcactcttccaagttttgcctcaacaagtgagcattgaagccatccaggaagtggaaatgttgccaaggccacctaaagtgactaaagaagaacattttcagttacatcatcaaatgcactattctcaacagatcacggtcagtctagcacagggatatgagagaacttcttcccctaagcctcgattcaagagctatgcctacacacaggctgcttatgtcaccacctctgaccctacacggagcccatttccttcacagcatttggaagctcctgaagacaagtcatttggcagttcattgatggagagtgaagtaaacctggaccgttatcaaacagctttagaagaagtattatcgtggcttctttctgctgaggacacattgcaagcacaaggagagatttctaatgatgtggaagtggtgaaagaccagtttcatactcatgaggggtacatgatggatttgacagcccatcagggccgggttggtaatattctacaattgggaagtaagctgattggaacaggaaaattatcagaagatgaagaaactgaagtacaagagcagatgaatctcctaaattcaagatgggaatgcctcagggtagctagcatggaaaaacaaagcaatttacatagagttttaatggatctccagaatcagaaactgaaagagttgaatgactggctaacaaaaacagaagaaagaacaaggaaaatggaggaagagcctcttggacctgatcttgaagacctaaaacgccaagtacaacaacataaggtgcttcaagaagatctagaacaagaacaagtcagggtcaattctctcactcacatggtggtggtagttgatgaatctagtggagatcacgcaactgctgctttggaagaacaacttaaggtattgggagatcgatgggcaaacatctgtagatggacagaagaccgctgggttcttttacaagacatccttctcaaatggcaacgtcttactgaagaacagtgcctttttagtgcatggctttcagaaaaagaagatgcagtgaacaagattcacacaactggctttaaagatcaaaatgaaatgttatcaagtcttcaaaaactggccgttttaaaagcggatctagaaaagaaaaagcaatccatgggcaaactgtattcactcaaacaagatcttctttcaacactgaagaataagtcagtgacccagaagacggaagcatggctggataactttgcccggtgttgggataatttagtccaaaaacttgaaaagagtacagcacagatttcacaggctgtcaccaccactcagccatcactaacacagacaactgtaatggaaacagtaactacggtgaccacaagggaacagatcctggtaaagcatgctcaagaggaacttccaccaccacctccccaaaagaagaggcagattactgtggattctgaaattaggaaaaggttggatgttgatataactgaacttcacagctggattactcgctcagaagctgtgttgcagagtcctgaatttgcaatctttcggaaggaaggcaacttctcagacttaaaagaaaaagtcaatgccatagagcgagaaaaagctgagaagttcagaaaactgcaagatgccagcagatcagctcaggccctggtggaacagatggtgaatgagggtgttaatgcagatagcatcaaacaagcctcagaacaactgaacagccggtggatcgaattctgccagttgctaagtgagagacttaactggctggagtatcagaacaacatcatcgctttctataatcagctacaacaattggagcagatgacaactactgctgaaaactggttgaaaatccaacccaccaccccatcagagccaacagcaattaaaagtcagttaaaaatttgtaaggatgaagtcaaccggctatcagatcttcaacctcaaattgaacgattaaaaattcaaagcatagccctgaaagagaaaggacaaggacccatgttcctggatgcagactttgtggcctttacaaatcattttaagcaagtcttttctgatgtgcaggccagagagaaagagctacagacaatttttgacactttgccaccaatgcgctatcaggagaccatgagtgccatcaggacatgggtccagcagtcagaaaccaaactctccatacctcaacttagtgtcaccgactatgaaatcatggagcagagactcggggaattgcaggctttacaaagttctctgcaagagcaacaaagtggcctatactatctcagcaccactgtgaaagagatgtcgaagaaagcgccctctgaaattagccggaaatatcaatcagaatttgaagaaattgagggacgctggaagaagctctcctcccagctggttgagcattgtcaaaagctagaggagcaaatgaataaactccgaaaaattcagaatcacatacaaaccctgaagaaatggatggctgaagttgatgtttttctgaaggaggaatggcctgcccttggggattcagaaattctaaaaaagcagctgaaacagtgcagacttttagtcagtgatattcagacaattcagcccagtctaaacagtgtcaatgaaggtgggcagaagataaagaatgaagcagagccagagtttgcttcgagacttgagacagaactcaaagaacttaacactcagtgggatcacatgtgccaacaggtctatgccagaaaggaggccttgaagggaggtttggagaaaactgtaagcctccagaaagatctatcagagatgcacgaatggatgacacaagctgaagaagagtatcttgagagagattttgaatataaaactccagatgaattacagaaagcagttgaagagatgaagagagctaaagaagaggcccaacaaaaagaagcgaaagtgaaactccttactgagtctgtaaatagtgtcatagctcaagctccacctgtagcacaagaggccttaaaaaaggaacttgaaactctaaccaccaactaccagtggctctgcactaggctgaatgggaaatgcaagactttggaagaagtttgggcatgttggcatgagttattgtcatacttggagaaagcaaacaagtggctaaatgaagtagaatttaaacttaaaaccactgaaaacattcctggcggagctgaggaaatctctgaggtgctagattcacttgaaaatttgatgcgacattcagaggataacccaaatcagattcgcatattggcacagaccctaacagatggcggagtcatggatgagctaatcaatgaggaacttgagacatttaattctcgttggagggaactacatgaagaggctgtaaggaggcaaaagttgcttgaacagagcatccagtctgcccaggagactgaaaaatccttacacttaatccaggagtccctcacattcattgacaagcagttggcagcttatattgcagacaaggtggacgcagctcaaatgcctcaggaagcccagaaaatccaatctgatttgacaagtcatgagatcagtttagaagaaatgaagaaacataatcaggggaaggaggctgcccaaagagtcctgtctcagattgatgttgcacagaaaaaattacaagatgtctccatgaagtttcgattattccagaaaccagccaattttgagcagcgtctacaagaaagtaagatgattttagatgaagtgaagatgcacttgcctgcattggaaacaaagagtgtggaacaggaagtagtacagtcacagctaaatcattgtgtgaacttgtataaaagtctgagtgaagtgaagtctgaagtggaaatggtgataaagactggacgtcagattgtacagaaaaagcagacggaaaatcccaaagaacttgatgaaagagtaacagctttgaaattgcattataatgagctgggagcaaaggtaacagaaagaaagcaacagttggagaaatgcttgaaattgtcccgtaagatgcgaaaggaaatgaatgtcttgacagaatggctggcagctacagatatggaattgacaaagagatcagcagttgaaggaatgcctagtaatttggattctgaagttgcctggggaaaggctactcaaaaagagattgagaaacagaaggtgcacctgaagagtatcacagaggtaggagaggccttgaaaacagttttgggcaagaaggagacgttggtggaagataaactcagtcttctgaatagtaactggatagctgtcacctcccgagcagaagagtggttaaatcttttgttggaataccagaaacacatggaaacttttgaccagaatgtggaccacatcacaaagtggatcattcaggctgacacacttttggatgaatcagagaaaaagaaaccccagcaaaaagaagacgtgcttaagcgtttaaaggcagaactgaatgacatacgcccaaaggtggactctacacgtgaccaagcagcaaacttgatggcaaaccgcggtgaccactgcaggaaattagtagagccccaaatctcagagctcaaccatcgatttgcagccatttcacacagaattaagactggaaaggcctccattcctttgaaggaattggagcagtttaactcagatatacaaaaattgcttgaaccactggaggctgaaattcagcagggggtgaatctgaaagaggaagacttcaataaagatatgaatgaagacaatgagggtactgtaaaagaattgttgcaaagaggagacaacttacaacaaagaatcacagatgagagaaagcgagaggaaataaagataaaacagcagctgttacagacaaaacataatgctctcaaggatttgaggtctcaaagaagaaaaaaggctctagaaatttctcatcagtggtatcagtacaagaggcaggctgatgatctcctgaaatgcttggatgacattgaaaaaaaattagccagcctacctgagcccagagatgaaaggaaaataaaggaaattgatcgggaattgcagaagaagaaagaggagctgaatgcagtgcgtaggcaagctgagggcttgtctgaggatggggccgcaatggcagtggagccaactcagatccagctcagcaagcgctggcgggaaattgagagcaaatttgctcagtttcgaagactcaactttgcacaaattcacactgtccgtgaagaaacgatgatggtgatgactgaagacatgcctttggaaatttcttatgtgccttctacttatttgactgaaatcactcatgtctcacaagccctattagaagtggaacaacttctcaatgctcctgacctctgtgctaaggactttgaagatctctttaagcaagaggagtctctgaagaatataaaagatagtctacaacaaagctcaggtcggattgacattattcatagcaagaagacagcagcattgcaaagtgcaacgcctgtggaaagggtgaagctacaggaagctctctcccagcttgatttccaatgggaaaaagttaacaaaatgtacaaggaccgacaagggcgatttgacagatctgttgagaaatggcggcgttttcattatgatataaagatatttaatcagtggctaacagaagctgaacagtttctcagaaagacacaaattcctgagaattgggaacatgctaaatacaaatggtatcttaaggaactccaggatggcattgggcagcggcaaactgttgtcagaacattgaatgcaactggggaagaaataattcagcaatcctcaaaaacagatgccagtattctacaggaaaaattgggaagcctgaatctgcggtggcaggaggtctgcaaacagctgtcagacagaaaaaagaggctagaagaacaaaagaatatcttgtcagaatttcaaagagatttaaatgaatttgttttatggttggaggaagcagataacattgctagtatcccacttgaacctggaaaagagcagcaactaaaagaaaagcttgagcaagtcaagttactggtggaagagttgcccctgcgccagggaattctcaaacaattaaatgaaactggaggacccgtgcttgtaagtgctcccataagcccagaagagcaagataaacttgaaaataagctcaagcagacaaatctccagtggataaaggtttccagagctttacctgagaaacaaggagaaattgaagctcaaataaaagaccttgggcagcttgaaaaaaagcttgaagaccttgaagagcagttaaatcatctgctgctgtggttatctcctattaggaatcagttggaaatttataaccaaccaaaccaagaaggaccatttgacgttaaggaaactgaaatagcagttcaagctaaacaaccggatgtggaagagattttgtctaaagggcagcatttgtacaaggaaaaaccagccactcagccagtgaagaggaagttagaagatctgagctctgagtggaaggcggtaaaccgtttacttcaagagctgagggcaaagcagcctgacctagctcctggactgaccactattggagcctctcctactcagactgttactctggtgacacaacctgtggttactaaggaaactgccatctccaaactagaaatgccatcttccttgatgttggaggtacctgctctggcagatttcaaccgggcttggacagaacttaccgactggctttctctgcttgatcaagttataaaatcacagagggtgatggtgggtgaccttgaggatatcaacgagatgatcatcaagcagaaggcaacaatgcaggatttggaacagaggcgtccccagttggaagaactcattaccgctgcccaaaatttgaaaaacaagaccagcaatcaagaggctagaacaatcattacggatcgaattgaaagaattcagaatcagtgggatgaagtacaagaacaccttcagaaccggaggcaacagttgaatgaaatgttaaaggattcaacacaatggctggaagctaaggaagaagctgagcaggtcttaggacaggccagagccaagcttgagtcatggaaggagggtccctatacagtagatgcaatccaaaagaaaatcacagaaaccaagcagttggccaaagacctccgccagtggcagacaaatgtagatgtggcaaatgacttggccctgaaacttctccgggattattctgcagatgataccagaaaagtccacatgataacagagaatatcaatgcctcttggagaagcattcataaaagggtgagtgagcgagaggctgctttggaagaaactcatagattactgcaacagttccccctggacctggaaaagtttcttgcctggcttacagaagctgaaacaactgccaatgtcctacaggatgctacccgtaaggaaaggctcctagaagactccaagggagtaaaagagctgatgaaacaatggcaagacctccaaggtgaaattgaagctcacacagatgtttatcacaacctggatgaaaacagccaaaaaatcctgagatccctggaaggttccgatgatgcagtcctgttacaaagacgtttggataacatgaacttcaagtggagtgaacttcggaaaaagtctctcaacattaggtcccatttggaagccagttctgaccagtggaagcgtctgcacctttctctgcaggaacttctggtgtggctacagctgaaagatgatgaattaagccggcaggcacctattggaggcgactttccagcagttcagaagcagaacgatgtacatagggccttcaagagggaattgaaaactaaagaacctgtaatcatgagtactcttgagactgtacgaatatttctgacagagcagcctttggaaggactagagaaactctaccaggagcccagagagctgcctcctgaggagagagcccagaatgtcactcggcttctacgaaagcaggctgaggaggtcaatactgagtgggaaaaattgaacctgcactccgctgactggcagagaaaaatagatgagacccttgaaagactccgggaacttcaagaggccacggatgagctggacctcaagctgcgccaagctgaggtgatcaagggatcctggcagcccgtgggcgatctcctcattgactctctccaagatcacctcgagaaagtcaaggcacttcgaggagaaattgcgcctctgaaagagaacgtgagccacgtcaatgaccttgctcgccagcttaccactttgggcattcagctctcaccgtataacctcagcactctggaagacctgaacaccagatggaagcttctgcaggtggccgtcgaggaccgagtcaggcagctgcatgaagcccacagggactttggtccagcatctcagcactttctttccacgtctgtccagggtccctgggagagagccatctcgccaaacaaagtgccctactatatcaaccacgagactcaaacaacttgctgggaccatcccaaaatgacagagctctaccagtctttagctgacctgaataatgtcagattctcagcttataggactgccatgaaactccgaagactgcagaaggccctttgcttggatctcttgagcctgtcagctgcatgtgatgccttggaccagcacaacctcaagcaaaatgaccagcccatggatatcctgcagattattaattgtttgaccactatttatgaccgcctggagcaagagcacaacaatttggtcaacgtccctctctgcgtggatatgtgtctgaactggctgctgaatgtttatgatacgggacgaacagggaggatccgtgtcctgtcttttaaaactggcatcatttccctgtgtaaagcacatttggaagacaagtacagataccttttcaagcaagtggcaagttcaacaggattttgtgaccagcgcaggctgggcctccttctgcatgattctatccaaattccaagacagttgggtgaagttgcatcctttgggggcagtaacattgagccaagtgtccggagctgcttccaatttgctaataataagccagagatcgaagcggccctcttcctagactggatgagactggaaccccagtccatggtgtggctgcccgtcctgcacagagtggctgctgcagaaactgccaagcatcaggccaaatgtaacatctgcaaagagtgtccaatcattggattcaggtacaggagtctaaagcactttaattatgacatctgccaaagctgctttttttctggtcgagttgcaaaaggccataaaatgcactatcccatggtggaatattgcactccgactacatcaggagaagatgttcgagactttgccaaggtactaaaaaacaaatttcgaaccaaaaggtattttgcgaagcatccccgaatgggctacctgccagtgcagactgtcttagagggggacaacatggaaactcccgttactctgatcaacttctggccagtagattctgcgcctgcctcgtcccctcagctttcacacgatgatactcattcacgcattgaacattatgctagcaggctagcagaaatggaaaacagcaatggatcttatctaaatgatagcatctctcctaatgagagcatagatgatgaacatttgttaatccagcattactgccaaagtttgaaccaggactcccccctgagccagcctcgtagtcctgcccagatcttgatttccttagagagtgaggaaagaggggagctagagagaatcctagcagatcttgaggaagaaaacaggaatctgcaagcagaatatgaccgtctaaagcagcagcacgaacataaaggcctgtccccactgccgtcccctcctgaaatgatgcccacctctccccagagtccccgggatgctgagctcattgctgaggccaagctactgcgtcaacacaaaggccgcctggaagccaggatgcaaatcctggaagaccacaataaacagctggagtcacagttacacaggctaaggcagctgctggagcaaccccaggcagaggccaaagtgaatggcacaacggtgtcctctccttctacctctctacagaggtccgacagcagtcagcctatgctgctccgagtggttggcagtcaaacttcggactccatgggtgaggaagatcttctcagtcctccccaggacacaagcacagggttagaggaggtgatggagcaactcaacaactccttccctagttcaagaggaagaaatacccctggaaagccaatgagagaggacaccccc

SEQ ID NO: 1786 - DNA, 14083 bp, Artificial Sequence
  derived and/or modified sequence
tgctgtctgtgaagctgaatctgtgagaacacctcactattcacggcaaccggagtggaagaaacaggtgcaaaaagattgtgtgtttgtctgcttttgtgaggctggtcagagattctgtgcctgctttatctgtgcttggctatgactctacctccaggtttaccataccccatagaatgtgtaagagaaaagtaccaacagggaaatcagcaaaaagctttcctatgaaggtgtgtagccagcctccgcagaatttgaaatgtctgaggtctcatctggtgagtaaaagctgcagataaatgcaacagccattcagaagaatgataaattccacaagcattcagaagcaggcttccctaaagatgaaagagaagatgttcaaaagaaaacattcacaaaatgggtaaatgcacaattttctaagtttgggaagcagcatattgagaacctcttcagtgacctacaggatgggaggcgcctcctagacctcctcgaaggcctgacagggcaaaaactgccaaaagaaaaaggatccacaagagttcatgccctgaacaatgtcaacaaggcactgcgggttttgcagaacaataatgttgatttagtgaatattggaagtactgacatcgtagatggaaatcataaactgactcttggtttgatttggaatataatcctccactggcaggtcaaaaatgtaatgaaaaatatcatggctggattgcaacaaaccaacagtgaaaagattctcctgagctgggtccgacaatcaactcgtaattatccacaggttaatgtaatcaacttcaccaccagctggtctgatggcctggctttgaatgctctcatccatagtcataggccagacctatttgactggaatagtgtggtttgccagcagtcagccacacaacgactggaacatgcattcaacatcgccagatatcaattaggcatagagaaactactcgatcctgaagatgttgataccacctatccagataagaagtccatcttaatgtacatcacatcactcttccaagttttgcctcaacaagtgagcattgaagccatccaggaagtggaaatgttgccaaggccacctaaagtgactaaagaagaacattttcagttacatcatcaaatgcactattctcaacagatcacggtcagtctagcacagggatatgagagaacttcttcccctaagcctcgattcaagagctatgcctacacacaggctgcttatgtcaccacctctgaccctacacggagcccatttccttcacagcatttggaagctcctgaagacaagtcatttggcagttcattgatggagagtgaagtaaacctggaccgttatcaaacagctttagaagaagtattatcgtggcttctttctgctgaggacacattgcaagcacaaggagagatttctaatgatgtggaagtggtgaaagaccagtttcatactcatgaggggtacatgatggatttgacagcccatcagggccgggttggtaatattctacaattgggaagtaagctgattggaacaggaaaattatcagaagatgaagaaactgaagtacaagagcagatgaatctcctaaattcaagatgggaatgcctcagggtagctagcatggaaaaacaaagcaatttacatagagttttaatggatctccagaatcagaaactgaaagagttgaatgactggctaacaaaaacagaagaaagaacaaggaaaatggaggaagagcctcttggacctgatcttgaagacctaaaacgccaagtacaacaacataaggtgcttcaagaagatctagaacaagaacaagtcagggtcaattctctcactcacatggtggtggtagttgatgaatctagtggagatcacgcaactgctgctttggaagaacaacttaaggtattgggagatcgatgggcaaacatctgtagatggacagaagaccgctgggttcttttacaagacatccttctcaaatggcaacgtcttactgaagaacagtgcctttttagtgcatggctttcagaaaaagaagatgcagtgaacaagattcacacaactggctttaaagatcaaaatgaaatgttatcaagtcttcaaaaactggccgttttaaaagcggatctagaaaagaaaaagcaatccatgggcaaactgtattcactcaaacaagatcttctttcaacactgaagaataagtcagtgacccagaagacggaagcatggctggataactttgcccggtgttgggataatttagtccaaaaacttgaaaagagtacagcacagatttcacaggctgtcaccaccactcagccatcactaacacagacaactgtaatggaaacagtaactacggtgaccacaagggaacagatcctggtaaagcatgctcaagaggaacttccaccaccacctccccaaaagaagaggcagattactgtggattctgaaattaggaaaaggttggatgttgatataactgaacttcacagctggattactcgctcagaagctgtgttgcagagtcctgaatttgcaatctttcggaaggaaggcaacttctcagacttaaaagaaaaagtcaatgccatagagcgagaaaaagctgagaagttcagaaaactgcaagatgccagcagatcagctcaggccctggtggaacagatggtgaatgagggtgttaatgcagatagcatcaaacaagcctcagaacaactgaacagccggtggatcgaattctgccagttgctaagtgagagacttaactggctggagtatcagaacaacatcatcgctttctataatcagctacaacaattggagcagatgacaactactgctgaaaactggttgaaaatccaacccaccaccccatcagagccaacagcaattaaaagtcagttaaaaatttgtaaggatgaagtcaaccggctatcagatcttcaacctcaaattgaacgattaaaaattcaaagcatagccctgaaagagaaaggacaaggacccatgttcctggatgcagactttgtggcctttacaaatcattttaagcaagtcttttctgatgtgcaggccagagagaaagagctacagacaatttttgacactttgccaccaatgcgctatcaggagaccatgagtgccatcaggacatgggtccagcagtcagaaaccaaactctccatacctcaacttagtgtcaccgactatgaaatcatggagcagagactcggggaattgcaggctttacaaagttctctgcaagagcaacaaagtggcctatactatctcagcaccactgtgaaagagatgtcgaagaaagcgccctctgaaattagccggaaatatcaatcagaatttgaagaaattgagggacgctggaagaagctctcctcccagctggttgagcattgtcaaaagctagaggagcaaatgaataaactccgaaaaattcagaatcacatacaaaccctgaagaaatggatggctgaagttgatgtttttctgaaggaggaatggcctgcccttggggattcagaaattctaaaaaagcagctgaaacagtgcagacttttagtcagtgatattcagacaattcagcccagtctaaacagtgtcaatgaaggtgggcagaagataaagaatgaagcagagccagagtttgcttcgagacttgagacagaactcaaagaacttaacactcagtgggatcacatgtgccaacaggtctatgccagaaaggaggccttgaagggaggtttggagaaaactgtaagcctccagaaagatctatcagagatgcacgaatggatgacacaagctgaagaagagtatcttgagagagattttgaatataaaactccagatgaattacagaaagcagttgaagagatgaagagagctaaagaagaggcccaacaaaaagaagcgaaagtgaaactccttactgagtctgtaaatagtgtcatagctcaagctccacctgtagcacaagaggccttaaaaaaggaacttgaaactctaaccaccaactaccagtggctctgcactaggctgaatgggaaatgcaagactttggaagaagtttgggcatgttggcatgagttattgtcatacttggagaaagcaaacaagtggctaaatgaagtagaatttaaacttaaaaccactgaaaacattcctggcggagctgaggaaatctctgaggtgctagattcacttgaaaatttgatgcgacattcagaggataacccaaatcagattcgcatattggcacagaccctaacagatggcggagtcatggatgagctaatcaatgaggaacttgagacatttaattctcgttggagggaactacatgaagaggctgtaaggaggcaaaagttgcttgaacagagcatccagtctgcccaggagactgaaaaatccttacacttaatccaggagtccctcacattcattgacaagcagttggcagcttatattgcagacaaggtggacgcagctcaaatgcctcaggaagcccagaaaatccaatctgatttgacaagtcatgagatcagtttagaagaaatgaagaaacataatcaggggaaggaggctgcccaaagagtcctgtctcagattgatgttgcacagaaaaaattacaagatgtctccatgaagtttcgattattccagaaaccagccaattttgagcagcgtctacaagaaagtaagatgattttagatgaagtgaagatgcacttgcctgcattggaaacaaagagtgtggaacaggaagtagtacagtcacagctaaatcattgtgtgaacttgtataaaagtctgagtgaagtgaagtctgaagtggaaatggtgataaagactggacgtcagattgtacagaaaaagcagacggaaaatcccaaagaacttgatgaaagagtaacagctttgaaattgcattataatgagctgggagcaaaggtaacagaaagaaagcaacagttggagaaatgcttgaaattgtcccgtaagatgcgaaaggaaatgaatgtcttgacagaatggctggcagctacagatatggaattgacaaagagatcagcagttgaaggaatgcctagtaatttggattctgaagttgcctggggaaaggctactcaaaaagagattgagaaacagaaggtgcacctgaagagtatcacagaggtaggagaggccttgaaaacagttttgggcaagaaggagacgttggtggaagataaactcagtcttctgaatagtaactggatagctgtcacctcccgagcagaagagtggttaaatcttttgttggaataccagaaacacatggaaacttttgaccagaatgtggaccacatcacaaagtggatcattcaggctgacacacttttggatgaatcagagaaaaagaaaccccagcaaaaagaagacgtgcttaagcgtttaaaggcagaactgaatgacatacgcccaaaggtggactctacacgtgaccaagcagcaaacttgatggcaaaccgcggtgaccactgcaggaaattagtagagccccaaatctcagagctcaaccatcgatttgcagccatttcacacagaattaagactggaaaggcctccattcctttgaaggaattggagcagtttaactcagatatacaaaaattgcttgaaccactggaggctgaaattcagcagggggtgaatctgaaagaggaagacttcaataaagatatgaatgaagacaatgagggtactgtaaaagaattgttgcaaagaggagacaacttacaacaaagaatcacagatgagagaaagcgagaggaaataaagataaaacagcagctgttacagacaaaacataatgctctcaaggatttgaggtctcaaagaagaaaaaaggctctagaaatttctcatcagtggtatcagtacaagaggcaggctgatgatctcctgaaatgcttggatgacattgaaaaaaaattagccagcctacctgagcccagagatgaaaggaaaataaaggaaattgatcgggaattgcagaagaagaaagaggagctgaatgcagtgcgtaggcaagctgagggcttgtctgaggatggggccgcaatggcagtggagccaactcagatccagctcagcaagcgctggcgggaaattgagagcaaatttgctcagtttcgaagactcaactttgcacaaattcacactgtccgtgaagaaacgatgatggtgatgactgaagacatgcctttggaaatttcttatgtgccttctacttatttgactgaaatcactcatgtctcacaagccctattagaagtggaacaacttctcaatgctcctgacctctgtgctaaggactttgaagatctctttaagcaagaggagtctctgaagaatataaaagatagtctacaacaaagctcaggtcggattgacattattcatagcaagaagacagcagcattgcaaagtgcaacgcctgtggaaagggtgaagctacaggaagctctctcccagcttgatttccaatgggaaaaagttaacaaaatgtacaaggaccgacaagggcgatttgacagatctgttgagaaatggcggcgttttcattatgatataaagatatttaatcagtggctaacagaagctgaacagtttctcagaaagacacaaattcctgagaattgggaacatgctaaatacaaatggtatcttatagctcttaaggatggcattgggcagcggcaaactgttgtcagaacattgaatgcaactggggaagaaataattcagcaatcctcaaaaacagatgccagtattctacaggaaaaattgggaagcctgaatctgcggtggcaggaggtctgcaaacagctgtcagacagaaaaaagaggctagaagaacaaaagaatatcttgtcagaatttcaaagagatttaaatgaatttgttttatggttggaggaagcagataacattgctagtatcccacttgaacctggaaaagagcagcaactaaaagaaaagcttgagcaagtcaagttactggtggaagagttgcccctgcgccagggaattctcaaacaattaaatgaaactggaggacccgtgcttgtaagtgctcccataagcccagaagagcaagataaacttgaaaataagctcaagcagacaaatctccagtggataaaggtttccagagctttacctgagaaacaaggagaaattgaagctcaaataaaagaccttgggcagcttgaaaaaaagcttgaagaccttgaagagcagttaaatcatctgctgctgtggttatctcctattaggaatcagttggaaatttataaccaaccaaaccaagaaggaccatttgacgttaaggaaactgaaatagcagttcaagctaaacaaccggatgtggaagagattttgtctaaagggcagcatttgtacaaggaaaaaccagccactcagccagtgaagaggaagttagaagatctgagctctgagtggaaggcggtaaaccgtttacttcaagagctgagggcaaagcagcctgacctagctcctggactgaccactattggagcctctcctactcagactgttactctggtgacacaacctgtggttactaaggaaactgccatctccaaactagaaatgccatcttccttgatgttggaggtacctgctctggcagatttcaaccgggcttggacagaacttaccgactggctttctctgcttgatcaagttataaaatcacagagggtgatggtgggtgaccttgaggatatcaacgagatgatcatcaagcagaaggcaacaatgcaggatttggaacagaggcgtccccagttggaagaactcattaccgctgcccaaaatttgaaaaacaagaccagcaatcaagaggctagaacaatcattacggatcgaattgaaagaattcagaatcagtgggatgaagtacaagaacaccttcagaaccggaggcaacagttgaatgaaatgttaaaggattcaacacaatggctggaagctaaggaagaagctgagcaggtcttaggacaggccagagccaagcttgagtcatggaaggagggtccctatacagtagatgcaatccaaaagaaaatcacagaaaccaagcagttggccaaagacctccgccagtggcagacaaatgtagatgtggcaaatgacttggccctgaaacttctccgggattattctgcagatgataccagaaaagtccacatgataacagagaatatcaatgcctcttggagaagcattcataaaagggtgagtgagcgagaggctgctttggaagaaactcatagattactgcaacagttccccctggacctggaaaagtttcttgcctggcttacagaagctgaaacaactgccaatgtcctacaggatgctacccgtaaggaaaggctcctagaagactccaagggagtaaaagagctgatgaaacaatggcaagacctccaaggtgaaattgaagctcacacagatgtttatcacaacctggatgaaaacagccaaaaaatcctgagatccctggaaggttccgatgatgcagtcctgttacaaagacgtttggataacatgaacttcaagtggagtgaacttcggaaaaagtctctcaacattaggtcccatttggaagccagttctgaccagtggaagcgtctgcacctttctctgcaggaacttctggtgtggctacagctgaaagatgatgaattaagccggcaggcacctattggaggcgactttccagcagttcagaagcagaacgatgtacatagggccttcaagagggaattgaaaactaaagaacctgtaatcatgagtactcttgagactgtacgaatatttctgacagagcagcctttggaaggactagagaaactctaccaggagcccagagagctgcctcctgaggagagagcccagaatgtcactcggcttctacgaaagcaggctgaggaggtcaatactgagtgggaaaaattgaacctgcactccgctgactggcagagaaaaatagatgagacccttgaaagactccgggaacttcaagaggccacggatgagctggacctcaagctgcgccaagctgaggtgatcaagggatcctggcagcccgtgggcgatctcctcattgactctctccaagatcacctcgagaaagtcaaggcacttcgaggagaaattgcgcctctgaaagagaacgtgagccacgtcaatgaccttgctcgccagcttaccactttgggcattcagctctcaccgtataacctcagcactctggaagacctgaacaccagatggaagcttctgcaggtggccgtcgaggaccgagtcaggcagctgcatgaagcccacagggactttggtccagcatctcagcactttctttccacgtctgtccagggtccctgggagagagccatctcgccaaacaaagtgccctactatatcaaccacgagactcaaacaacttgctgggaccatcccaaaatgacagagctctaccagtctttagctgacctgaataatgtcagattctcagcttataggactgccatgaaactccgaagactgcagaaggccctttgcttggatctcttgagcctgtcagctgcatgtgatgccttggaccagcacaacctcaagcaaaatgaccagcccatggatatcctgcagattattaattgtttgaccactatttatgaccgcctggagcaagagcacaacaatttggtcaacgtccctctctgcgtggatatgtgtctgaactggctgctgaatgtttatgatacgggacgaacagggaggatccgtgtcctgtcttttaaaactggcatcatttccctgtgtaaagcacatttggaagacaagtacagataccttttcaagcaagtggcaagttcaacaggattttgtgaccagcgcaggctgggcctccttctgcatgattctatccaaattccaagacagttgggtgaagttgcatcctttgggggcagtaacattgagccaagtgtccggagctgcttccaatttgctaataataagccagagatcgaagcggccctcttcctagactggatgagactggaaccccagtccatggtgtggctgcccgtcctgcacagagtggctgctgcagaaactgccaagcatcaggccaaatgtaacatctgcaaagagtgtccaatcattggattcaggtacaggagtctaaagcactttaattatgacatctgccaaagctgctttttttctggtcgagttgcaaaaggccataaaatgcactatcccatggtggaatattgcactccgactacatcaggagaagatgttcgagactttgccaaggtactaaaaaacaaatttcgaaccaaaaggtattttgcgaagcatccccgaatgggctacctgccagtgcagactgtcttagagggggacaacatggaaactcccgttactctgatcaacttctggccagtagattctgcgcctgcctcgtcccctcagctttcacacgatgatactcattcacgcattgaacattatgctagcaggctagcagaaatggaaaacagcaatggatcttatctaaatgatagcatctctcctaatgagagcatagatgatgaacatttgttaatccagcattactgccaaagtttgaaccaggactcccccctgagccagcctcgtagtcctgcccagatcttgatttccttagagagtgaggaaagaggggagctagagagaatcctagcagatcttgaggaagaaaacaggaatctgcaagcagaatatgaccgtctaaagcagcagcacgaacataaaggcctgtccccactgccgtcccctcctgaaatgatgcccacctctccccagagtccccgggatgctgagctcattgctgaggccaagctactgcgtcaacacaaaggccgcctggaagccaggatgcaaatcctggaagaccacaataaacagctggagtcacagttacacaggctaaggcagctgctggagcaaccccaggcagaggccaaagtgaatggcacaacggtgtcctctccttctacctctctacagaggtccgacagcagtcagcctatgctgctccgagtggttggcagtcaaacttcggactccatgggtgaggaagatcttctcagtcctccccaggacacaagcacagggttagaggaggtgatggagcaactcaacaactccttccctagttcaagaggaagaaatacccctggaaagccaatgagagaggacacaatgtaggaagtcttttccacatggcagatgatttgggcagagcgatggagtccttagtatcagtcatgacagatgaagaaggagcagaataaatgttttacaactcctgattcccgcatggtttttataatattcatacaacaaagaggattagacagtaagagtttacaagaaataaatctatatttttgtgaagggtagtggtattatactgtagatttcagtagtttctaagtctgttattgttttgttaacaatggcaggttttacacgtctatgcaattgtacaaaaaagttataagaaaactacatgtaaaatcttgatagctaaataacttgccatttctttatatggaacgcattttgggttgtttaaaaatttataacagttataaagaaagattgtaaactaaagtgtgctttataaaaaaaagttgtttataaaaacccctaaaaacaaaacaaacacacacacacacacatacacacacacacacaaaactttgaggcagcgcattgttttgcatccttttggcgtgatatccatatgaaattcatggctttttctttttttgcatattaaagataagacttcctctaccaccacaccaaatgactactacacactgctcatttgagaactgtcagctgagtggggcaggcttgagttttcatttcatatatctatatgtctataagtatataaatactatagttatatagataaagagatacgaatttctatagactgactttttccattttttaaatgttcatgtcacatcctaatagaaagaaattacttctagtcagtcatccaggcttacctgcttggtctagaatggatttttcccggagccggaagccaggaggaaactacaccacactaaaacattgtctacagctccagatgtttctcattttaaacaactttccactgacaacgaaagtaaagtaaagtattggatttttttaaagggaacatgtgaatgaatacacaggacttattatatcagagtgagtaatcggttggttggttgattgattgattgattgatacattcagcttcctgctgctagcaatgccacgatttagatttaatgatgcttcagtggaaatcaatcagaaggtattctgaccttgtgaacatcagaaggtattttttaactcccaagcagtagcaggacgatgatagggctggagggctatggattcccagcccatccctgtgaaggagtaggccactctttaagtgaaggattggatgattgttcataatacataaagttctctgtaattacaactaaattattatgccctcttctcacagtcaaaaggaactgggtggtttggtttttgttgcttttttagatttattgtcccatgtgggatgagtttttaaatgccacaagacataatttaaaataaataaactttgggaaaaggtgtaaaacagtagccccatcacatttgtgatactgacaggtatcaacccagaagcccatgaactgtgtttccatcctttgcatttctctgcgagtagttccacacaggtttgtaagtaagtaagaaagaaggcaaattgattcaaatgttacaaaaaaacccttcttggtggattagacaggttaaatatataaacaaacaaacaaaaattgctcaaaaaagaggagaaaagctcaagaggaaaagctaaggactggtaggaaaaagctttactctttcatgccattttatttctttttgatttttaaatcattcattcaatagataccaccgtgtgacctataattttgcaaatctgttacctctgacatcaagtgtaattagcttttggagagtgggctgacatcaagtgtaattagcttttggagagtgggttttgtccattattaataattaattaattaacatcaaacacggcttctcatgctatttctacctcactttggttttggggtgttcctgataattgtgcacacctgagttcacagcttcaccacttgtccattgcgttattttctttttcctttataattctttctttttccttcataattttcaaaagaaaacccaaagctctaaggtaacaaattaccaaattacatgaagatttggtttttgtcttgcatttttttcctttatgtgacgctggaccttttctttacccaaggatttttaaaactcagatttaaaacaaggggttactttacatcctactaagaagtttaagtaagtaagtttcattctaaaatcagaggtaaatagagtgcataaataattttgttttaatctttttgtttttcttttagacacattagctctggagtgagtctgtcataatatttgaacaaaaattgagagctttattgctgcattttaagcataattaatttggacattatttcgtgttgtgttctttataaccaccaagtattaaactgtaaatcataatgtaactgaagcataaacatcacatggcatgttttgtcattgttttcaggtactgagttcttacttgagtatcataatatattgtgttttaacaccaacactgtaacatttacgaattatttttttaaacttcagttttactgcattttcacaacatatcagacttcaccaaatatatgccttactattgtattatagtactgctttactgtgtatctcaataaagcacgcagttatgttac

SEQ ID NO: 1787 - protein, 739 aa, Artificial Sequence
  derived and/or modified sequence
MSSESKEQHNVSPRDSAEGNDSYPSGIHLELQRESSTDFKQFETNDQCRPYHRILIERQEKSDTNFKEFVIKKLQKNCQCSPAKAKNMILGFLPVLQWLPKYDLKKNILGDVMSGLIVGILLVPQSIAYSLLAGQEPVYGLYTSFFASIIYFLLGTSRHISVGIFGVLCLMIGETVDRELQKAGYDNAHSAPSLGMVSNGSTLLNHTSDRICDKSCYAIMVGSTVTFIAGVYQVAMGFFQVGFVSVYLSDALLSGFVTGASFTILTSQAKYLLGLNLPRTNGVGSLITTWIHVFRNIHKTNLCDLITSLLCLLVLLPTKELNEHFKSKLKAPIPIELVVVVAATLASHFGKLHENYNSSIAGHIPTGFMPPKVPEWNLIPSVAVDAIAISIIGFAITVSLSEMFAKKHGYTVKANQEMYAIGFCNIIPSFFHCFTTSAALAKTLVKESTGCHTQLSGVVTALVLLLVLLVIAPLFYSLQKSVLGVITIVNLRGALRKFRDLPKMWSISRMDTVIWFVTMLSSALLSTEIGLLVGVCFSIFCVILRTQKPKSSLLGLVEESEVFESVSAYKNLQIKPGIKIFRFVAPLYYINKECFKSALYKQTVNPILIKVAWKKAAKRKIKEKVVTLGGIQDEMSVQLSHDPLELHTIVIDCSAIQFLDTAGIHTLKEVRRDYEAIGIQVLLAQCNPTVRDSLTNGEYCKKEEENLLFYSVYEAMAFAEVSKNQKGVCVPNGLSLSSD

SEQ ID NO: 1788 - protein, 23 aa, Artificial Sequence
  derived and/or modified sequence
MSSESKEQHNVSPRDSAEGNDSY

SEQ ID NO: 1789 - DNA, 2220 bp, Artificial Sequence
  derived and/or modified sequence
atgagttccgagagtaaagagcagcacaatgtgtctcctcgagactccgccgaaggcaacgactcttacccttctgggatacatttggaattgcagagggagtcaagcacagactttaaacagttcgaaactaatgaccagtgccggccttaccaccggattttaattgagaggcaggagaaatccgacaccaatttcaaagagtttgtgattaagaagctgcagaaaaactgtcagtgttcccccgccaaagcaaaaaatatgatcttaggcttcttacccgttctccagtggttgcctaaatatgacttgaaaaagaatatcctcggcgatgtgatgagtggcctgatagtaggcatcctccttgtcccccaatcaatcgcctattccttgttagcagggcaagaacctgtctacggactgtacaccagtttttttgcaagcattatttacttcctgctgggcacgagccgccacatctcagtcggcatattcggcgtactgtgcttgatgatcggcgaaaccgttgacagggagctccagaaggccggatatgacaacgctcatagcgcgccgtctttgggaatggtcagtaatggctcaacactgttgaaccacacgagtgaccggatttgtgataaatcctgttacgccatcatggtcggaagcactgtgacctttattgccggtgtctatcaggtggctatgggattctttcaagttggattcgtgtccgtttaccttagcgacgcactcttatccggatttgtgacaggggcatcttttactattctgacatcgcaagccaagtatttgctcgggctaaacctgcccaggactaatggagtcggaagcctcataactacttggattcacgttttccggaatatccacaaaactaatttgtgtgacctgatcaccagtttgctttgcctgctggtgctactgcctactaaggagcttaatgagcacttcaagtcaaaattgaaggctccaattcctattgaattagttgtggtagtggccgccaccctggcaagccatttcggcaagctccatgagaactataacagctcaattgccggtcatatccccaccgggtttatgccccccaaagtgcccgagtggaacctgattccatcggttgctgtcgatgcaattgcgatctccatcattgggtttgctataactgtaagcctcagcgagatgtttgccaagaagcatggatacaccgttaaagctaatcaggagatgtacgccattggcttttgtaacattatcccgtccttcttccactgctttacaacttccgcagcgctggccaaaacactggtgaaggagtcaacgggctgccacactcagctgtccggtgtggtgactgccctagttcttctgctcgttctccttgtcatagcccctctgttctacagcctccagaagtcagtgctgggtgttattaccatcgtgaacctacggggtgccttgaggaagttccgggacttacctaaaatgtggtcaatttcacgaatggataccgtgatctggttcgttaccatgctctcatccgcccttcttagcacggaaataggcctgttagtgggagtctgttttagtatattctgcgtgattcttcgcacccagaaacctaaatctagcctgcttgggctggtcgaagagtccgaggtttttgaatctgtgagtgcgtacaagaacctccagatcaagcctggaataaagatcttccggttcgtagcacctctctactacattaacaaggagtgtttcaagtccgctctctataagcagacagtgaaccccatcctcattaaggtagcatggaaaaaagcagcaaagaggaaaatcaaagagaaggttgtgaccctgggtggtatccaggacgaaatgtctgtgcagctgtctcatgaccccttggaactgcataccatcgtaatagactgcagtgcgatccagtttttggacacggccggtatccacaccctaaaggaagtgcgccgggattacgaagcaattggaattcaggttctgctcgctcagtgcaaccctacggtgcgagattctctgacaaacggcgagtattgcaaaaaagaagaagagaacctgctgttctatagtgtatacgaagccatggcctttgcagaggtgagcaaaaaccagaagggtgtgtgtgtcccaaacggactgagccttagcagtgactag

SEQ ID NO: 1790 - DNA, 72 bp, Artificial Sequence
  derived and/or modified sequence
atgagctctgaaagcaaagaacagcacaacgtctctccccgcgactccgcggagggtaatgactcgtattag

SEQ ID NO: 1791 - DNA, 2220 bp, Artificial Sequence
  derived and/or modified sequence
atgagcagcgagagcaaggagcagcacaacgtgagcccccgggacagcgctgagggcaatgacagctaccccagcggcatccacctggagctgcagcgggagagcagcacagacttcaagcagtttgagaccaatgaccagtgccggccctaccaccgcatcctgattgaaaggcaggagaagagtgacaccaacttcaaggagtttgtgatcaagaagctgcagaagaactgccagtgcagccctgccaaggccaagaacatgatcctgggcttcctgcctgtgctgcagtggctgcccaagtatgacctgaagaagaacatcctgggagatgtgatgagcggcctgattgtgggcatcctgctggtgccccagagcatcgcctacagcctgctggccggccaggagcctgtgtatggcctgtacaccagcttctttgccagcatcatctacttcctgctgggcaccagccgccacatctctgtgggcatctttggagtgctgtgcctgatgattggagaaacagtggaccgggagctgcagaaggccggctatgacaatgcccacagcgcccccagcctgggcatggtgtccaatggcagcaccctgctgaaccacaccagtgaccgcatctgtgacaagagctgctacgccatcatggtgggcagcacagtgaccttcatcgccggcgtgtaccaggtggccatgggcttcttccaggtgggctttgtgtctgtgtacctgagtgatgccctgctgagcggctttgtgactggagccagcttcaccatcctgaccagccaggccaagtacctgctgggcctgaacctgcccaggaccaatggagtgggcagcctcatcaccacctggatccacgtgttcaggaacatccacaagaccaacctgtgtgacctgatcaccagcctgctgtgcctgctggtgctgctgcccaccaaggagctgaatgagcacttcaagagcaagctgaaggcccccatccccatcgagctggtggtggtggtggccgccaccctggccagccactttgggaagctgcacgagaactacaacagcagcattgctggccacatccccaccggcttcatgccacccaaggtgcctgagtggaacctgatccccagcgtggccgtggatgccatcgccatcagcatcatcggctttgccatcaccgtgtccctgtctgagatgtttgccaagaagcacggctacacagtgaaggccaaccaggagatgtatgccatcggcttctgcaacatcatccccagcttcttccactgcttcaccaccagcgctgccctggccaagaccctggtgaaggagagcacaggctgccacacccagctgagcggcgtggtgacagccctggtgctgctgctggtgctgctggtgattgcccccctcttctacagcctgcagaagtctgtgctgggcgtcatcaccatcgtgaacctgcggggggccctgaggaagttccgggacctgcccaagatgtggagcatcagcaggatggacaccgtcatctggtttgtgaccatgctgagcagcgccctgctgagcacagaaattggcctgctggtgggcgtgtgcttcagcatcttctgtgtgatcctgcggacccagaagcccaagagcagcctgctgggcctggtggaggagagcgaggtgtttgaatctgtgtctgcctacaagaacctgcagatcaagccaggcatcaagatcttccgctttgtggcccccctgtactacatcaacaaggagtgcttcaagagcgccctgtacaagcagacagtgaaccccatcctgatcaaggtggcctggaagaaggccgccaagaggaagatcaaggagaaggtggtgaccctgggcggcatccaggatgagatgtctgtgcagctgagccatgaccccctggagctgcacaccatcgtgattgactgcagcgccatccagttcctggacacagctggcatccacaccctgaaggaggtgagaagagattatgaggccatcggcatccaggtgctgctggcccagtgcaaccccaccgtgcgggacagcctgaccaacggggagtactgcaagaaggaggaggagaacctgctcttctacagcgtgtatgaggccatggcctttgctgaggtgtccaagaaccagaagggcgtgtgtgtgcccaacggcctgagcctgagcagtgactag

SEQ ID NO: 1792 - DNA, 72 bp, Artificial Sequence
  derived and/or modified sequence
atgagcagcgagagcaaggagcagcacaacgtgagcccccgggacagcgctgagggcaatgacagctactag

SEQ ID NO: 1793 - DNA, 2220 bp, Artificial Sequence
  derived and/or modified sequence
atgagcagcgagagcaaggagcagcacaacgtgagcccccgggacagtgcggagggcaatgacagctacccttccggaattcacctggagttacagcgtgaatcttcgacagacttcaagcagttcgagactaatgaccagtgccggccctatcacagaattctgattgaacggcaagagaagtccgatactaatttcaaagagtttgtgattaagaaactgcagaagaattgccagtgttcaccagctaaagctaaaaacatgatactgggtttcctcccagtgcttcagtggctacccaagtacgatctcaagaaaaacatactgggagatgtgatgtccggcctcatcgtgggcatactcctggttcctcagagcatagcctattccctgctagctgggcaagaacccgtctacggactgtacaccagttttttcgcctcgataatctatttcctgctgggcacatctaggcatatctctgtcggaatctttggcgtcctttgccttatgatcggtgaaacagttgatcgggagctccagaaagctgggtatgacaacgcgcactctgctcctagccttggaatggtgtccaacgggtccacactgcttaaccacacctccgaccgcatttgcgataagtcctgttacgcgatcatggtcggaagcaccgtgacatttatcgccggcgtctatcaggtcgccatgggcttctttcaggtcgggttcgtgagcgtctatctcagcgacgctctacttagcggattcgtcaccggagcctcgttcaccatcctgacctcccaggccaaatatctgctcggactgaatttgcctcggactaacggcgtgggtagcctgattactacttggattcacgtctttcgcaacattcacaagacgaacttgtgtgaccttattacctccctgctgtgcctattagtattattgcccacaaaggagcttaatgaacacttcaagagcaagttgaaagccccgatccccatcgagctggttgtggttgtcgccgctaccttggcaagtcattttggtaagctacacgagaattacaactcctccattgccggacacatacccacaggctttatgccccccaaggtgcctgagtggaatttgatcccgagcgtcgcagttgatgctatagcaatttccattattggatttgctatcaccgtgagcctgagcgagatgttcgccaaaaagcacggatacaccgtgaaggcaaatcaggagatgtacgctataggattctgcaacattataccaagctttttccattgtttcacaacttcggccgcccttgcaaaaacccttgttaaggaatcaaccggttgtcacacccagttgagcggtgtggttacagcattagtactgctgttggtgctgctcgtcatcgcacccctcttttattctctgcagaaaagcgtgctgggagtcatcaccatcgtcaatctgaggggagccctacgcaaattccgcgacctccctaaaatgtggagcatcagccggatggacaccgttatctggtttgtcacaatgttgtctagcgcactcctcagtacagagatcggcctgctggtaggagtctgtttcagcattttctgcgtgatcctgcgcacgcagaagcctaagtcatctctgctgggtctggtggaagaatcggaagtgtttgaatcagtgtctgcttacaagaatctacaaattaagccaggaattaaaatttttcggttcgtagctcctctgtactacatcaataaggagtgcttcaaatctgcgctgtacaaacagacagttaatccgatcctgataaaagtggcttggaagaaggcagctaagcgtaaaatcaaagaaaaagtcgttacattaggcggtattcaggatgaaatgtcggtgcagctgtcacatgatcctctggagttgcacaccatagtgatagattgctctgctattcagttcctggatacagctggaatacataccctcaaagaagtccgccgggattatgaggctattggcatacaagtgcttctggcacaatgcaacccaaccgtgcgcgacagccttaccaacggcgagtactgtaaaaaggaggaagagaatttgctgttctactcagtatacgaagccatggccttcgccgaggtatcaaagaatcaaaagggggtgtgtgtgcctaacggcctgtcactctcctccgattag

SEQ ID NO: 1794 - DNA, 72 bp, Artificial Sequence
  derived and/or modified sequence
atgagcagcgagagcaaggagcagcacaacgtgagcccccgggactctgccgaaggaaacgattcctattag

SEQ ID NO: 1795 - DNA, 2220 bp, Artificial Sequence
  derived and/or modified sequence
atgagtagcgagagtaaagagcagcacaatgttagcccaagagattctgccgagggaaatgactcctatccatccggcattcatcttgaacttcagagggagtcctccacagactttaagcagttcgagacgaacgaccagtgccgcccttaccaccgcattctgatagaaaggcaggagaagtcagatactaacttcaaggagttcgtaatcaaaaaactgcagaagaattgccagtgctctcccgcaaaggcaaaaaatatgatactgggcttcctgccggtcttacagtggctccctaaatacgaccttaaaaagaatatcctaggtgatgtcatgtctggcctgatcgtaggcatcctgcttgtaccacagagcatcgcatatagtctgcttgccggacaggagcctgtgtatggactttacacttctttcttcgctagtatcatttacttcttgctgggtacaagtcgtcacatcagcgtgggcatattcggcgtgctttgcctcatgatcggcgagacagtggatagagaattgcaaaaggccggatacgacaatgctcattccgccccatccctgggcatggttagcaacggttcaacgttgctgaaccacacctctgataggatctgtgataagagttgttacgccatcatggtgggctctaccgtgactttcatcgcaggcgtttatcaggtcgcaatgggctttttccaggtgggctttgtttcagtgtatctgtcggatgccttgctctccggctttgtgacgggcgctagctttaccattctgacctctcaggcaaaatacctgctggggctcaacttgcctagaactaacggagtgggttcgctgatcaccacatggatccacgtgttcagaaatatccataaaaccaacctatgcgatctgattactagtctgttgtgcttactcgttctcctgcctactaaagagctcaacgagcactttaagagcaagctaaaggcacctatcccaattgagttggttgttgttgtagctgcaactcttgcatctcatttcgggaagcttcatgagaattacaattcatccatagctgggcacatccccacaggttttatgccccctaaggtgccagaatggaaccttataccaagtgtggctgttgacgcgatagctattagcatcatcgggtttgcaattactgtctctctcagcgagatgtttgccaagaaacacggttatacagtcaaagccaatcaggaaatgtacgccatcggattctgcaatatcatcccctctttttttcattgtttcacaacatctgccgcactggctaagactctggtgaaagaatccacggggtgtcatacccaattatccggcgttgttacagctttggtcttactgctggtgcttctcgttatagcccctctcttctacagcctccagaaaagtgttttgggtgtcattaccatcgtcaatctgaggggcgctttaagaaaattccgtgacttgcctaagatgtggtccataagcaggatggacactgtcatctggtttgtcactatgctcagctccgccttactaagtaccgagatcgggcttttggtcggcgtgtgtttttcaattttttgcgttatcttgcgaacacaaaaaccgaaaagctcactacttggcctcgtcgaggagagcgaagtctttgagagcgtgtcagcgtataagaatttacagataaagcctggtattaaaatattcaggttcgtggcacctctctactatatcaacaaagaatgtttcaagtcagccttgtacaagcagaccgtcaatccaattctcattaaggttgcttggaaaaaagccgctaagcggaagatcaaggagaaagttgtgacattgggcggaatccaggatgagatgtcagtgcagttgagccacgaccccctggagttgcacactatagtgatcgattgtagcgctattcaattccttgatactgctggtatccacacacttaaggaggtgaggcgggattatgaagcaattgggattcaggtgttgctggcccagtgcaaccccactgtccgcgactccttaactaatggcgagtactgcaaaaaagaggaggaaaacctgctattctatagcgtctatgaggctatggccttcgctgaagtgtctaaaaatcaaaagggcgtgtgtgtccccaacgggctgtccttatcctcagactag

SEQ ID NO: 1796 - DNA, 72 bp, Artificial Sequence
  derived and/or modified sequence
atgagttccgaaagtaaagaacagcacaatgtcagtcccagggactccgctgaagggaacgactcctactag

SEQ ID NO: 1797 - DNA, 8080 bp, Artificial Sequence
  derived and/or modified sequence
gtgacggcctcggccgcgggcgtttacactggctctgcctccggcatctcttcgccggtgcgtcctcgccgcgcccgtaggtcccggcagccgggccccgcctccttcggagtccgagcgatgggcggggaaagggacaggcaggtatagctctgtcggcgccgcggtgtccacctcagtcaggccacggtggaagacgcgtgccgcggcgcctggttgcctgcagcggcccggacccgagaggaagctgaaccatctatctccagaaatgtcttcagaaagtaaagagcaacataacgtttcacccagagactcagctgaaggaaatgacagttatccatctgggatccatctggaacttcaaagggaatcaagtactgacttcaagcaatttgagaccaatgatcaatgcagaccttatcataggatccttattgagcgtcaagagaaatcagatacaaacttcaaggagtttgttattaaaaagctgcagaagaattgccagtgcagtccagccaaagccaaaaatatgattttaggtttccttcctgttttgcagtggctcccaaaatacgacctaaagaaaaacattttaggggatgtgatgtcaggcttgattgtgggcatattattggtgccccagtccattgcttattccctgctggctggccaagaacctgtctatggtctgtacacatctttttttgccagcatcatttattttctcttgggtacctcccgtcacatctctgtgggcatttttggagtactgtgccttatgattggtgagacagttgaccgagaactacagaaagctggctatgacaatgcccatagtgctccttccttaggaatggtttcaaatgggagcacattattaaatcatacatcagacaggatatgtgacaaaagttgctatgcaattatggttggcagcactgtaacctttatagctggagtttatcaggtagcgatgggcttctttcaagtgggttttgtttctgtctacctctcagatgccttgctgagtggatttgtcactggtgcctccttcactattcttacatctcaggccaagtatcttcttgggctcaaccttcctcggactaatggtgtgggctcactcatcactacctggatacatgtcttcagaaacatccataagaccaatctctgtgatcttatcaccagccttttgtgccttttggttcttttgccaaccaaagaactcaatgaacacttcaaatccaagcttaaggcaccgattcctattgaacttgttgttgttgtagcagccacattagcctctcattttggaaaactacatgaaaattataattctagtattgctggacatattcccactgggtttatgccacccaaagtaccagaatggaacctaattcctagtgtggctgtagatgcaatagctatttccatcattggttttgctatcactgtatcactttctgagatgtttgccaagaaacatggttacacagtcaaagcaaaccaggaaatgtatgccattggcttttgtaatatcatcccttccttcttccactgttttactactagtgcagctcttgcaaagacattggttaaagaatcaacaggctgccatactcagctttctggtgtggtaacagccctggttcttttgttggtcctcctagtaatagctcctttgttctattcccttcaaaaaagtgtccttggtgtgatcacaattgtaaatctacggggagcccttcgtaaatttagggatcttcccaaaatgtggagtattagtagaatggatacagttatctggtttgttactatgctgtcctctgcactgctaagtactgaaataggcctacttgttggggtttgtttttctatattttgtgtcatcctccgcactcagaagccaaagagttcactgcttggcttggtggaagagtctgaggtctttgaatctgtgtctgcttacaagaaccttcagattaagccaggcatcaagattttccgctttgtagcccctctctactacataaacaaagaatgctttaaatctgctttatacaaacaaactgtcaacccaatcttaataaaggtggcttggaagaaggcagcaaagagaaagatcaaagaaaaagtagtgactcttggtggaatccaggatgaaatgtcagtgcaactttcccatgatcccttggagctgcatactatagtgattgactgcagtgcaattcaatttttagatacagcagggatccacacactgaaagaagttcgcagagattatgaagccattggaatccaggttctgctggctcagtgcaatcccactgtgagggattccctaaccaacggagaatattgcaaaaaggaagaagaaaaccttctcttctatagtgtgtatgaagcgatggcttttgcagaagtatctaaaaatcagaaaggagtatgtgttcccaatggtctgagtcttagtagtgattaattgagaaggtagatagaagaatgtctagccaataggttaaaatttcaagtgtccaacatttcccagttccacagtgggaaattttgcacacttgaaattttaaccaagtggctagatattattcctcctttgaagctaatggcatttgtatatacacactgcagcagagcttgtagctggacagagtcaaaaagaagaaaatacggtttcaggctttcttgcagatatgaagtattcttggaatgcaataagtatgtattgaactgtactgtaaagtagctccaaaacttaattactctcctgttttaggggttatacatttggactgtgcattctccaagagatgaagcggtgaagttgggatttacattggaagtgctgtagacttctttatgtggctcagtggagagagggaaagaatgttgcacctgctctagtaccataggtcaagaggcttctggatcacaaagtcataactagacaggtttgttcttgtagttttctatccccagtctttgctccccagatggcagtagtttttagtaggaaagtgccattcctgtccttaaggcacagtctcatcagaagtctaatacctgggcaggtttataacatcctgagagccagcctgacattagacagaataccctttgtaatacattggaaatttttactcatgcctttttgtttaggataaataggtaagcacaaagagctcttcaaaatcagaaaaaacaataggagtccttccttgtcttttctgtgatctctgtccttgtttctgagactttctctaccattaagctctattttagctttcagttattctagtttgtttcccatggaatctgtcctaaactggtgtttttgtcagtgacagtcttgccagtcagcaatttctaacagcattttaaatgagtttgatgtacagtaaatattgatgacaatgacagcttttaactcttcaagtcacctaaagctattatgcaggaggatttagaagtcacattcataaaacccaagtgctatgggtgtattattcatgatagctggcccacaggtcatgaattgaggaggaatttgctttcaaaaagcaagaatgtccaacactgaaagtttatagttttatatttggaccttgaaaggtaagaaaaaaccaggttctccaaagttaggaatagggaactaatttatgaaacagccatcttaaaaaaaaaaaaagtaaactgcaaaagtacaaaatcatttttcaatctgttcccagtttctaaacaattttaaatatttatgagaagcaaaccctatgtgtagggcatctgttggagtgggatgcttttagacatatattaagtatgtacatgtttaatatgtatatttaaaatgcatatatattttattatatctatattatcctatatagatatatgtaacttagctttattgttagctccataagctgccagtgttgcttttctgttggtagagctctcccatttggtgacatggaaaatacctttccattatcacaacaaagcagttgctcagtagaaagtctagatttctgtcttataggtgatttctgtcttataggtgattataatcaagtgtaggcttcctgaattttgacatccttttagaacttgggtctggaattccagaaatgttaattgctgcttgtatttgttcttgtttgttttttagccagtatttgccctttctatccagccttatgaataatagcagtaaaatcacagtatcttggtcagtctttatttttttccttttttcttttttaagagacagtcatccaggccagagtgcagtttgatgatagcttactgaagcttcccactcctgggctcaagttatccttccattttggcctcctgagtagctagaccataggtatgcatcaccacaccctgctaattttttaaatttttttctagagagagggtctcactgtgttgcccaggctggtctcaaactccaggctcaagcaatccttcagcctcagcctcccagagtgttgggattacaggcgtgagccactgcacttggccaagttatttatttttaatctctcttgcccttctcccaaggcaggcttaagttgagactattataggtgtctaataacctgtgacagagtaatgagtacatgcttaagatgttataattagccaacaccaacacagcaaaaaatataattccagccaaagattctggaaaatccctcagaaggagggataacaggatttgacctttaccagcgatttctgtccatatgtggatgtaaacagttctggaacgttatgcatgcagttagcgaatccttgaattatgttctggtttgtacttgtcccatccatccaaacaagagattctgcttttggtagccatctgtagaaacatttaagatgtcactagaatttacatttcatcctctctacttgggttgaggttgcctatacttgcatattgttaaaatgttttggttgctgatattcagaggaatgaaacctggaaccaaagcctaatttgccgataaaaaaactgttttcggccaggtgcagtggctcatgcctgtaatcccagcacgttgggaggccgaggcgggtggatcacctgaagtcaggagttcgagaccatcctggctaacactgtgaaaccccgtctctactaaaaatacaaaaaattagcggggcatggtggcacgcgcctgtagtcccagctactcaggaggctgaggcaggagaattacttgaacccgggaggcggaggttgcagtaagcagagattgtgccactggactccagcctgggtgacagagcgagactccgtctcaaacaaacaaacaaaaaactgttttcatttgctctcttgaccaaaggataggactttagttctttaagcattattttaaacactatattgatacaaaaatatcttgcttactctaaactttagagtctaaatgaagctttttctcagtacaagattctgagtatcataaaatggttatttaattgaaacgtagtgtggtatactcttgatggttagaactcttacagccttatttatttttaagtttgttacagccaaagggttggagtgtgccagtgcacaggtagactaaggaaaacattatagaggagtgaagagaacagaccattgaaaagactattatctgaccagcggaggcagaaaagagaggaacccagttgaataggatccaatccctggttagcctctacacaataatagggagacaaggattaggagccatacctcccagagcaaggtatctttctagagcaaatttctctttctagaaggggagggtcacagggtcacagattcaccaaagctgaaagggctgaggagctcatggtagcctgggctgacctactctggagcacggtgtcttccttctaaactgagtgactgtagtactatctgtgcctctgatggtaataaaactgacaagatgtctaatttttttttaagtaggaccaaaggaaaacaagatttagatagtctgactttgcttttgaacaacagacattgcaagtcaaaattgttgtcaaatttacatatggtaaatgatgaactttaaaaatgtgtccaggtgttagatgagttcattagactcttttaatgctaatggctagtacgtttaaacaaaacagcagttctctgctgcaatattcccattgaccacttaaatgaccataagtggtcatttaagaacatgttagggttagccctgatctgaatataaaagtgagaaaagggctacagtgcatttcttggtaacttaaactgagtcttgaagttataatgatccattcgagttctgtgatccttattgttcttaattgtgtttctctacgtattgttacagatgagccatacgtttctttgtatcaatgtagacatgacttcagatacctctgaggacctacccagcagtctaggaccctgggccaagtgctgggactatggtactaaatccagtagatgggctgtgtagcaactctcccagggaacacactagggtacttagggaggtgctttgtggagcatgttgaagctttgagatctgagcaggaggcagtgatgtccctggtctattcagggaaagatttcagtgtgaaatggtaaacatccaattgacaggatttagattttgcttagtttttctgctttttaatgtttctatcccccatctcagtgttttctttatccatcccagtgatgccttatttgaaactgggcttaaactgcaaaaagaatgaagttggatttaggaagctgttagatcattgagtggtgttgagagtgaagtttcactagcagggaagtttccttgagcctaaaataaaaagaaaaaattaaaaagaatcagtttttttaattaaaaaaatagaaagctgttaggctcctaattcgtggggtttttttttgtaaaaacagtttagataatcctgaatgcaatcattaacttggttgctaattacaagaatgaaaattataatggaaaaggacaaaataatataccagctggtttgttattatagtccgtgtattaaaatactattgaaatacgttaaaggtaaatttttaaggtttaaaaaaaatttagtaacttacagggatggagaatttagatgtcagaggtggggagatttatttttataaggtaatttttatcctgataaggacttaaaaaaaagttttgcaactgaaattttaaagtaaacatgttaagtacagttaaaaagtaagcattgtagtaaatagtggattctctggtgtgtattttttatctcagtgttgaaaattggaaaagaatggactgaagtctaaaaactggaataatgaaggacactaaatgcctttattgtagatactatgtttgtaagtctatagctaagcaacttaagccaaaaaggtctttcaactgaagctttaatcaacttattttggagatgttctcttcccttatctcatgcgtcatccctaaaataataagatacatgggatcaaatagcccttgccttttcaacacaaatcagttggaaaattatggtttgagtcctgttgctgccatggcttctgtttctcagaaatgagtgtgtatgaacataccaatctatgtaataggctacctttttttgtcttctttggaactttgtacacaaaccaagacaatatcagggtgacaggtgaatgaacttaaattctcagtcttgtctattcaccaaaaaagtatactgcctgttttttctttaattattcaaggttgatgacttttaggaacatgttttatactgtattttttaattaaagcaagtgccttgatgtaattccatgtaaatcattgcttaaccctcttatgggatgaggatgagttattaatgtattgcagcctactggaaaggagggggagttggttaatagcagatacttttcttctagaagcttatgttttatgctgtttattatgtaagatcctgtatgtgtgttgagatttagaggtttcatttgttttgtctgctaataaattgttactctaataatacatta

SEQ ID NO: 1798 - DNA, 570 bp, Artificial Sequence
  derived and/or modified sequence
tcttcgccggtgcgtcctcgccgcgcccgtaggtcccggcagccgggccccgcctccttcggagtccgagcgatgggcggggaaagggacaggcaggtatagctctgtcggcgccgcggtgtccacctcagtcaggccacggtggaagacgcgtgccgcggcgcctggttgcctgcagcggcccggacccgagaggtcagaaattgatgctgagtacagtgaagttttacaaaaccattgccatatgactgctgagcagtatagctgggatctgaacagagatctgtttgacttccagaacacatccagtgattctccaagtgtggtcctaagctcactcgttcagcatcatctagcgtgtggagtcctggatctcatccttggatttgcagggatggtcctaagaagctaacggctctctgtatttgacaattattgtactgtaatgtgctgcctcctaggggaagatctagaggaagctgaaccatctatctccagaaatgtcttcagaaagtaaagagcaacataacgtttcacccagagactcagctgaaggaaatgacagttatc

SEQ ID NO: 1799 - DNA, 2220 bp, Artificial Sequence
  derived and/or modified sequence
atgagcagcgagagcaaggagcagcacaacgtgagccccagagacagcgccgagggcaacgacagctaccccagcggcatccacctggagctgcagagagagagcagcaccgacttcaagcagttcgagaccaacgaccagtgcagaccctaccacagaatcctgatcgagagacaggagaagagcgacaccaacttcaaggagttcgtgatcaagaagctgcagaagaactgccagtgcagccccgccaaggccaagaacatgatcctgggcttcctgcccgtgctgcagtggctgcccaagtacgacctgaagaagaacatcctgggcgacgtgatgagcggcctgatcgtgggcatcctgctggtgccccagagcatcgcctacagcctgctggccggccaggagcccgtgtacggcctgtacaccagcttcttcgccagcatcatctacttcctgctgggcaccagcagacacatcagcgtgggcatcttcggcgtgctgtgcctgatgatcggcgagaccgtggacagagagctgcagaaggccggctacgacaacgcccacagcgcccccagcctgggcatggtgagcaacggcagcaccctgctgaaccacaccagcgacagaatctgcgacaagagctgctacgccatcatggtgggcagcaccgtgaccttcatcgccggcgtgtaccaggtggccatgggcttcttccaggtgggcttcgtgagcgtgtacctgagcgacgccctgctgagcggcttcgtgaccggcgccagcttcaccatcctgaccagccaggccaagtacctgctgggcctgaacctgcccagaaccaacggcgtgggcagcctgatcaccacctggatccacgtgttcagaaacatccacaagaccaacctgtgcgacctgatcaccagcctgctgtgcctgctggtgctgctgcccaccaaggagctgaacgagcacttcaagagcaagctgaaggcccccatccccatcgagctggtggtggtggtggccgccaccctggccagccacttcggcaagctgcacgagaactacaacagcagcatcgccggccacatccccaccggcttcatgccccccaaggtgcccgagtggaacctgatccccagcgtggccgtggacgccatcgccatcagcatcatcggcttcgccatcaccgtgagcctgagcgagatgttcgccaagaagcacggctacaccgtgaaggccaaccaggagatgtacgccatcggcttctgcaacatcatccccagcttcttccactgcttcaccaccagcgccgccctggccaagaccctggtgaaggagagcaccggctgccacacccagctgagcggcgtggtgaccgccctggtgctgctgctggtgctgctggtgatcgcccccctgttctacagcctgcagaagagcgtgctgggcgtgatcaccatcgtgaacctgagaggcgccctgagaaagttcagagacctgcccaagatgtggagcatcagcagaatggacaccgtgatctggttcgtgaccatgctgagcagcgccctgctgagcaccgagatcggcctgctggtgggcgtgtgcttcagcatcttctgcgtgatcctgagaacccagaagcccaagagcagcctgctgggcctggtggaggagagcgaggtgttcgagagcgtgagcgcctacaagaacctgcagatcaagcccggcatcaagatcttcagattcgtggcccccctgtactacatcaacaaggagtgcttcaagagcgccctgtacaagcagaccgtgaaccccatcctgatcaaggtggcctggaagaaggccgccaagagaaagatcaaggagaaggtggtgaccctgggcggcatccaggacgagatgagcgtgcagctgagccacgaccccctggagctgcacaccatcgtgatcgactgcagcgccatccagttcctggacaccgccggcatccacaccctgaaggaggtgagaagagactacgaggccatcggcatccaggtgctgctggcccagtgcaaccccaccgtgagagacagcctgaccaacggcgagtactgcaagaaggaggaggagaacctgctgttctacagcgtgtacgaggccatggccttcgccgaggtgagcaagaaccagaagggcgtgtgcgtgcccaacggcctgagcctgagcagcgactag

SEQ ID NO: 1800 - DNA, 72 bp, Artificial Sequence
  derived and/or modified sequence
atgagcagcgagagcaaggagcagcacaacgtgagccccagagacagcgccgagggcaacgacagctactag

SEQ ID NO: 1801 - protein, 332 aa, Artificial Sequence
  derived and/or modified sequence
MKLGRAVLGLLLLAPSVVQAVEPISLGLALAGVLTGYIYPRLYCLFAECCGQKRSLSREALQKDLDDNLFGQHLAKKIILNAVFGFINNPKPKKPLTLSLHGWTGTGKNFVSKIIAENIYEGGLNSDYVHLFVATLHFPHASNITLYKDQLQLWIRGNVSACARSIFIFDEMDKMHAGLIDAIKPFLDYYDLVDGVSYQKAMFIFLSNAGAERITDVALDFWRSGKQREDIKLKDIEHALSVSVFNNKNSGFWHSSLIDRNLIDYFVPFLPLEYKHLKMCIRVEMQSRGYEIDEDIVSRVAEEMTFFPKEERVFSDKGCKTVFTKLDYYYDD

SEQ ID NO: 1802 - protein, 301 aa, Artificial Sequence
  derived and/or modified sequence
MKLGRAVLGLLLLAPSVVQAVEPISLGLALAGVLTGYIYPRLYCLFAECCGQKRSLSREALQKDLDDNLFGQHLAKKIILNAVFGFINNPKPKKPLTLSLFVATLHFPHASNITLYKDQLQLWIRGNVSACARSIFIFDEMDKMHAGLIDAIKPFLDYYDLVDGVSYQKAMFIFLSNAGAERITDVALDFWRSGKQREDIKLKDIEHALSVSVFNNKNSGFWHSSLIDRNLIDYFVPFLPLEYKHLKMCIRVEMQSRGYEIDEDIVSRVAEEMTFFPKEERVFSDKGCKTVFTKLDYYYDD

SEQ ID NO: 1803 - DNA, 999 bp, Artificial Sequence
  derived and/or modified sequence
atgaagctgggcagagccgtgctgggcctgctgctgctggcccccagcgtggtgcaggccgtggagcccatcagcctgggcctggccctggccggcgtgctgaccggctacatctaccccagactgtactgcctgttcgccgagtgctgcggccagaagagaagcctgagcagagaggccctgcagaaggacctggacgacaacctgttcggccagcacctggccaagaagatcatcctgaacgccgtgttcggcttcatcaacaaccccaagcccaagaagcccctgaccctgagcctgcacggctggaccggcaccggcaagaacttcgtgagcaagatcatcgccgagaacatctacgagggcggcctgaacagcgactacgtgcacctgttcgtggccaccctgcacttcccccacgccagcaacatcaccctgtacaaggaccagctgcagctgtggatcagaggcaacgtgagcgcctgcgccagaagcatcttcatcttcgacgagatggacaagatgcacgccggcctgatcgacgccatcaagcccttcctggactactacgacctggtggacggcgtgagctaccagaaggccatgttcatcttcctgagcaacgccggcgccgagagaatcaccgacgtggccctggacttctggagaagcggcaagcagagagaggacatcaagctgaaggacatcgagcacgccctgagcgtgagcgtgttcaacaacaagaacagcggcttctggcacagcagcctgatcgacagaaacctgatcgactacttcgtgcccttcctgcccctggagtacaagcacctgaagatgtgcatcagagtggagatgcagagcagaggctacgagatcgacgaggacatcgtgagcagagtggccgaggagatgaccttcttccccaaggaggagagagtgttcagcgacaagggctgcaagaccgtgttcaccaagctggactactactacgacgactag

SEQ ID NO: 1804 - DNA, 906 bp, Artificial Sequence
  derived and/or modified sequence
atgaagctgggcagagccgtgctgggcctgctgctgctggcccccagcgtggtgcaggccgtggagcccatcagcctgggcctggccctggccggcgtgctgaccggctacatctaccccagactgtactgcctgttcgccgagtgctgcggccagaagagaagcctgagcagagaggccctgcagaaggacctggacgacaacctgttcggccagcacctggccaagaagatcatcctgaacgccgtgttcggcttcatcaacaaccccaagcccaagaagcccctgaccctgagcctgttcgtggccaccctgcacttcccccacgccagcaacatcaccctgtacaaggaccagctgcagctgtggatcagaggcaacgtgagcgcctgcgccagaagcatcttcatcttcgacgagatggacaagatgcacgccggcctgatcgacgccatcaagcccttcctggactactacgacctggtggacggcgtgagctaccagaaggccatgttcatcttcctgagcaacgccggcgccgagagaatcaccgacgtggccctggacttctggagaagcggcaagcagagagaggacatcaagctgaaggacatcgagcacgccctgagcgtgagcgtgttcaacaacaagaacagcggcttctggcacagcagcctgatcgacagaaacctgatcgactacttcgtgcccttcctgcccctggagtacaagcacctgaagatgtgcatcagagtggagatgcagagcagaggctacgagatcgacgaggacatcgtgagcagagtggccgaggagatgaccttcttccccaaggaggagagagtgttcagcgacaagggctgcaagaccgtgttcaccaagctggactactactacgacgactag

SEQ ID NO: 1805 - DNA, 999 bp, Artificial Sequence
  derived and/or modified sequence
atgaagctaggtcgggctgtgctgggactgctacttctcgcgcctagtgtggttcaggctgtggaaccaatcagccttgggctggcccttgctggagtgctgaccggatacatttatcccagactgtattgcttgttcgccgagtgctgtgggcagaagcggagccttagccgtgaagctttacagaaagacttggatgacaatctctttggccagcatctcgcaaaaaagatcatactcaatgccgtcttcggattcatcaataaccctaaacccaaaaagccattaaccctgtccttacacggttggaccggcaccggaaaaaacttcgtgtcaaagatcatcgccgaaaatatctatgaaggcggtctgaattcagattatgtgcatctcttcgtggctacgttacactttccccacgcctctaatatcactctgtataaagatcagttacaactgtggatacggggtaatgtctctgcgtgtgccaggagcatatttatcttcgacgagatggataaaatgcatgccggtttaatagacgctataaagccattcctcgattactacgacctcgtcgatggtgttagttaccagaaagctatgttcatcttcttgagcaatgcaggagctgagcggatcactgacgttgccctcgatttctggcgaagcggcaaacagagggaagacattaagctaaaggacattgaacacgcactttccgtgagcgttttcaataacaaaaattctgggttctggcacagttccctcatcgatagaaatctgatcgattatttcgtgcctttccttccattagagtacaaacacctcaaaatgtgcattagagtggaaatgcaatccagaggctatgaaatcgacgaagacatcgtgagccgggtcgccgaggaaatgaccttctttccaaaggaagagagggtgttctcagacaaaggttgtaaaaccgtcttcacgaaactggactactattacgacgactag

SEQ ID NO: 1806 - DNA, 906 bp, Artificial Sequence
  derived and/or modified sequence
atgaaactcggtcgagccgtactaggactcctgttgctggcccccagtgtcgtacaggctgttgaacctatcagcctcggcctggcactggccggggttctcacaggctatatctacccaagactgtactgtctattcgcggaatgctgcggccagaagaggtcccttagcagagaggccctacagaaagatctggacgataatctgtttggtcagcacttggccaagaagattatcctgaacgcggttttcggcttcattaacaacccaaagcctaagaagccgctaacgttaagcttgtttgtggccactctgcactttcctcacgcatccaacattaccctgtacaaggatcagctccagctgtggattcgcggcaatgtgagtgcttgtgcaaggtccatcttcattttcgacgaaatggataagatgcacgctggcctgatcgacgcaatcaagccgtttcttgactactacgatcttgtggacggggtttcctaccaaaaagcaatgtttattttcctgtctaatgcaggcgctgagcggattaccgatgtcgccctggacttttggcggtcaggaaagcaacgagaagacatcaagcttaaggacatcgagcacgctctgtcagttagcgtatttaataacaaaaactcagggttctggcactccagtttgatcgatcggaacctcattgactactttgtgccctttctgcccctggagtataagcatctaaagatgtgtatcagggtagagatgcagtccagaggatatgaaatcgacgaggacatcgtgtctcgggtggctgaagagatgacttttttccccaaggaggaacgcgtgttctcggacaaggggtgtaagactgtgtttacaaagctcgactactactatgatgactag

SEQ ID NO: 1807 - DNA, 999 bp, Artificial Sequence
  derived and/or modified sequence
atgaagctgggccgggctgtgctgggcctgctgctgctggcccccagcgtggtgcaggccgtggagcccatcagcctgggcctggccctggccggcgtgctgaccggctacatctacccccggctgtactgcctgtttgctgagtgctgcggccagaagaggagcctgagccgggaggccctgcagaaggacctggatgacaacctgtttggccagcacctggccaagaagatcatcctgaatgctgtgtttggcttcatcaacaaccccaagcccaagaagcccctgaccctgagcctgcacggctggacaggcaccgggaagaactttgtgtccaagatcatcgccgagaacatctatgagggcggcctgaacagcgactatgtgcacctgtttgtggccaccctgcacttcccccacgccagcaacatcaccctgtacaaggaccagctgcagctgtggatcagaggaaatgtgtctgcctgtgcccggagcatcttcatctttgatgagatggacaagatgcatgctggcctgattgatgccatcaagcccttcctggactactatgacctggtggatggagtgtcctaccagaaggccatgttcatcttcctgagcaatgctggagctgagcgcatcacagatgtggccctggacttctggaggtctgggaagcagcgggaggacatcaagctgaaggacatcgagcacgccctgtctgtgtctgtgttcaacaacaagaacagcggcttctggcacagcagcctgattgacaggaacctgattgactactttgtgcccttcctgcccctggagtacaagcacctgaagatgtgcatccgggtggagatgcagagccggggctatgaaattgatgaggacatcgtgtcccgggtggccgaggagatgaccttcttccccaaggaggagagggtcttcagtgacaagggctgcaagacagtgttcaccaagctggactactactatgatgactag

SEQ ID NO: 1808 - DNA, 906 bp, Artificial Sequence
  derived and/or modified sequence
atgaagctgggccgggctgtgctgggcctgctgctgctggcccccagcgtggtgcaggccgtggagcccatcagcctgggcctggccctggccggcgtgctgaccggctacatctacccccggctgtactgcctgtttgctgagtgctgcggccagaagaggagcctgagccgggaggccctgcagaaggacctggatgacaacctgtttggccagcacctggccaagaagatcatcctgaatgctgtgtttggcttcatcaacaaccccaagcccaagaagcccctgaccctgagcctgtttgtggccaccctgcacttcccccacgccagcaacatcaccctgtacaaggaccagctgcagctgtggatcagaggaaatgtgtctgcctgtgcccggagcatcttcatctttgatgagatggacaagatgcacgccggcctgattgatgccatcaagcccttcctggactactatgacctggtggatggagtgtcctaccagaaggccatgttcatcttcctgagcaatgctggagctgagcgcatcacagatgtggccctggacttctggaggtctgggaagcagcgggaggacatcaagctgaaggacattgaacatgccctgtctgtgtctgtgttcaacaacaagaacagcggcttctggcacagcagcctgattgacaggaacctgattgactactttgtgcccttcctgcccctggagtacaagcacctgaagatgtgcatccgggtggagatgcagagccggggctatgaaattgatgaagatattgtgtcccgggtggccgaggagatgaccttcttccccaaggaggagagggtcttcagtgacaagggctgcaagacagtgttcaccaagctggactactactatgatgactag

SEQ ID NO: 1809 - DNA, 999 bp, Artificial Sequence
  derived and/or modified sequence
atgaagctgggccgggccgtgctgggcctgctgctgctggccccctcggtcgtgcaggcagtcgaacccatctctctagggttggcactggctggagtgcttacaggttacatctatccgagactctactgcctattcgccgaatgttgcggacagaagcgatccctttcccgggaggctctccagaaggacctagatgataacctatttgggcaacaccttgccaagaagatcatactgaatgcggtgtttggattcatcaacaatcctaagcctaagaagccgctgaccctttcactccatggatggacgggaaccgggaagaactttgtgtccaagattatcgctgaaaacatctacgaagggggactaaattccgactacgttcacttattcgtggcaacattgcacttcccacatgcctccaacattacactgtacaaggaccagctgcagctctggatccgcggaaatgtgtccgcatgcgcgaggagtatttttattttcgatgagatggataaaatgcacgccggtctcatcgatgcaatcaagccattccttgattactatgacttggttgatggagtgtcctatcagaaggcaatgtttattttcctttcaaacgctggcgccgagagaatcaccgacgtggctctcgatttttggcggagcggtaagcagagggaagatataaagctcaaggacattgaacatgcgctctccgtttcagtcttcaataataagaatagtggcttctggcactccagcctgatcgataggaaccttatcgactacttcgtccccttcctgccattggagtataagcaccttaaaatgtgcattcgcgtcgagatgcagagtcgcgggtacgagatagatgaagatatcgtttccagggtcgccgaggagatgacctttttccccaaagaggaacgggtgttttctgataaaggatgtaaaacggtattcaccaagcttgattactactatgacgactag

SEQ ID NO: 1810 - DNA, 906 bp, Artificial Sequence
  derived and/or modified sequence
atgaagctgggccgggccgtgctgggcctgctgctgctggccccctccgttgtgcaagccgttgagccaattagccttggcctggctctcgctggcgtgttgacagggtacatctaccccaggttgtattgtctgttcgccgagtgttgcgggcagaagaggtcactttctcgggaggccctgcagaaagacctagacgataacttattcggccaacatttggccaaaaagatcattttgaatgctgtgttcggttttattaacaacccaaaaccgaagaaaccccttactctttccctgttcgtcgccactctgcactttccgcacgcctctaacatcaccctgtacaaggaccagctacagctgtggatccgcggaaacgtctctgcatgcgccagaagtatatttatttttgacgaaatggacaaaatgcacgcagggctgatcgatgccatcaaaccattcctggactactatgatctggtggatggggtgtcatatcaaaaagcaatgtttatcttcctgtctaatgctggcgccgaacggatcaccgatgttgctctcgatttctggcgatccggaaagcagagggaggacattaagctgaaggatattgaacacgccctgagcgtgagtgtcttcaataacaaaaacagtggcttttggcactcttcactgatcgatcgcaatctcattgactactttgtgccattcctaccgttagagtacaaacatctcaagatgtgcatcagggttgaaatgcaatctcgaggttacgagatcgatgaggacatcgtgtcgcgggtggccgaagagatgaccttctttcctaaggaggaacgcgtgttttccgataaggggtgtaagaccgtgttcacgaaattagactactattacgatgattag

SEQ ID NO: 1811 - DNA, 999 bp, Artificial Sequence
  derived and/or modified sequence
atgaaactggggagggcagtgcttggccttctcctgctggctccttcagtcgtccaagctgttgagcccatttccttgggactcgcccttgcgggagtgctgaccgggtacatttatcccagactgtattgcttgtttgccgaatgttgcggacaaaagaggtccctcagcagagaagcactccaaaaggacctggatgataacctcttcgggcagcacttggcgaaaaagataatcttgaacgctgtattcggctttatcaacaatccaaaacccaagaagccccttacactttcgctgcatggctggacgggaacgggaaagaacttcgtgagtaagattatcgcagaaaatatttatgagggtgggctcaattccgattacgtgcatctgttcgtagccacgttgcactttccgcatgccagcaacatcaccctttataaagatcagttacaactctggatccgaggaaatgtgagtgcttgcgccagatcaatctttatcttcgatgaaatggataaaatgcatgccggtctgatagacgctataaagccattcttagactactatgacctagtggacggcgtcagctatcagaaggctatgttcattttcctgtcgaacgcaggggcagagaggatcacagatgtcgccctggacttttggcgcagcgggaagcagagagaggacattaagcttaaggatattgaacatgcccttagcgtgtccgttttcaataacaagaacagcggtttttggcattcttcactcatcgatcgcaatttgatcgactacttcgtgccgtttcttccactggagtataagcatctcaagatgtgtattcgggtggaaatgcagtctaggggttacgaaatagatgaggacatcgtctcacgcgtggccgaggagatgaccttctttcctaaggaggagcgggtatttagcgataagggttgcaagacagtctttaccaagctggactactactatgacgattag

SEQ ID NO: 1812 - DNA, 906 bp, Artificial Sequence
  derived and/or modified sequence
atgaagctgggtcgggcagttctgggtctgctactgctggcgcctagtgttgtccaggcggtagagcctatcagtctcgggctggccctcgctggtgtgctgacgggttacatttatcctaggttgtattgcctctttgcagagtgttgcgggcagaagagatccctatctagggaggctctgcagaaagaccttgatgacaatctgttcgggcaacatttggccaaaaagatcatcctaaacgccgttttcggctttatcaataacccgaaacccaagaagccacttacactcagtctgttcgtggcaacactgcactttccccatgcctcaaacatcacattatataaagaccagctccagctctggataaggggaaacgtgtctgcctgcgcgagaagcatcttcattttcgacgagatggacaagatgcacgccggactgatcgatgctatcaagccttttctcgattactacgacctcgtagatggagtgtcataccaaaaggcaatgtttatctttctgtctaacgcaggcgctgaacgtatcacggatgtggccctggatttctggcgaagtggaaaacagagagaggacattaaattgaaggacatcgaacacgccctgtccgtatccgtatttaataataagaattctggcttttggcatagttcactgattgacagaaatctgatcgactatttcgtgccctttcttcccctggagtacaagcacctgaaaatgtgtatccgcgttgagatgcagagccggggttacgagattgacgaagatatcgtaagccgggtggccgaggagatgactttctttcctaaggaagaacgtgtcttttctgataagggctgcaagaccgtgtttacgaagctggactactactacgatgactag

SEQ ID NO: 1813 - DNA, 2076 bp, Artificial Sequence
  derived and/or modified sequence
accggttcgcggtcggcgcgagaacaagcagggtggcgcgggtccgggcatgaagctgggccgggccgtgctgggcctgctgctgctggcgccgtccgtggtgcaggcggtggagcccatcagcctgggactggccctggccggcgtcctcaccggctacatctacccgcgtctctactgcctcttcgccgagtgctgcgggcagaagcggagccttagccgggaggcactgcagaaggatctggacgacaacctctttggacagcatcttgcaaagaaaatcatcttaaatgccgtgtttggtttcataaacaacccaaagcccaagaaacctctcacgctctccctgcacgggtggacaggcaccggcaaaaatttcgtcagcaagatcatcgcagagaatatttacgagggtggtctgaacagtgactatgtccacctgtttgtggccacattgcactttccacatgcttcaaacatcaccttgtacaaggatcagttacagttgtggattcgaggcaacgtgagtgcctgtgcgaggtccatcttcatatttgatgaaatggataagatgcatgcaggcctcatagatgccatcaagcctttcctcgactattatgacctggtggatggggtctcctaccagaaagccatgttcatatttctcagcaatgctggagcagaaaggatcacagatgtggctttggatttctggaggagtggaaagcagagggaagacatcaagctcaaagacattgaacacgcgttgtctgtgtcggttttcaataacaagaacagtggcttctggcacagcagcttaattgaccggaacctcattgattattttgttcccttcctccccctggaatacaaacacctaaaaatgtgtatccgagtggaaatgcagtcccgaggctatgaaattgatgaagacattgtaagcagagtggctgaggagatgacatttttccccaaagaggagagagttttctcagataaaggctgcaaaacggtgttcaccaagttagattattactacgatgattgacagtcatgattggcagccggagtcactgcctggagttggaaaagaaacaacactcagtccttccacacttccacccccagctcctttccctggaagaggaatccagtgaatgttcctgtttgatgtgacaggaattctccctggcattgtttccaccccctggtgcctgcaggccacccagggaccacgggcgaggacgtgaagcctcccgaacacgcacagaaggaaggagccagctcccagcccactcatcgcagggctcatgattttttacaaattatgttttaattccaagtgtttctgtttcaaggaaggatgaataagttttattgaaaatgtggtaactttatttaaaatgatttttaacattatgagagactgctcagattctaagttgttggccttgtgtgtgtgtttttttttaagttctcatcattattacatagactgtgatgtatctttactggaaatgagcccaagcacacatgcatggcatttgttccacaggagggcatccctggggatgtggctggagcatgagccagctctgtcccaggatggtcccagcggatgctgccaggggcagtgaagtgtttaggtgaaggacaagtaggtaagaggacgccttcaggcaccacagataagcctgaaacagcctctccaagggttttcaccttagcaacaatgggagctgtgggagtgattttggccacactgtcaacatttgttagaaccagtcttttgaaagaaaagtatttccaacttgtcacttgccagtcactccgttttgcaaaaggtggcccttcactgtccattccaaatagcccacacgtgctctctgctggattctaaattatgtgaattttgccatattaaatcttcctcatttatactattatttgttacgttcaatcagaatccccgaaacctcctataaagcttagctgccccttctgaggatgctgagaacggtgtctttctttataaatgcaaatggctaccgttttacaataaaattttgcatgtgc

SEQ ID NO: 1814 - DNA, 1984 bp, Artificial Sequence
  derived and/or modified sequence
accggttcgcggtcggcgcgagaacaagcagggtggcgcgggtccgggcatgaagctgggccgggccgtgctgggcctgctgctgctggcgccgtccgtggtgcaggcggtggagcccatcagcctgggactggccctggccggcgtcctcaccggctacatctacccgcgtctctactgcctcttcgccgagtgctgcgggcagaagcggagccttagccgggaggcactgcagaaggatctggacgacaacctctttggacagcatcttgcaaagaaaatcatcttaaatgccgtgtttggtttcataaacaacccaaagcccaagaaacctctcacgctctccctgtttgtggccacattgcactttccacatgcttcaaacatcaccttgtacaaggatcagttacagttgtggattcgaggcaacgtgagtgcctgtgcgaggtccatcttcatatttgatgaaatggataagatgcatgcaggcctcatagatgccatcaagcctttcctcgactattatgacctggtggatggggtctcctaccagaaagccatgttcatatttctcagcaatgctggagcagaaaggatcacagatgtggctttggatttctggaggagtggaaagcagagggaagacatcaagctcaaagacattgaacacgcgttgtctgtgtcggttttcaataacaagaacagtggcttctggcacagcagcttaattgaccggaacctcattgattattttgttcccttcctccccctggaatacaaacacctaaaaatgtgtatccgagtggaaatgcagtcccgaggctatgaaattgatgaagacattgtaagcagagtggctgaggagatgacatttttccccaaagaggagagagttttctcagataaaggctgcaaaacggtgttcaccaagttagattattactacgatgattgacagtcatgattggcagccggagtcactgcctggagttggaaaagaaacaacactcagtccttccacacttccacccccagctcctttccctggaagaggaatccagtgaatgttcctgtttgatgtgacaggaattctccctggcattgtttccaccccctggtgcctgcaggccacccagggaccacgggcgaggacgtgaagcctcccgaacacgcacagaaggaaggagccagctcccagcccactcatcgcagggctcatgattttttacaaattatgttttaattccaagtgtttctgtttcaaggaaggatgaataagttttattgaaaatgtggtaactttatttaaaatgatttttaacattatgagagactgctcagattctaagttgttggccttgtgtgtgtgtttttttttaagttctcatcattattacatagactgtgatgtatctttactggaaatgagcccaagcacacatgcatggcatttgttccacaggagggcatccctggggatgtggctggagcatgagccagctctgtcccaggatggtcccagcggatgctgccaggggcagtgaagtgtttaggtgaaggacaagtaggtaagaggacgccttcaggcaccacagataagcctgaaacagcctctccaagggttttcaccttagcaacaatgggagctgtgggagtgattttggccacactgtcaacatttgttagaaccagtcttttgaaagaaaagtatttccaacttgtcacttgccagtcactccgttttgcaaaaggtggcccttcactgtccattccaaatagcccacacgtgctctctgctggattctaaattatgtgaattttgccatattaaatcttcctcatttatactattatttgttacgttcaatcagaatccccgaaacctcctataaagcttagctgccccttctgaggatgctgagaacggtgtctttctttataaatgcaaatggctaccgttttacaataaaattttgcatgtgcc

SEQ ID NO: 1815 - protein, 442 aa, Artificial Sequence
  derived and/or modified sequence
MQPPPSLCGRALVALVLACGLSRIWGEERGFPPDRATPLLQTAEIMTPPTKTLWPKGSNASLARSLAPAEVPKGDRTAGSPPRTISPPPCQGPIEIKETFKYINTVVSCLVFVLGIIGNSTLLRIIYKNKCMRNGPNILIASLALGDLLHIVIDIPINVYKLLAEDWPFGAEMCKLVPFIQKASVGITVLSLCALSIDRYRAVASWSRIKGIGVPKWTAVEIVLIWVVSVVLAVPEAIGFDIITMDYKGSYLRICLLHPVQKTAFMQFYKTAKDWWLFSFYFCLPLAITAFFYTLMTCEMLRKKSGMQIALNDHLKQRREVAKTVFCLVLVFALCWLPLHLSRILKLTLYNQNDPNRCELLSFLLVLDYIGINMASLNSCINPIALYLVSKRFKNCFKSCLCCWCQSFEEKQSLEEKQSCLKFKANDHGYDNFRSSNKYSSS

SEQ ID NO: 1816 - protein, 292 aa, Artificial Sequence
  derived and/or modified sequence
MPLHVKWPFPAVPPLTWTLASSVVMGLVGTYSCFWTKYMNHLTVHNREVLYELIEKRGPATPLITVSNHQSCMDDPHLWGILKLRHIWNLKLMRWTPAAADICFTKELHSHFFSLGKCVPVCRGAEFFQAENEGKGVLDTGRHMPGAGKRREKGDGVYQKGMDFILEKLNHGDWVHIFPEGKVNMSSEFLRFKWGIGRLIAECHLNPIILPLWHVGMNDVLPNSPPYFPRFGQKITVLIGKPFSALPVLERLRAENKSAVEMRKALTDFIQEEFQHLKTQAEQLHNHLQPGR

SEQ ID NO: 1817 - protein, 265 aa, Artificial Sequence
  derived and/or modified sequence
MPLHVKWPFPAVPPLTWTLASSVVMGLVGTYSCFWTKYMNHLTVHNREVLYELIEKRGPATPLITVSNHQSCMDDPHLWGILKLRHIWNLKLMRWTPAAADICFTKELHSHFFSLGKCVPVCRGAEFFQAENEGKGVLDTGRHMPGAGKRREKGKVNMSSEFLRFKWGIGRLIAECHLNPIILPLWHVGMNDVLPNSPPYFPRFGQKITVLIGKPFSALPVLERLRAENKSAVEMRKALTDFIQEEFQHLKTQAEQLHNHLQPGR

SEQ ID NO: 1818 - DNA, 879 bp, Artificial Sequence
  derived and/or modified sequence
atgcccctgcacgtgaagtggcccttccccgccgtgccccccctgacctggaccctggccagcagcgtggtgatgggcctggtgggcacctacagctgcttctggaccaagtacatgaaccacctgaccgtgcacaacagagaggtgctgtacgagctgatcgagaagagaggccccgccacccccctgatcaccgtgagcaaccaccagagctgcatggacgacccccacctgtggggcatcctgaagctgagacacatctggaacctgaagctgatgagatggacccccgccgccgccgacatctgcttcaccaaggagctgcacagccacttcttcagcctgggcaagtgcgtgcccgtgtgcagaggcgccgagttcttccaggccgagaacgagggcaagggcgtgctggacaccggcagacacatgcccggcgccggcaagagaagagagaagggcgacggcgtgtaccagaagggcatggacttcatcctggagaagctgaaccacggcgactgggtgcacatcttccccgagggcaaggtgaacatgagcagcgagttcctgagattcaagtggggcatcggcagactgatcgccgagtgccacctgaaccccatcatcctgcccctgtggcacgtgggcatgaacgacgtgctgcccaacagccccccctacttccccagattcggccagaagatcaccgtgctgatcggcaagcccttcagcgccctgcccgtgctggagagactgagagccgagaacaagagcgccgtggagatgagaaaggccctgaccgacttcatccaggaggagttccagcacctgaagacccaggccgagcagctgcacaaccacctgcagcccggcagatag

SEQ ID NO: 1819 - DNA, 798 bp, Artificial Sequence
  derived and/or modified sequence
atgcccctgcacgtgaagtggcccttccccgccgtgccccccctgacctggaccctggccagcagcgtggtgatgggcctggtgggcacctacagctgcttctggaccaagtacatgaaccacctgaccgtgcacaacagagaggtgctgtacgagctgatcgagaagagaggccccgccacccccctgatcaccgtgagcaaccaccagagctgcatggacgacccccacctgtggggcatcctgaagctgagacacatctggaacctgaagctgatgagatggacccccgccgccgccgacatctgcttcaccaaggagctgcacagccacttcttcagcctgggcaagtgcgtgcccgtgtgcagaggcgccgagttcttccaggccgagaacgagggcaagggcgtgctggacaccggcagacacatgcccggcgccggcaagagaagagagaagggcaaggtgaacatgagcagcgagttcctgagattcaagtggggcatcggcagactgatcgccgagtgccacctgaaccccatcatcctgcccctgtggcacgtgggcatgaacgacgtgctgcccaacagccccccctacttccccagattcggccagaagatcaccgtgctgatcggcaagcccttcagcgccctgcccgtgctggagagactgagagccgagaacaagagcgccgtggagatgagaaaggccctgaccgacttcatccaggaggagttccagcacctgaagacccaggccgagcagctgcacaaccacctgcagcccggcagatag

SEQ ID NO: 1820 - DNA, 879 bp, Artificial Sequence
  derived and/or modified sequence
atgcctcttcatgtgaaatggcccttccctgctgtacccccccttacatggactctggcatctagtgtggtcatgggcctggtcgggacatattcttgcttctggaccaagtacatgaaccacctgacggtgcacaacagagaagtgctgtatgaactcatagagaaaagggggcctgctacgcctctgattaccgtctccaatcatcagtcatgcatggacgatccacacctttgggggattctaaaacttcgccatatttggaatctgaagttaatgagatggactccagcagcagcggacatctgttttaccaaggagcttcactcccatttttttagccttgggaaatgtgtccctgtatgcaggggcgccgagttctttcaggctgagaacgagggcaagggagtgctggacactggcagacacatgccaggtgcgggtaaacgccgtgaaaaaggcgatggcgtataccaaaaaggtatggattttatattagaaaagctgaaccatggggactgggttcacattttccccgagggtaaggtcaatatgtcctcggagttcttacgcttcaagtggggcattggtcgcttaattgctgagtgtcacctaaatcccatcatcctgcccctgtggcacgtagggatgaatgacgtccttcccaactctccgccttacttccctcgattcgggcagaagataactgtactcatcggaaaaccattttccgccctgcccgtcctcgagaggctccgcgcagagaacaaatcggctgtggaaatgaggaaggcgctgacagacttcattcaggaagagtttcaacatttaaagacccaggccgagcagttgcataatcatttacagcctggcagatag

SEQ ID NO: 1821 - DNA, 798 bp, Artificial Sequence
  derived and/or modified sequence
atgccactgcacgttaaatggccattcccagccgtcccacctcttacatggacattggctagctctgtcgtgatgggactggtcggaacttacagttgtttttggacaaagtatatgaatcacctcaccgtacataacagagaggtactgtacgaattgatcgaaaagagaggccccgccacacctctgattaccgtctctaaccaccagagttgcatggatgacccgcacttgtggggaatccttaaattgcgccatatctggaaccttaagcttatgagatggaccccagccgcagctgatatctgtttcaccaaggaacttcactcccattttttctccctgggtaagtgcgtaccagtctgtcgtggggcagaattctttcaggcagagaatgaaggaaagggggtgctggatacagggcgccatatgcctggagcaggcaagcgacgtgagaagggcaaagtgaacatgtctagcgagtttttacgtttcaagtggggtatcggacgtcttatagcggaatgccacttgaaccccattatcctgcctctgtggcacgtagggatgaacgatgttctaccaaatagtccaccctatttcccacggttcgggcagaaaataaccgtgctgatcgggaaacccttttcggccttgccagtgctagagcgtttgagagcggaaaacaagtctgccgtggaaatgcggaaagccctgaccgacttcattcaggaagaatttcagcatctgaagacccaggcagagcaactccacaaccacttacagccaggccggtag

SEQ ID NO: 1822 - DNA, 879 bp, Artificial Sequence
  derived and/or modified sequence
atgcccctgcacgtgaagtggcccttccctgctgtgccccccctgacctggaccctggccagctctgtggtgatgggcctggtgggcacctacagctgcttctggaccaagtacatgaaccacctgactgtgcacaaccgggaggtgctgtatgagctgattgagaagaggggccctgccacccccctcatcaccgtgagcaaccaccagagctgcatggatgacccccacctgtggggcatcctgaagctgcggcacatctggaacctgaagctgatgcgctggaccccagctgctgctgacatctgcttcaccaaggagctgcacagccacttcttcagcctgggcaaatgtgtgcctgtgtgcagaggagctgagttcttccaggctgaaaatgaaggaaaaggagtgctggacaccggccgccacatgcctggagctgggaagaggcgggagaagggagatggagtgtaccagaagggcatggacttcatcctggagaagctgaaccacggggactgggtgcacatcttccctgagggcaaggtgaacatgagcagcgagttcctgcgcttcaagtggggcatcggccgcctgattgctgagtgccacctgaaccccatcatcctgcccctgtggcacgtgggcatgaatgatgtgctgcccaacagccccccctacttccccaggtttggccagaagatcaccgtgctgattggcaagcccttcagcgccctgcctgtgctggagcggctgcgggcagagaacaagtctgctgtggagatgaggaaggccctgacagacttcatccaggaggagttccagcacctgaagacccaggccgagcagctgcacaaccacctgcagcccggccgctag

SEQ ID NO: 1823 - DNA, 798 bp, Artificial Sequence
  derived and/or modified sequence
atgcccctgcacgtgaagtggcccttccctgctgtgccccccctgacctggaccctggccagctctgtggtgatgggcctggtgggcacctacagctgcttctggaccaagtacatgaaccacctgactgtgcacaaccgggaggtgctgtatgagctgattgagaagaggggccctgccacccccctcatcaccgtgagcaaccaccagagctgcatggatgacccccacctgtggggcatcctgaagctgcggcacatctggaacctgaagctgatgcgctggaccccagctgctgctgacatctgcttcaccaaggagctgcacagccacttcttcagcctgggcaaatgtgtgcctgtgtgcagaggagctgagttcttccaggctgaaaatgaaggaaaaggagtgctggacaccggccgccacatgcctggagctgggaagaggcgggagaagggcaaggtgaacatgagcagcgagttcctgcgcttcaagtggggcatcggccgcctgattgctgagtgccacctgaaccccatcatcctgcccctgtggcacgtgggcatgaatgatgtgctgcccaacagccccccctacttcccccgcttcggccagaagatcaccgtgctgattggcaagcccttcagcgccctgcctgtgctggagcggctgcgggcagagaacaagtctgctgtggagatgaggaaggccctgacagacttcatccaggaggagttccagcacctgaagacccaggccgagcagctgcacaaccacctgcagcctggaagatag

SEQ ID NO: 1824 - DNA, 879 bp, Artificial Sequence
  derived and/or modified sequence
atgcccctgcacgtgaagtggcccttccccgccgtgccccccctgacctggactcttgcttcctctgtggtgatgggactcgtgggaacctactcgtgcttctggacaaagtacatgaaccatttaacagtccacaacagggaggttctgtacgagttgattgagaaacgaggtccagcgaccccattaattacagtgtccaatcatcagtcgtgtatggacgacccgcatctatggggaattctaaagttgagacatatatggaatctaaaactaatgaggtggacccctgctgctgccgacatctgtttcacgaaggagctgcacagccactttttcagcctgggcaagtgcgtgccagtctgtaggggcgccgagttcttccaggctgaaaacgaagggaagggtgtgctggacaccgggcgccacatgcctggggccggtaaaagaagggagaagggggatggcgtttaccagaagggaatggactttattctcgagaagttaaaccatggagattgggttcacattttcccagagggcaaggtcaatatgagcagcgagtttctccggtttaagtgggggatcggcaggctgattgccgaatgtcatctcaaccctataattcttccactgtggcatgtgggcatgaatgacgtgctccctaatagccctccctattttccaagattcggtcaaaagataactgtgcttatcggcaagcctttttctgcacttcccgtactggaacgtctacgagccgagaacaaaagcgccgtggaaatgcggaaagccctgacagactttatccaggaggaatttcaacaccttaaaacacaggcggaacagctgcacaaccacctccagccagggcggtag

SEQ ID NO: 1825 - DNA, 798 bp, Artificial Sequence
  derived and/or modified sequence
atgcccctgcacgtgaagtggcccttccccgccgtgccccccctgacttggactcttgccagttctgtggtcatggggctggtaggaacctactcttgcttctggaccaaatacatgaatcatttaaccgtacacaatcgggaggttttgtacgagctcatcgagaagcggggcccagccactccccttattactgtctctaatcaccagtcctgtatggacgatccccatttgtggggaattctcaaactccgacacatctggaatctgaagctgatgcgttggactccggctgccgccgacatatgctttaccaaagaattgcacagccacttcttctctctgggcaagtgtgttccagtatgtaggggcgcagagtttttccaggcagagaatgagggaaaaggtgtcctagacactggtcgacatatgcccggcgcgggtaaacgcagggaaaaaggcaaagtgaacatgtccagtgagttcctgaggttcaagtggggcatcggccgcctgatagctgagtgccaccttaacccgattattctgcccttatggcacgttggaatgaatgacgtgctccctaatagcccaccgtactttcctcgattcggtcagaagatcacggtccttattggtaagcctttttccgccctaccggtgttggagcgcctgcgggctgaaaacaaaagcgctgtcgaaatgaggaaggccctgaccgatttcattcaagaagagtttcagcaccttaagacacaggccgagcagctgcacaatcatttacaaccaggccgctag

SEQ ID NO: 1826 - DNA, 879 bp, Artificial Sequence
  derived and/or modified sequence
atgccgctgcacgtgaaatggccgtttccagcagttcctcccctgacgtggaccctggcatcctcagtagtcatgggccttgttggcacatacagctgtttctggacaaagtacatgaatcatctaacagtccacaatcgtgaggtactttacgagctgatcgagaagaggggcccagccacacccttaataacagtatcgaaccaccagagttgcatggatgacccgcatctgtggggaatcttaaagctgcgtcatatttggaatttgaaactgatgcgctggacccccgcagccgctgacatatgttttaccaaagaactacatagccatttcttctcactcggaaaatgtgtacctgtgtgtcgaggcgctgaattttttcaggccgaaaacgagggcaagggtgtgcttgatactggcagacacatgcccggagctgggaaaagacgtgagaagggggacggcgtctatcaaaaggggatggacttcattctggaaaagctgaatcatggcgattgggtgcacatcttccccgaggggaaagtgaacatgtcttcagaattcctgagattcaagtggggtatcggcaggttaattgccgagtgccacctgaatcctatcatactgcccctttggcacgttgggatgaacgacgttttgccaaactcaccgccatacttccccaggttcggacagaaaattactgttctaatcggaaagcctttctctgccctgcctgtactggaacgattgagagcggaaaataagtcagctgtagagatgcgcaaggctttgaccgatttcatccaggaggagtttcaacatttgaaaactcaggccgaacagcttcataatcacctgcagccgggaagatag

SEQ ID NO: 1827 - DNA, 798 bp, Artificial Sequence
  derived and/or modified sequence
atgcccctgcacgtcaagtggccttttcctgccgtccccccactgacatggaccctggcttcgtcagttgtcatggggctcgtcggcacctactcttgcttttggacgaagtacatgaaccaccttacggtacataacagagaagtgctctacgaactgatagagaagagaggcccagccacgccactgattaccgtatccaaccatcagtcttgcatggacgatccacacttgtggggcatcctgaagttaagacacatctggaatctgaaacttatgcgctggacaccggctgctgccgatatctgtttcaccaaagagctccactcacattttttttcactcggcaagtgtgttccagtctgtagaggagctgaatttttccaagctgagaatgaaggaaagggcgttctggacacagggcgacatatgcctggagcaggcaagcgacgggagaagggcaaagtgaacatgagtagtgagtttctcaggttcaagtgggggatcggtcgactaatagcagagtgtcatctgaatccaataattttaccactctggcatgttggcatgaatgatgtcctaccaaattccccaccttatttcccgagatttggacagaaaatcaccgtccttattggcaagccattttctgctctccccgtcctggaacggctccgagccgagaacaagtccgccgtggaaatgcgcaaggctctaactgacttcatccaggaggaatttcaacatttaaaaacacaagctgagcaactgcacaaccacttacagccgggtcgttag

SEQ ID NO: 1828 - DNA, 1890 bp, Artificial Sequence
  derived and/or modified sequence
ccgggccggggtgccagcgcccgccttcccgtttcctcccgttccgcagcgcgcccacggcctgtgaccccggcgaccgctccccagtgacgagagagcggggccgggcgctgctccggcctgacctgcgaagggacctcggtccagtcccctgttgcgccgcgccccctgtccgtccgtgcgcgggccagtcaggggccagtgtctcgagcggtcgaggtcgcagacctagaggcgccccacaggccggcccggggcgctgggagcgccggccgcgggccgggtggggatgcctctgcacgtgaagtggccgttccccgcggtgccgccgctcacctggaccctggccagcagcgtcgtcatgggcttggtgggcacctacagctgcttctggaccaagtacatgaaccacctgaccgtgcacaacagggaggtgctgtacgagctcatcgagaagcgaggcccggccacgcccctcatcaccgtgtccaatcaccagtcctgcatggacgaccctcatctctgggggatcctgaaactccgccacatctggaacctgaagttgatgcgttggacccctgcagctgcagacatctgcttcaccaaggagctacactcccacttcttcagcttgggcaagtgtgtgcctgtgtgccgaggagcagaatttttccaagcagagaatgaggggaaaggtgttctagacacaggcaggcacatgccaggtgctggaaaaagaagagagaaaggagatggcgtctaccagaaggggatggacttcattttggagaagctcaaccatggggactgggtgcatatcttcccagaagggaaagtgaacatgagttccgaattcctgcgtttcaagtggggaatcgggcgcctgattgctgagtgtcatctcaaccccatcatcctgcccctgtggcatgtcggaatgaatgacgtccttcctaacagtccgccctacttcccccgctttggacagaaaatcactgtgctgatcgggaagcccttcagtgccctgcctgtactcgagcggctccgggcggagaacaagtcggctgtggagatgcggaaagccctgacggacttcattcaagaggaattccagcatctgaagactcaggcagagcagctccacaaccacctccagcctgggagataggccttgcttgctgccttctggattcttggcccgcacagagctggggctgagggatggactgatgcttttagctcaaacgtggcttttagacagatttgttcatagaccctctcaagtgccctctccgagctggtaggcattccagctcctccgtgcttcctcagttacacaaaggacctcagctgcttctcccacttggccaagcagggaggaagaagcttaggcagggctctctttccttcttgccttcagatgttctctcccaggggctggcttcaggagggagcatagaaggcaggtgagcaaccagttggctaggggagcagggggcccaccagagctgtggagaggggaccctaagactcctcggcctggctcctacccaccgcccttgccgaaccaggagctgctcactacctcctcagggatggccgttggccacgtcttccttctgcctgagcttccccccgaccacaggccctttcctcaggcaaggtctggcctcaggtgggccgcaggcgggaaaagcagcccttggccagaagtcaagcccagccacgtggagcctagagtgagggcctgaggtctggctgcttgcccccatgctggcgccaacaacttctccatcctttctgcctctcaacatcacttgaatcctagggcctgggttttcatgtttttgaaacagaaccataaagcatatgtgttggcttgttgtaaaa

SEQ ID NO: 1829 - DNA, 798 bp, Artificial Sequence
  derived and/or modified sequence
atgcctctgcacgtgaagtggccgttccccgcggtgccgccgctcacctggaccctggccagcagcgtcgtcatgggcttggtgggcacctacagctgcttctggaccaagtacatgaaccacctgaccgtgcacaacagggaggtgctgtacgagctcatcgagaagcgaggcccggccacgcccctcatcaccgtgtccaatcaccagtcctgcatggacgaccctcatctctgggggatcctgaaactccgccacatctggaacctgaagttgatgcgttggacccctgcagctgcagacatctgcttcaccaaggagctacactcccacttcttcagcttgggcaagtgtgtgcctgtgtgccgaggagcagaatttttccaagcagagaatgaggggaaaggtgttctagacacaggcaggcacatgccaggtgctggaaaaagaagagagaaagggaaagtgaacatgagttccgaattcctgcgtttcaagtggggaatcgggcgcctgattgctgagtgtcatctcaaccccatcatcctgcccctgtggcatgtcggaatgaatgacgtccttcctaacagtccgccctacttcccccgctttggacagaaaatcactgtgctgatcgggaagcccttcagtgccctgcctgtactcgagcggctccgggcggagaacaagtcggctgtggagatgcggaaagccctgacggacttcattcaagaggaattccagcatctgaagactcaggcagagcagctccacaaccacctccagcctgggagatag

SEQ ID NO: 1830 - protein, 219 aa, Artificial Sequence
  derived and/or modified sequence
MDNYADLSDTELTTLLRRYNIPHGPVVDLNSTRGDADMYDLPKKEDALLYQSKGYNDDYYEESYFTTRTYGEPESAGPSRAVRQSVTSFPDADAFHHQVHDDDLLSSSEEECKDRERPMYGRDSAYQSITHYRPVSASRSSLDLSYYPTSSSTSFMSSSSSSSSWLTRRAIRPENRAPGAGLGQDRQVPLWGQLLLFLVFVIVLFFIYHFMQAEEGNPF

SEQ ID NO: 1831 - protein, 254 aa, Artificial Sequence
  derived and/or modified sequence
MDNYADLSDTELTTLLRRYNIPHGPVVGSTRRLYEKKIFEYETQRRRLSPPSSSAASSYSFSDLNSTRGDADMYDLPKKEDALLYQSKGYNDDYYEESYFTTRTYGEPESAGPSRAVRQSVTSFPDADAFHHQVHDDDLLSSSEEECKDRERPMYGRDSAYQSITHYRPVSASRSSLDLSYYPTSSSTSFMSSSSSSSSWLTRRAIRPENRAPGAGLGQDRQVPLWGQLLLFLVFVIVLFFIYHFMQAEEGNPF

SEQ ID NO: 1832 - DNA, 1370 bp, Artificial Sequence
  derived and/or modified sequence
cacggccggtctgtgccggctgctcccgcggttaggtcccgccccgcgcagcgcgcgcagcctgcggagccagcggccgtgacgcgacaacgattcggctgtgacgcgacaacgattcggctgtgacgcgagcgcggccgctcccgatgcgctcgtgccgcccccgccgtgctcctcggcagccgttgctcggccggttttggtaggcccgggccgccgccaggcctccgcctgagcccgcacccgccatggacaactacgcagatctttcggataccgagctgaccaccttgctgcgccggtacaacatcccgcacgggcctgtagtaggatcaactcgtaggctttacgagaagaagatcttcgagtacgagacccagaggcggcggctctcgccccccagctcgtccgccgcctcctcttatagcttctctgacttgaattcgactagaggggatgcagatatgtatgatcttcccaagaaagaggacgctttactctaccagagcaagggctacaatgacgactactatgaagagagctacttcaccaccaggacttatggggagcccgagtctgccggcccgtccagggctgtccgccagtcagtgacttcattcccagatgctgacgctttccatcaccaggtgcatgatgacgatcttttgtcttcttctgaagaggagtgcaaggatagggaacgccccatgtacggccgggacagtgcctaccagagcatcacgcactaccgccctgtttcagcctccaggagctccctggacctgtcctattatcctacttcctcctccacctcttttatgtcctcctcatcatcttcctcttcatggctcacccgccgtgccatccggcctgaaaaccgtgctcctggggctgggctgggccaggatcgccaggtcccgctctggggccagctgctgcttttcctggtctttgtgatcgtcctcttcttcatttaccacttcatgcaggctgaagaaggcaaccccttctagagggagccatgagggtctgggcttcagagctaggtctttggggaagtcctggctgactgccttagcagtgggggtgggggtgggggcaggggcaggggctttatgtgtttttgcttggggggcgctgggcctagcccagagtagtgcttgctccccctgccttgtcccaccagggaggcagcagactcaggccctccatggtcctctttgtcattttgttgacatgcattcctccttttgtcatcttgttggggggaggggattaaccaaaggccaccctgactttgtttttgtggacacacaataaaagccccgtttatttgtaaaaaaaaaaaaaaaaaaaaaaaaaaaaaaaaa

SEQ ID NO: 1833 - DNA, 660 bp, Artificial Sequence
  derived and/or modified sequence
atggacaactatgctgatctatctgacacagagttgacaaccttgctgcggcgctataacattcctcacggaccagtggtagacttgaactctactaggggagacgccgatatgtacgacttgcctaagaaggaagacgcgctgctctaccagtccaagggttacaacgacgactattatgaagagtcatattttactacccggacttatggcgaacccgaaagcgcaggtcccagtagagccgttcgacagagcgtgacctcgtttccggacgctgacgcttttcaccatcaggtccatgacgatgacctgctgtcatcttcagaggaggaatgtaaggacagggagagacccatgtatggcagggactcagcttatcaaagtatcacccactatcgtccagttagtgcatctcgcagcagcctggacctgagttactaccccacaagttccagcacatcgtttatgagtagtagcagcagtagctcaagctggctgacgaggcgagctattaggcccgaaaatagagcgcctggggctggcttggggcaagatcgccaagtccctctctggggtcaactgctgctcttcctggtttttgtgattgtcctgttcttcatctaccactttatgcaggccgaagaaggcaaccctttttag

SEQ ID NO: 1834 - DNA, 765 bp, Artificial Sequence
  derived and/or modified sequence
atggataattatgccgaccttagcgatactgaactgacgacgctgcttcgccgctataacattccacatgggccagtggtggggtctacccgaaggctttatgagaaaaagattttcgagtatgagacacaacgtcgacgtctctctccaccgtcatcctccgctgcctccagctactccttcagtgatctgaactctacccgaggcgatgccgatatgtatgacttgcctaaaaaagaggacgcacttttgtaccagagcaagggttacaacgatgattattatgaagaatcttatttcactacacgtacctatggggagcccgaatcggcggggccaagcagggccgtgcggcaatctgtgaccagctttcctgatgccgatgctttccaccatcaggtgcatgacgacgatcttctgtcttcaagtgaggaggagtgcaaagatagggagaggcccatgtacggacgggacagtgcatatcagagcattacgcactaccgacctgtatctgcttctaggtcctcgctcgacctgtcctactacccgacaagttcctccactagctttatgtcaagttcttcatcctcctccagctggctgactaggcgggctattagacctgagaatcgcgcccctggggccggtttgggccaggaccgacaggttccactttggggccagttgcttctttttctggtgttcgttatagtgctgttctttatctaccactttatgcaagccgaggaaggaaacccattctag

SEQ ID NO: 1835 - DNA, 660 bp, Artificial Sequence
  derived and/or modified sequence
atggacaactatgctgacctgagtgacacagagctgaccaccctgctgcggcgctacaacatcccccacggccctgtggtggacctgaacagcaccagaggagatgctgacatgtatgacctgcccaagaaggaggatgccctgctgtaccagagcaagggctacaatgatgactactatgaggagagctacttcaccaccaggacctacggggagcctgagagcgctggccccagcagagctgtgcggcagagcgtgaccagcttcccagatgctgatgccttccaccaccaggtgcatgatgatgacctgctgagcagcagcgaggaggagtgcaaggaccgggagcggcccatgtatggccgggacagcgcctaccagagcatcacccactacagacctgtgtctgccagccgcagcagcctggacctgagctactaccccaccagcagcagcaccagcttcatgagcagcagcagcagcagcagctcctggctgacccggcgggccatccggcctgagaacagagcccctggggccggcctgggccaggaccggcaggtgcccctgtggggccagctgctgctcttcctggtgtttgtgattgtgctcttcttcatctaccacttcatgcaggccgaggagggcaaccccttctag

SEQ ID NO: 1836 - DNA, 765 bp, Artificial Sequence
  derived and/or modified sequence
atggacaactatgctgacctgagtgacacagagctgaccaccctgctgcggcgctacaacatcccccacggccctgtggtgggcagcacccggcggctgtatgagaagaagatctttgaatatgagacccagaggcggcggctgagcccccccagcagcagcgctgccagcagctacagcttcagtgacctgaacagcaccagaggagatgctgacatgtatgacctgcccaagaaggaggatgccctgctgtaccagagcaagggctacaatgatgactactatgaggagagctacttcaccaccaggacctatggagagcctgagagcgctggccccagcagagctgtgcggcagagcgtgaccagcttcccagatgctgatgccttccaccaccaggtgcatgatgatgacctgctgagcagcagcgaggaggagtgcaaggaccgggagcggcccatgtatggccgggacagcgcctaccagagcatcacccactacagacctgtgtctgccagccgcagcagcctggacctgagctactaccccaccagcagcagcaccagcttcatgagcagcagcagcagcagcagctcctggctgacccggcgggccatccggccagaaaatagagcccctggagctggcctgggccaggaccggcaggtgcccctgtggggccagctgctgctcttcctggtgtttgtgattgtgctcttcttcatctaccacttcatgcaggccgaggagggcaaccccttctag

SEQ ID NO: 1837 - DNA, 660 bp, Artificial Sequence
  derived and/or modified sequence
atggacaactacgccgacctgagcgacaccgagctgaccaccctgctgaggaggtataatattccccatgggcccgtcgtggatctgaacagtactcgcggtgacgcagatatgtatgacctcccaaaaaaagaggatgccttactgtatcagtctaaaggttataatgatgattactatgaggaaagctatttcacgaccagaacctatggcgagcctgaaagcgccggccctagcagagcagtgaggcagagtgtaactagcttcccagatgctgatgccttccatcaccaagtccacgatgatgatttactcagctccagtgaagaggaatgcaaagatagagagcgccctatgtacggccgggactcagcataccagagtatcacgcattatcgccctgttagcgcgtcacgtagcagcctcgacttaagctactatccaacatcaagttctacctcctttatgtcaagtagtagttctagctccagctggcttactaggcgggccattagaccagagaaccgggccccaggcgcagggttaggccaggatagacaggtgcctttgtggggccaactgctcctctttcttgtattcgtgattgtgttattttttatttaccacttcatgcaagcagaggagggcaatcctttctag

SEQ ID NO: 1838 - DNA, 765 bp, Artificial Sequence
  derived and/or modified sequence
atggacaactacgccgacctgagcgacaccgagctgaccaccctgttacggaggtacaatatcccacatggcccagtggttggaagtacacgacggctttatgaaaagaaaattttcgagtacgaaactcagcgccgcagactcagtccgcccagctcatcagctgcctcttcttactcatttagcgacctaaactccacgcggggggatgcggatatgtatgatcttcccaaaaaggaagacgcactgttataccaaagcaaaggctacaatgatgattactacgaagaaagttattttaccaccagaacatacggggaacccgagtctgcgggcccatcccgcgcagtgagacaaagtgtgacaagttttcctgacgctgatgctttccaccaccaggttcacgacgatgacctcctgtcctcttctgaagaagagtgtaaggaccgggagcggcctatgtatggccgtgatagcgcctaccagtcaattactcactatagacccgtaagtgccagcaggtcctcgctcgacctgtcatattaccccacatcttcttccacctcctttatgagctcttcctcttctagctcttcctggctgacaagacgcgccatccgacctgaaaaccgggcgcccggcgctggattgggacaggaccggcaagtgccattgtggggtcaactgcttctgttcttagtgttcgtcattgtgctttttttcatctatcactttatgcaggctgaggaggggaacccattctag

SEQ ID NO: 1839 - DNA, 660 bp, Artificial Sequence
  derived and/or modified sequence
atggataattatgccgacctgagcgacacagaacttactacgctgttacggcgatataatatcccacacggacctgtcgtggacttgaattctacgcgcggagatgcagacatgtacgatttacccaaaaaggaagacgcattgttgtaccagagcaaaggatacaacgacgattactatgaggagagctatttcacaacacggacctatggggaacctgagtccgccggaccaagccgcgctgtgcgacaatccgtaacatctttcccagatgccgatgcgtttcaccaccaagtgcacgacgatgacctattgtcttccagtgaggaagaatgcaaggatcgagagcgacctatgtacggcagggatagcgcctatcagtccattactcactatcggccagtctccgcctctcgcagctctctcgatctgtcatactacccaacaagctcctctacctcattcatgtcatctagcagtagctccagctcctggctgactagacgtgcaattaggcctgagaaccgcgctcctggggctggcctgggtcaggatcggcaggtccccttatggggacaactcttgctctttctggtgtttgttatcgtgctcttctttatctaccacttcatgcaggccgaagagggtaaccccttttag

SEQ ID NO: 1840 - DNA, 765 bp, Artificial Sequence
  derived and/or modified sequence
atggataactacgccgacttgtctgacacggagctaacaaccctccttaggagatacaatattcctcacgggcctgtggtgggttcaaccaggcggctttacgagaaaaaaatattcgagtatgagactcagcgcaggcgcttgtcgccgccatcctcttctgcagcttctagttatagtttcagcgacttgaacagcacccgtggagatgccgacatgtacgacctcccaaagaaagaagacgccctcctatatcagagcaagggttacaacgatgattactacgaagaaagttattttaccacaagaacatacggcgagccagaatcagcaggaccctccagggctgtcaggcagtccgtgacatcgtttcccgacgccgacgctttccatcaccaggtgcacgacgacgacctcctttcctcatctgaggaagagtgtaaagatcgcgagcgcccaatgtacgggagggactcagcataccagagcattacccactatcggcctgtgtccgcttcccgttctagtcttgatctttcctattatcccacaagctctagtacatcgtttatgtcatctagttcctcatcaagttcatggctgacacggagagcgattcgtccagaaaatagggctcccggagctggccttgggcaagaccggcaggtgcccctgtggggccagctactcctgtttctggtgtttgtaatcgtcctttttttcatataccatttcatgcaagctgaggagggtaaccctttctag

SEQ ID NO: 1841 - DNA, 660 bp, Artificial Sequence
  derived and/or modified sequence
atggacaactacgccgacctgagcgacaccgagctgaccaccctgctgagaagatacaacatcccccacggccccgtggtggacctgaacagcaccagaggcgacgccgacatgtacgacctgcccaagaaggaggacgccctgctgtaccagagcaagggctacaacgacgactactacgaggagagctacttcaccaccagaacctacggcgagcccgagagcgccggccccagcagagccgtgagacagagcgtgaccagcttccccgacgccgacgccttccaccaccaggtgcacgacgacgacctgctgagcagcagcgaggaggagtgcaaggacagagagagacccatgtacggcagagacagcgcctaccagagcatcacccactacagacccgtgagcgccagcagaagcagcctggacctgagctactaccccaccagcagcagcaccagcttcatgagcagcagcagcagcagcagcagctggctgaccagaagagccatcagacccgagaacagagcccccggcgccggcctgggccaggacagacaggtgcccctgtggggccagctgctgctgttcctggtgttcgtgatcgtgctgttcttcatctaccacttcatgcaggccgaggagggcaaccccttctag

SEQ ID NO: 1842 - DNA, 765 bp, Artificial Sequence
  derived and/or modified sequence
atggacaactacgccgacctgagcgacaccgagctgaccaccctgctgagaagatacaacatcccccacggccccgtggtgggcagcaccagaagactgtacgagaagaagatcttcgagtacgagacccagagaagaagactgagcccccccagcagcagcgccgccagcagctacagcttcagcgacctgaacagcaccagaggcgacgccgacatgtacgacctgcccaagaaggaggacgccctgctgtaccagagcaagggctacaacgacgactactacgaggagagctacttcaccaccagaacctacggcgagcccgagagcgccggccccagcagagccgtgagacagagcgtgaccagcttccccgacgccgacgccttccaccaccaggtgcacgacgacgacctgctgagcagcagcgaggaggagtgcaaggacagagagagacccatgtacggcagagacagcgcctaccagagcatcacccactacagacccgtgagcgccagcagaagcagcctggacctgagctactaccccaccagcagcagcaccagcttcatgagcagcagcagcagcagcagcagctggctgaccagaagagccatcagacccgagaacagagcccccggcgccggcctgggccaggacagacaggtgcccctgtggggccagctgctgctgttcctggtgttcgtgatcgtgctgttcttcatctaccacttcatgcaggccgaggagggcaaccccttctag

SEQ ID NO: 1843 - DNA, 966 bp, Artificial Sequence
  derived and/or modified sequence
tcccgccccgcgcagcgcgcgcagcctgcggagccagcggccgtgacgcgacaacgattcggctgtgacgcgacaacgattcggctgtgacgcgagcgcggccgctcccgatgcgctcgtgccgcccccgccgtgctcctcggcagccgttgctcggccggttttggtaggcccgggccgccgccaggcctccgcctgagcccgcacccgccatggacaactacgcagatctttcggataccgagctgaccaccttgctgcgccggtacaacatcccgcacgggcctgtagtagacttgaattcgactagaggggatgcagatatgtatgatcttcccaagaaagaggacgctttactctaccagagcaagggctacaatgacgactactatgaagagagctacttcaccaccaggacttatggggagcccgagtctgccggcccgtccagggctgtccgccagtcagtgacttcattcccagatgctgacgctttccatcaccaggtgcatgatgacgatcttttgtcttcttctgaagaggagtgcaaggatagggaacgccccatgtacggccgggacagtgcctaccagagcatcacgcactaccgccctgtttcagcctccaggagctccctggacctgtcctattatcctacttcctcctccacctcttttatgtcctcctcatcatcttcctcttcatggctcacccgccgtgccatccggcctgaaaaccgtgctcctggggctgggctgggccaggatcgccaggtcccgctctggggccagctgctgcttttcctggtctttgtgatcgtcctcttcttcatttaccacttcatgcaggctgaagaaggcaaccccttctagagggagccatgagggtctgggcttcagagctaggtctttggggaagtcctggctgactgccttagcagtgggggtgggggtgggggcaggggca

SEQ ID NO: 1844 - DNA, 1379 bp, Artificial Sequence
  derived and/or modified sequence
gacgtttgggctcgcggccccagcctcccagctctcagggcacggccggtctgtgccggctgctcccgcggttaggtcccgccccgcgcagcgcgcgcagcctgcggagccagcggccgtgacgcgacaacgattcggctgtgacgcgacaacgattcggctgtgacgcgagcgcggccgctcccgatgcgctcgtgccgcccccgccgtgctcctcggcagccgttgctcggccggttttggtaggcccgggccgccgccaggcctccgcctgagcccgcacccgccatggacaactacgcagatctttcggataccgagctgaccaccttgctgcgccggtacaacatcccgcacgggcctgtagtaggatcaactcgtaggctttacgagaagaagatcttcgagtacgagacccagaggcggcggctctcgccccccagctcgtccgccgcctcctcttatagcttctctgacttgaattcgactagaggggatgcagatatgtatgatcttcccaagaaagaggacgctttactctaccagagcaagggctacaatgacgactactatgaagagagctacttcaccaccaggacttatggggagcccgagtctgccggcccgtccagggctgtccgccagtcagtgacttcattcccagatgctgacgctttccatcaccaggtgcatgatgacgatcttttgtcttcttctgaagaggagtgcaaggatagggaacgccccatgtacggccgggacagtgcctaccagagcatcacgcactaccgccctgtttcagcctccaggagctccctggacctgtcctattatcctacttcctcctccacctcttttatgtcctcctcatcatcttcctcttcatggctcacccgccgtgccatccggcctgaaaaccgtgctcctggggctgggctgggccaggatcgccaggtcccgctctggggccagctgctgcttttcctggtctttgtgatcgtcctcttcttcatttaccacttcatgcaggctgaagaaggcaaccccttctagagggagccatgagggtctgggcttcagagctaggtctttggggaagtcctggctgactgccttagcagtgggggtgggggtgggggcaggggcaggggctttatgtgtttttgcttggggggcgctgggcctagcccagagtagtgcttgctccccctgccttgtcccaccagggaggcagcagactcaggccctccatggtcctctttgtcattttgttgacatgcattcctccttttgtcatcttgttggggggaggggattaaccaaaggccaccctgactttgtttttgtggacacacaataaaagccccgtttatttgtaa

SEQ ID NO: 1845 - protein, 625 aa, Artificial Sequence
  derived and/or modified sequence
MDRGTLPLAVALLLASCSLSPTSLAETVHCDLQPVGPERGEVTYTTSQVSKGCVAQAPNAILEVHVLFLEFPTGPSQLELTLQASKQNGTWPREVLLVLSVNSSVFLHLQALGIPLHLAYNSSLVTFQEPPGVNTTELPSFPKTQILEWAAERGPITSAAELNDPQSILLRLGQAQGSLSFCMLEASQDMGRTLEWRPRTPALVRGCHLEGVAGHKEAHILRVLPGHSAGPRTVTVKVELSCAPGDLDAVLILQGPPYVSWLIDANHNMQIWTTGEYSFKIFPEKNIRGFKLPDTPQGLLGEARMLNASIVASFVELPLASIVSLHASSCGGRLQTSPAPIQTTPPKDTCSPELLMSLIQTKCADDAMTLVLKKELVAHLKCTITGLTFWDPSCEAEDRGDKFVLRSAYSSCGMQVSASMISNEAVVNILSSSSPQRKKVHCLNMDSLSFQLGLYLSPHFLQASNTIEPGQQSFVQVRVSPSVSEFLLQLDSCHLDLGPEGGTVELIQGRAAKGNCVSLLSPSPEGDPRFSFLLHFYTVPIPKTGTLSCTVALRPKTGSQDQEVHRTVFMRLNIISPDLSGCTSKGLVLPAVLGITFGAFLIGALLTAALWYIYSHTREYPRPPQ

SEQ ID NO: 1846 - DNA, 1878 bp, Artificial Sequence
  derived and/or modified sequence
atggacagaggcaccctgcccctggccgtggccctgctgctggccagctgcagcctgagccccaccagcctggccgagaccgtgcactgcgacctgcagcccgtgggccccgagagaggcgaggtgacctacaccaccagccaggtgagcaagggctgcgtggcccaggcccccaacgccatcctggaggtgcacgtgctgttcctggagttccccaccggccccagccagctggagctgaccctgcaggccagcaagcagaacggcacctggcccagagaggtgctgctggtgctgagcgtgaacagcagcgtgttcctgcacctgcaggccctgggcatccccctgcacctggcctacaacagcagcctggtgaccttccaggagccccccggcgtgaacaccaccgagctgcccagcttccccaagacccagatcctggagtgggccgccgagagaggccccatcaccagcgccgccgagctgaacgacccccagagcatcctgctgagactgggccaggcccagggcagcctgagcttctgcatgctggaggccagccaggacatgggcagaaccctggagtggagacccagaacccccgccctggtgagaggctgccacctggagggcgtggccggccacaaggaggcccacatcctgagagtgctgcccggccacagcgccggccccagaaccgtgaccgtgaaggtggagctgagctgcgcccccggcgacctggacgccgtgctgatcctgcagggccccccctacgtgagctggctgatcgacgccaaccacaacatgcagatctggaccaccggcgagtacagcttcaagatcttccccgagaagaacatcagaggcttcaagctgcccgacaccccccagggcctgctgggcgaggccagaatgctgaacgccagcatcgtggccagcttcgtggagctgcccctggccagcatcgtgagcctgcacgccagcagctgcggcggcagactgcagaccagccccgcccccatccagaccaccccccccaaggacacctgcagccccgagctgctgatgagcctgatccagaccaagtgcgccgacgacgccatgaccctggtgctgaagaaggagctggtggcccacctgaagtgcaccatcaccggcctgaccttctgggaccccagctgcgaggccgaggacagaggcgacaagttcgtgctgagaagcgcctacagcagctgcggcatgcaggtgagcgccagcatgatcagcaacgaggccgtggtgaacatcctgagcagcagcagcccccagagaaagaaggtgcactgcctgaacatggacagcctgagcttccagctgggcctgtacctgagcccccacttcctgcaggccagcaacaccatcgagcccggccagcagagcttcgtgcaggtgagagtgagccccagcgtgagcgagttcctgctgcagctggacagctgccacctggacctgggccccgagggcggcaccgtggagctgatccagggcagagccgccaagggcaactgcgtgagcctgctgagccccagccccgagggcgaccccagattcagcttcctgctgcacttctacaccgtgcccatccccaagaccggcaccctgagctgcaccgtggccctgagacccaagaccggcagccaggaccaggaggtgcacagaaccgtgttcatgagactgaacatcatcagccccgacctgagcggctgcaccagcaagggcctggtgctgcccgccgtgctgggcatcaccttcggcgccttcctgatcggcgccctgctgaccgccgccctgtggtacatctacagccacaccagagagtaccccagacccccccagtag

SEQ ID NO: 1847 - DNA, 3059 bp, Artificial Sequence
  derived and/or modified sequence
cctggggccaggactgctgctgtcactgccatccattggagcccagcaccccctccccgcccatccttcggacagcaactccagcccagccccgcgtccctgtgtccacttctcctgacccctcggccgccaccccagaaggctggagcagggacgccgtcgctccggccgcctgctcccctcgggtccccgtgcgagcccacgccggccccggtgcccgcccgcagccctgccactggacacaggataaggcccagcgcacaggcccccacgtggacagcatggaccgcggcacgctccctctggctgttgccctgctgctggccagctgcagcctcagccccacaagtcttgcagaaacagtccattgtgaccttcagcctgtgggccccgagaggggcgaggtgacatataccactagccaggtctcgaagggctgcgtggctcaggcccccaatgccatccttgaagtccatgtcctcttcctggagttcccaacgggcccgtcacagctggagctgactctccaggcatccaagcaaaatggcacctggccccgagaggtgcttctggtcctcagtgtaaacagcagtgtcttcctgcatctccaggccctgggaatcccactgcacttggcctacaattccagcctggtcaccttccaagagcccccgggggtcaacaccacagagctgccatccttccccaagacccagatccttgagtgggcagctgagaggggccccatcacctctgctgctgagctgaatgacccccagagcatcctcctccgactgggccaagcccaggggtcactgtccttctgcatgctggaagccagccaggacatgggccgcacgctcgagtggcggccgcgtactccagccttggtccggggctgccacttggaaggcgtggccggccacaaggaggcgcacatcctgagggtcctgccgggccactcggccgggccccggacggtgacggtgaaggtggaactgagctgcgcacccggggatctcgatgccgtcctcatcctgcagggtcccccctacgtgtcctggctcatcgacgccaaccacaacatgcagatctggaccactggagaatactccttcaagatctttccagagaaaaacattcgtggcttcaagctcccagacacacctcaaggcctcctgggggaggcccggatgctcaatgccagcattgtggcatccttcgtggagctaccgctggccagcattgtctcacttcatgcctccagctgcggtggtaggctgcagacctcacccgcaccgatccagaccactcctcccaaggacacttgtagcccggagctgctcatgtccttgatccagacaaagtgtgccgacgacgccatgaccctggtactaaagaaagagcttgttgcgcatttgaagtgcaccatcacgggcctgaccttctgggaccccagctgtgaggcagaggacaggggtgacaagtttgtcttgcgcagtgcttactccagctgtggcatgcaggtgtcagcaagtatgatcagcaatgaggcggtggtcaatatcctgtcgagctcatcaccacagcggaaaaaggtgcactgcctcaacatggacagcctctctttccagctgggcctctacctcagcccacacttcctccaggcctccaacaccatcgagccggggcagcagagctttgtgcaggtcagagtgtccccatccgtctccgagttcctgctccagttagacagctgccacctggacttggggcctgagggaggcaccgtggaactcatccagggccgggcggccaagggcaactgtgtgagcctgctgtccccaagccccgagggtgacccgcgcttcagcttcctcctccacttctacacagtacccatacccaaaaccggcaccctcagctgcacggtagccctgcgtcccaagaccgggtctcaagaccaggaagtccataggactgtcttcatgcgcttgaacatcatcagccctgacctgtctggttgcacaagcaaaggcctcgtcctgcccgccgtgctgggcatcacctttggtgccttcctcatcggggccctgctcactgctgcactctggtacatctactcgcacacgcgtgagtaccccaggcccccacagtgagcatgccgggcccctccatccacccgggggagcccagtgaagcctctgagggattgaggggccctggccaggaccctgacctccgcccctgcccccgctcccgctcccaggttcccccagcaagcgggagcccgtggtggcggtggctgccccggcctcctcggagagcagcagcaccaaccacagcatcgggagcacccagagcaccccctgctccaccagcagcatggcatagccccggccccccgcgctcgcccagcaggagagactgagcagccgccagctgggagcactggtgtgaactcaccctgggagccagtcctccactcgacccagaatggagcctgctctccgcgcctacccttcccgcctccctctcagaggcctgctgccagtgcagccactggcttggaacaccttggggtccctccaccccacagaaccttcaacccagtgggtctgggatatggctgcccaggagacagaccacttgccacgctgttgtaaaaacccaagtccctgtcatttgaacctggatccagcactggtgaactgagctgggcaggaagggagaacttgaaacagattcaggccagcccagccaggccaacagcacctccccgctgggaagagaagagggcccagcccagagccacctggatctatccctgcggcctccacacctgaacttgcctaactaactggcaggggagacaggagcctagcggagcccagcctgggagcccagagggtggcaagaacagtgggcgttgggagcctagctcctgccacatggagccccctctgccggtcgggcagccagcagagggggagtagccaagctgcttgtcctgggcctgcccctgtgtattcaccaccaataaatcagaccatgaaacc

SEQ ID NO: 1848 - DNA, 1878 bp, Artificial Sequence
  derived and/or modified sequence
atggacaggggaacactccctctcgctgtggccctcctgctggccagctgcagcctgtctcccacatcccttgctgagaccgttcattgcgatctgcagccagttggtccagagcggggtgaagtcacctatactacatcacaagtttcaaaaggctgcgtcgcccaggcgcccaatgcgattttggaagtgcacgtcctgttccttgaatttcctaccggaccttctcaacttgaactgaccctccaggcctctaagcagaacggaacgtggccccgggaggtgctgctggtgctgtccgttaactcatcagtgttcctgcacctgcaggccctcggcatacccctgcatctggcatacaattcgagcttggtgactttccaggaacccccgggcgtgaatacaactgaactgccatcgtttccgaagactcagattctggaatgggctgccgaacgcggacctataacctccgctgcagagctgaacgaccctcagtctatcctcttgagactgggtcaggcccaggggagcctctccttttgcatgctggaagcctcgcaggacatgggccgaaccttagagtggaggccacggacgccagcccttgtgagaggttgtcacttagagggagtggcgggccacaaggaagctcacattctgagggttttacccggacacagcgccgggccgaggaccgtcacggtcaaagtcgagctgtcttgcgcacctggggacctcgacgctgtgctcatactgcaggggcctccctacgtctcctggttgatagacgccaaccataacatgcagatctggacgaccggcgagtacagtttcaaaattttccccgagaagaatattaggggcttcaagctgcctgacaccccccagggactcctgggcgaagcccgcatgctgaacgcaagtattgtggctagctttgtagaattgcctctcgcttccattgtctcactgcatgcttcctcgtgcggtggccggctgcagacgtcccccgcgcctatccaaacaactccccccaaagacacttgttcccccgaactactgatgtccctgatacagacaaagtgtgccgatgatgctatgaccctggttcttaaaaaagaactggtagcccatctgaaatgtactatcaccggactgaccttctgggacccatcttgtgaggccgaggaccggggagacaagtttgtgctcagatcggcttacagcagttgtggaatgcaggtgtccgcatccatgattagtaacgaggcagtggtgaatatattgtcctccagttcaccccagcggaagaaggtgcattgtctcaacatggactcattgagcttccaactggggctgtatctgtccccacacttcttacaggcctccaataccatcgagccaggccagcagtcattcgtgcaggtgcgtgtgagtccttcggtatcggaatttctgctgcaattggattcgtgccacttggaccttgggccagagggaggaaccgtggaactgattcaggggcgggccgcgaaagggaactgtgtgagtcttctcagtccgtcacccgagggcgacccccgctttagtttcttactgcatttttacactgtgccaatcccgaaaacagggactctgtcttgtaccgttgccttacggccaaaaaccggttcacaggaccaggaggtgcatcgcacagtcttcatgcgactgaatataattagtcctgatctctctggctgcactagcaagggtctggtgctccctgctgtcttaggtatcactttcggcgccttcctcatcggtgccctgctgacagccgctctttggtatatatactcccataccagggagtaccctcgccctccacaatag

SEQ ID NO: 1849 - DNA, 1878 bp, Artificial Sequence
  derived and/or modified sequence
atggaccggggcaccctgcccctggccgtggccctgctgctggccagctgcagcctgagccccaccagcctggccgagaccgtgcactgtgacctgcagcctgtgggccctgagcggggggaggtgacctacaccaccagccaggtgtccaagggctgtgtggcccaggccccaaatgccatcctggaggtgcacgtgctcttcctggagttccccaccggccccagccagctggagctgaccctgcaggccagcaagcagaatggcacctggccccgggaggtgctgctggtgctgtctgtgaacagcagcgtcttcctgcacctgcaggccctgggcatccccctgcacctggcctacaacagcagcctggtgaccttccaggagcccccaggagtgaacaccacagagctgcccagcttccccaagacccagatcctggagtgggccgctgagcggggccccatcaccagcgctgctgagctgaatgacccccagagcatcctgctgcggctgggccaggcccagggcagcctgtccttctgcatgctggaggccagccaggacatgggccgcaccctggagtggaggcccaggaccccagccctggtgcggggctgccacctggagggcgtggccggccacaaggaggcccacatcctgcgggtgctgcccggccacagcgctggccccaggacagtgacagtgaaggtggagctgagctgtgcccctggggacctggatgctgtgctgatcctgcagggccccccctacgtgtcctggctgattgatgccaaccacaacatgcagatctggaccaccggggagtacagcttcaagatcttccctgagaagaacatccggggcttcaagctgcctgacaccccccagggcctgctgggggaggccaggatgctgaatgccagcatcgtggccagctttgtggagctgcccctggccagcatcgtgtccctgcacgccagcagctgtggcggccgcctgcagaccagccctgcccccatccagaccaccccacccaaggacacctgcagccctgagctgctgatgagcctcatccagaccaagtgtgctgatgatgccatgaccctggtgctgaagaaggagctggtggcccacctgaagtgcaccatcaccggcctgaccttctgggaccccagctgtgaggctgaagatagaggagacaagtttgtgctgcggagcgcctacagcagctgtggcatgcaggtgtctgcctccatgatcagcaatgaagctgtggtgaacatcctgagcagcagcagcccccagaggaagaaggtgcactgcctgaacatggacagcctgtccttccagctgggcctgtacctgagcccccacttcctgcaggccagcaacaccatcgagcccggccagcagagctttgtgcaggtgcgggtgagccccagcgtgtctgagttcctgctgcagctggacagctgccacctggacctgggccctgagggcggcaccgtggagctgatccagggccgggccgccaagggcaactgtgtgtccctgctgagccccagccctgagggggacccccgcttctccttcctgctgcacttctacacagtgcccatccccaagacaggcaccctgagctgcaccgtggccctgcggcccaagacaggcagccaggaccaggaggtgcacaggacagtgttcatgaggctgaacatcatcagcccagacctgagcggctgcaccagcaagggcctggtgctgcctgctgtgctgggcatcacctttggagccttcctgattggagccctgctgacagctgccctgtggtacatctacagccacacccgggagtaccccaggcctccccagtag

SEQ ID NO: 1850 - DNA, 1878 bp, Artificial Sequence
  derived and/or modified sequence
atggaccggggcaccctgcccctggccgtggccctgctgctggccagttgttcactgtcccccactagcctggctgagaccgtccattgtgacttgcagcctgtgggcccggaacgtggcgaagttacatacacgactagccaggtatctaaagggtgtgtggctcaggctcccaacgctatactggaagtacatgtcctgtttctggagtttccaactggcccaagtcagctggaattgaccctacaggcaagcaagcaaaatggcacatggcccagggaagttctactggtattgtctgtaaacagctctgtgttcctgcatttgcaggccctcggaatccctctgcacctggcttataatagttccctggtgacttttcaggagccaccaggagtcaatacaacagaactacccagcttccccaaaacacagatacttgagtgggccgctgaaaggggcccaataacatctgctgcagagctgaacgatccacagtctatcctgcttagactgggtcaagcccagggctcactgtccttttgtatgctcgaggcctctcaagacatggggagaacattagagtggcgacctcgcactcccgccctggtccggggctgccacctggaaggtgtggccgggcataaggaagcgcacatactaagggttctgccaggacatagtgccgggccccggacagtcactgtgaaagtggagctgtcttgcgccccaggagatttagacgcagtcctgatcctgcagggccccccatacgtgagctggctgatagatgctaaccacaacatgcagatctggactacgggagagtattcttttaagatatttcccgaaaagaacataagaggatttaagctgcctgacacccctcaagggctgctaggagaggctcgcatgctcaacgcaagtattgtggccagcttcgtggagctgcccttggcaagcatcgtgtctctccacgcttcttcctgtggaggcagactgcagacttcccccgctcctatccagaccactccgcccaaggacacgtgttctcctgaactcctcatgtcacttatccagacaaagtgcgccgacgacgccatgacactcgtacttaaaaaagagctagttgcacatttgaaatgtactatcacgggcttgactttttgggacccgagctgcgaagcagaagacaggggggataagttcgttctgcggtcagcttacagtagctgcggtatgcaggtttctgcctccatgatttccaatgaagctgtcgtgaatatcctgagctcatcttcaccccagcgaaagaaagtgcactgtcttaatatggacagtctgagcttccagctgggattgtacctgagtccccactttctgcaagccagtaacacgatcgagcctggccagcagtcttttgtgcaggtgcgcgtgtccccatctgtctccgagttcttgttgcagctggactcttgccatttggatctgggcccagaaggcggaaccgtggagctgattcaaggcagagccgcgaaggggaactgtgtgagtctgctctcaccctcccccgagggcgacccaaggttctcttttctcctgcatttctatacagttcctatccccaagaccggcacactgtcttgtacagtggcgcttcgccccaaaactggctctcaggaccaagaggtgcatcgcacagtgttcatgcgtttaaatatcatctccccagacctgtctggctgcacctccaagggcctcgtgctgcctgcggtactcggcatcactttcggtgccttcttgatcggtgctctgcttacagccgctctctggtatatttatagccatacccgcgagtacccgcgcccgccacagtag

SEQ ID NO: 1851 - DNA, 1878 bp, Artificial Sequence
  derived and/or modified sequence
atggatagaggcactctccccctggccgtcgctttgctcttagcctcgtgttcgctcagcccaacttccctcgccgaaactgtccactgcgacttgcagccggtgggccctgagagaggcgaggttacatacaccacctcccaggtctctaaaggatgcgtcgcgcaggcccctaacgctatccttgaagtgcatgtgttgttcttagaattccccaccggaccttcccaattagaactaactctccaagcatctaaacagaacgggacatggccaagggaagttctactggtgttgtcggtgaactcctctgtgtttttgcacctgcaggcgctgggcataccattgcatttggcctacaactcgtccctggttacttttcaagagcctcccggagtcaacactacagagttgccgtcatttccaaagacacagatcttagagtgggctgcggagcgcggaccaattacatctgctgccgagctaaatgatccccagtcaattctgctcaggctcgggcaagcacagggatcactctccttctgtatgcttgaggcttctcaagatatgggtcggaccttggagtggcggcctaggacccctgcgctggtgcgtgggtgtcatcttgagggcgtggctggccataaggaagcgcatatccttcgcgtgcttccgggacatagtgctgggccacggaccgtaaccgtgaaggtggaattgagctgcgccccaggagatctggatgccgtcttgattctccaaggcccaccgtatgtgtcatggctgatcgatgctaaccacaatatgcagatctggacaactggcgagtacagtttcaagatctttcccgagaagaatatccgaggttttaagctcccagatactcctcagggcctcctaggtgaagcgagaatgctgaacgcatctatagtggcctccttcgttgagctccccttggcctcaattgtttccttacacgccagtagctgcgggggacgactccaaacaagtcccgcaccgatccagacaacacccccaaaggatacctgtagccctgaacttttgatgtctctgatccagaccaagtgcgccgatgatgcaatgactcttgttctgaaaaaggagctcgtggcacacctcaagtgtactatcactgggttgacattttgggatcctagctgcgaggctgaggatcgcggagacaaattcgtgctgcgttctgcctatagctcctgcgggatgcaggtttctgcatccatgattagcaacgaagcagtagtcaatattctatcaagcagctctcctcagagaaaaaaggtgcattgtctgaacatggattcccttagcttccagctgggtctttacctgtcaccccatttcctgcaagcgagcaacaccatcgaacctggacagcagtcctttgttcaggtgcgtgtcagccctagtgttagcgagttcttgctacagctggattcctgccacctcgatttagggcctgagggcggaaccgtggagctgatccaagggagggctgccaagggaaactgcgtgagcctactgagtccctccccggaaggagatcccagattctcttttctactgcacttctacaccgttcccatcccaaaaaccggcaccctcagctgtactgtcgctcttcgtccaaaaactggaagtcaagaccaggaggttcaccggactgtcttcatgcgtctcaacattatttctccggatttgagtggctgtaccagcaaagggctcgtgctgcctgcggtgctcggcattacttttggtgccttcctgatcggagcactccttaccgcggctctgtggtacatctacagtcatactagggaatatccccgtcccccacagtag

SEQ ID NO: 1852 - protein, 455 aa, Artificial Sequence
  derived and/or modified sequence
MWLEILLTSVLGFAIYWFISRDKEETLPLEDGWWGPGTRSAAREDDSIRPFKVETSDEEIHDLHQRIDKFRFTPPLEDSCFHYGFNSNYLKKVISYWRNEFDWKKQVEILNRYPHFKTKIEGLDIHFIHVKPPQLPAGHTPKPLLMVHGWPGSFYEFYKIIPLLTDPKNHGLSDEHVFEVICPSIPGYGFSEASSKKGFNSVATARIFYKLMLRLGFQEFYIQGGDWGSLICTNMAQLVPSHVKGLHLNMALVLSNFSTLTLLLGQRFGRFLGLTERDVELLYPVKEKVFYSLMRESGYMHIQCTKPDTVGSALNDSPVGLAAYILEKFSTWTNTEFRYLEDGGLERKFSLDDLLTNVMLYWTTGTIISSQRFYKENLGQGWMTQKHERMKVYVPTGFSAFPFELLHTPEKWVRFKYPKLISYSYMVRGGHFAAFEEPELLAQDIRKFLSVLERQ

SEQ ID NO: 1853 - protein, 161 aa, Artificial Sequence
  derived and/or modified sequence
MWLEILLTSVLGFAIYWFISRDKEETLPLEDGWWGPGTRSAAREDDSIRPFKVETSDEEIHDLHQRIDKFRFTPPLEDSCFHYGFNSNYLKKVISYWRNEFDWKKQVEILNRYPHFKTKIEGLDIHFIHVKPPQLPAGHTPKPLLMVHGWPGSFYEFYKII

SEQ ID NO: 1854 - protein, 136 aa, Artificial Sequence
  derived and/or modified sequence
MWLEILLTSVLGFAIYWFISRDKEETLPLEDGWWGPGTRSAAREDDSIRPFKVETSDEEIHDLHQRIDKFRFTPPLEDSCFHYGFNSNYLKKVISYWRNEFDWKKQVEILNRYPHFKTKIEGLDIHFIHVKPPQLP

SEQ ID NO: 1855 - DNA, 1368 bp, Artificial Sequence
  derived and/or modified sequence
atgtggctggagatactgctgaccagcgtgctgggctttgctatctattggttcatttctcgggataaagaagagaccctgcctttggaagacgggtggtggggtcccggcacccgctcagcagcccgggaggacgattctatcaggcccttcaaggttgaaacgagcgatgaagaaattcatgacctgcatcagaggatcgacaagttcaggttcacccctccactcgaagatagctgcttccactacggtttcaattcaaattacttgaaaaaggtgatctcatattggcggaatgagttcgattggaagaaacaggtagagattctcaacaggtacccacattttaaaactaaaatcgaaggcttggatattcattttatccacgtgaaacctccgcagctcccagctggacatacgcccaaaccactgctgatggtacacggatggcctggcagcttctatgagttttacaagattatacccctactgaccgacccgaagaaccacggcctgtccgatgagcacgtgttcgaggtgatttgtccttcaataccaggatatggcttttccgaagcaagttctaagaagggctttaacagcgttgctaccgcgagaatattttacaagctgatgcttcgcctgggctttcaggagttttacattcagggcggcgattgggggtctctaatatgcaccaatatggcacagttggtgccctctcacgtaaagggactgcatctcaacatggccctggttttgagcaatttctccacactcaccttattgttagggcagagatttggcagattcctgggtctgacagagcgcgatgtagagcttctgtatcctgtgaaggaaaaggtcttctatagcctgatgagggaaagcggctatatgcatattcaatgcactaagccagatacagtgggaagtgccctgaatgactcccctgttgggctggccgcttacattttagaaaagttttctacctggaccaatacagaattcagatacctggaggatgggggcttagaaaggaagttcagcctggacgatcttctgacaaacgtgatgctgtactggactaccgggactattatatcttcccagcgcttctacaaggagaacctgggacaggggtggatgacacaaaaacacgaaaggatgaaggtgtacgtcccgaccggattttcagcctttccgtttgagctgttgcacacccccgaaaaatgggtgcgtttcaaatatcctaagctgattagttattcgtatatggtcagaggcggccacttcgccgcctttgaagagccggagctgctggcacaggatatccgcaagttcttgtcagtgctggaacgtcagtag

SEQ ID NO: 1856 - DNA, 1368 bp, Artificial Sequence
  derived and/or modified sequence
atgtggcttgagatcctgctcactagcgttcttggcttcgccatctactggttcatcagccgggataaagaggagactctcccactggaagacggctggtggggcccaggcacacggagcgccgctagggaagatgacagtatccgcccattcaaggttgaaacaagcgacgaagaaatccacgatctacatcaacgcattgacaaattccgttttacacccccgttggaggatagttgtttccactacggattcaacagcaattacttgaagaaagtaataagctattggagaaacgagttcgattggaaaaaacaggtagagatcctaaaccggtaccctcatttcaagaccaaaattgagggcttggacattcacttcatccacgtcaaaccaccacaactgccagcaggccatactcccaagcccctgctaatggtgcatggctggccggggagtttctacgaattctataaaattattccactgctaacagatcccaagaaccacggcttgtccgacgaacatgtttttgaggtgatttgcccctctatccccggctatggattcagtgaagccagtagcaaaaaaggtttcaatagcgttgctactgccaggattttctataaactcatgctacgcctgggtttccaggagttctacattcagggcggtgattggggaagtcttatctgcacaaatatggcccagctcgttccttctcatgttaaaggcttgcacctgaatatggctctggttttatctaacttctccacccttaccctgctgttaggacagagatttgggagattcctggggctcactgagcgagacgtggagctgctgtatccagtcaaggaaaaagttttctacagcctgatgcgcgaatccggctacatgcacattcagtgcacaaaaccagacaccgtgggatctgctctcaacgatagtcctgtgggtctggccgcatatatactcgagaagttttcaacctggactaacacagagttcagatacctcgaagacggcgggcttgaacgaaagttctcactggacgacctcctcaccaatgtgatgctctactggacaacaggcaccattatctctagccagcgcttctacaaggagaacctgggtcaagggtggatgacccagaagcacgagcggatgaaagtgtatgtgcccacaggcttcagtgctttcccttttgagcttcttcatacaccagagaagtgggttcgatttaagtatccaaagctcatttcctatagctatatggtacgtggcggccatttcgccgcgttcgaagagccggagctgttggctcaggacataagaaaattcttaagcgtgctagaacggcagtag

SEQ ID NO: 1857 - DNA, 486 bp, Artificial Sequence
  derived and/or modified sequence
atgtggttggaaattcttcttaccagcgtcctcggcttcgccatttactggttcattagtcgggataaggaggagacactgcccctggaagacggatggtggggcccaggcactcgatctgccgctcgggaagatgactcaatccgcccatttaaggttgaaacgagcgacgaggagatccacgacctgcaccagagaatcgacaaattcaggtttacccctcctttggaggactcctgcttccactatggcttcaactcaaattatctgaagaaagtcattagctactggagaaatgagttcgactggaagaagcaggtggagatcctgaatcggtaccctcacttcaagaccaagatagaaggactagatatccactttatacatgtgaaaccgccccagttgccggccggccacaccccaaaaccactgttgatggtccacggctggccaggaagtttttacgagttttacaagatcatctag

SEQ ID NO: 1858 - DNA, 411 bp, Artificial Sequence
  derived and/or modified sequence
atgtggttagaaatccttctcacgtctgtcttggggttcgcgatatattggttcatctcccgcgacaaagaagaaaccctgccacttgaagacggatggtgggggccaggcacacgttctgctgcacgggaggatgactctattcggccgttcaaagtggagacttctgacgaagaaatccacgatctgcatcagcgcattgataagttcaggttcaccccccccctcgaggactcatgcttccattatggatttaactccaactatttgaagaaggtgatctcatactggagaaatgagttcgactggaagaagcaggtggagatacttaataggtatcctcacttcaagaccaagatcgagggtctagacatccatttcatccacgtgaaacctcctcagctaccttag

SEQ ID NO: 1859 - DNA, 1368 bp, Artificial Sequence
  derived and/or modified sequence
atgtggctggagatcctgctgacctctgtgctgggctttgccatctactggttcatcagccgggacaaggaggagaccctgcccctggaggatggctggtggggccctggcaccaggtctgctgcccgggaggatgacagcatccggcccttcaaggtggagaccagtgatgaggagatccatgacctgcaccagagaattgacaagttccgcttcaccccacccctggaggacagctgcttccactacggcttcaacagcaactacctgaagaaggtgatctcctactggagaaatgaatttgactggaagaagcaggtggagatcctgaaccgctacccccacttcaagaccaagattgagggcctggacatccacttcatccacgtgaagccaccccagctgcctgctggccacacccccaagcccctgctgatggtgcacggctggccaggcagcttctatgagttctacaagatcatccccctgctgacagaccccaagaaccacggcctgagtgatgagcacgtgtttgaggtgatctgccccagcatccctggctacggcttcagcgaggccagcagcaagaagggcttcaacagcgtggccacagcccgcatcttctacaagctgatgctgcggctgggcttccaggagttctacatccagggcggggactggggcagcctcatctgcaccaacatggcccagctggtgcccagccacgtgaagggcctgcacctgaacatggccctggtgctgagcaacttcagcaccctgaccctgctgctgggccagcgcttcggccgcttcctgggcctgacagaaagagatgtggagctgctgtaccctgtgaaggagaaggtgttctacagcctgatgagggagagcggctacatgcacatccagtgcaccaagccagacacagtgggcagcgccctgaatgacagccctgtgggcctggccgcctacatcctggagaagttcagcacctggaccaacacagagttccgctacctggaggatggcggcctggagaggaagttcagcctggatgacctgctgaccaacgtgatgctgtactggaccaccggcaccatcatcagcagccagcgcttctacaaggagaacctgggccagggctggatgacccagaagcatgagaggatgaaggtgtatgtgcccaccggcttcagcgccttcccctttgagctgctgcacaccccagagaagtgggtgcgcttcaagtaccccaagctgatctcctacagctacatggtgcggggcggccactttgctgcctttgaggagcctgagctgctggcccaggacatcaggaagttcctgtctgtgctggagcggcagtag

SEQ ID NO: 1860 - DNA, 486 bp, Artificial Sequence
  derived and/or modified sequence
atgtggctggagatcctgctgacctctgtgctgggctttgccatctactggttcatcagccgggacaaggaggagaccctgcccctggaggatggctggtggggccctggcaccaggtctgctgcccgggaggatgacagcatccggcccttcaaggtggagaccagtgatgaggagatccatgacctgcaccagagaattgacaagttccgcttcaccccacccctggaggacagctgcttccactacggcttcaacagcaactacctgaagaaggtgatctcctactggagaaatgaatttgactggaagaagcaggtggagatcctgaaccgctacccccacttcaagaccaagattgagggcctggacatccacttcatccacgtgaagccaccccagctgcctgctggccacacccccaagcccctgctgatggtgcacggctggccaggcagcttctatgagttctacaagatcatctag

SEQ ID NO: 1861 - DNA, 411 bp, Artificial Sequence
  derived and/or modified sequence
atgtggctggagatcctgctgacctctgtgctgggctttgccatctactggttcatcagccgggacaaggaggagaccctgcccctggaggatggctggtggggccctggcaccaggtctgctgcccgggaggatgacagcatccggcccttcaaggtggagaccagtgatgaggagatccatgacctgcaccagagaattgacaagttccgcttcaccccacccctggaggacagctgcttccactacggcttcaacagcaactacctgaagaaggtgatctcctactggagaaatgaatttgactggaagaagcaggtggagatcctgaaccgctacccccacttcaagaccaagattgagggcctggacatccacttcatccacgtgaagccaccccagctgccctag

SEQ ID NO: 1862 - DNA, 1368 bp, Artificial Sequence
  derived and/or modified sequence
atgtggctggagatcctgctgaccagcgtgctgggcttcgccatctactggttcatcagtcgggacaaggaggaaactttaccgctggaagatggctggtggggacctggcacaagatctgccgctcgcgaggacgactctatcagaccgttcaaagttgaaacctctgatgaggagatccacgatttacaccagcgcatcgacaagttccggtttaccccccccctcgaggactcttgcttccactacggctttaattccaactatcttaaaaaagtaatcagctattggaggaatgagttcgactggaaaaagcaagtcgagattctgaacagatatccccactttaagactaaaatcgagggactggatatacacttcatccatgtcaagccccctcaattacctgccgggcacacaccaaaacccctactgatggtgcacgggtggccaggatccttttatgaattctacaagattatccccctcctgactgacccgaaaaatcacggcctgagtgacgaacatgtgttcgaggtcatatgtccctccattcccggttacggattttctgaagcctcatctaagaagggcttcaattccgttgccactgctaggattttctacaagctgatgttgaggctagggtttcaagagttctacatacaggggggagattgggggtcactgatctgcactaatatggcccaattggtgccctcgcacgtgaagggtctgcacctaaacatggctctggtgctatcaaacttttctactctcaccctgctcttaggccaacggtttggccgtttcctcgggctgacggaacgcgacgtcgagctcttgtatcccgtcaaggagaaagtgttctattcacttatgagagaatccgggtatatgcatattcagtgtactaaacctgacacagttggctccgcgctgaacgactcacccgtggggctagcagcctatatcctggagaaatttagcacctggactaatacagaatttcgatacttggaggacgggggattggaacgaaagttttccctggatgatcttcttacaaatgtcatgctctactggaccacaggtaccatcattagctcgcaacgattctataaggagaacttgggacaggggtggatgacacagaagcacgaacgcatgaaagtctacgtgcctaccggatttagcgcctttcctttcgaactactgcacacgccggaaaagtgggttcgatttaagtaccctaagctgatctcatattcttacatggtgcgtggcggacattttgccgcctttgaggaacctgaactgctggcccaagatattagaaagtttctgagcgtgctggaacgacagtag

SEQ ID NO: 1863 - DNA, 1368 bp, Artificial Sequence
  derived and/or modified sequence
atgtggctggagatcctgctgaccagcgtgctgggcttcgccatctactggttcatctccagagacaaagaagagactcttcccctggaagatggttggtggggcccaggcacaaggtccgccgcacgcgaggacgactccatcaggccattcaaagtggagacgtcagatgaagaaatccatgacctacatcagcgaatagataagtttcggttcacgcccccactggaagactcatgttttcattacgggtttaactcaaattatttgaagaaggtcattagttattggcgaaacgaatttgattggaagaagcaggtggaaatcctgaaccggtatcctcatttcaagactaaaatagaagggctggatatacactttattcacgtcaaaccacctcagctgccagcagggcacacccctaagcctctgctaatggtgcatggatggccagggtcgttctacgaattctacaagatcatccccctgttgacagatcccaagaatcacggcttatccgacgaacacgtgtttgaggtaatctgcccaagcatccccggttacggcttctccgaggcaagcagcaagaaagggtttaactctgtggctaccgctcggatattctataagctgatgctccggttaggatttcaggagttctatatccaggggggcgattggggtagcctaatttgtacaaatatggcacagctggttccttctcatgtgaaggggcttcacctcaatatggctctggttctgtccaacttcagcacattgacgcttcttctaggacagaggtttggcagattccttggcttgacagaacgtgatgtggagctactttacccagtcaaggagaaagtgttttacagcttgatgagggaatccggatatatgcatatccaatgcactaagccggacacggtgggctcagcgctgaatgattctcccgttgggctcgccgcctacatcctcgagaaattcagtacctggacaaacacagagtttcgctatttggaggacgggggactggaacggaagtttagtctggacgacctgttgactaacgtgatgctttattggaccactggaactattatctcctcccagcgcttctacaaggagaacctgggtcagggctggatgacccagaagcacgagagaatgaaggtgtatgtgcctacagggttttccgcgtttccctttgagctccttcatacacctgagaaatgggtaagattcaagtatccaaagctaatcagttactcctatatggttcggggcggccattttgccgcttttgaggaaccggagctcctggcacaggacatacggaaatttctgtccgtgcttgagcgtcagtag

SEQ ID NO: 1864 - DNA, 486 bp, Artificial Sequence
  derived and/or modified sequence
atgtggctggagatcctgctgaccagcgtgctgggcttcgccatctactggtttatcagcagggataaggaagagactttacctctagaggacggatggtggggcccaggaacacggtcagcggcacgtgaggatgactcaattaggccatttaaagtggaaacttccgacgaggaaatacatgatctgcatcagcggattgataagtttaggttcactcctccccttgaggacagctgctttcactacggttttaacagcaactaccttaagaaggtaatcagttactggagaaacgagttcgattggaaaaagcaggtcgaaatcttaaatcggtatccacatttcaagacaaagattgaagggctcgatatccatttcatccacgtaaagccaccgcaattacccgcggggcacacccctaaaccacttcttatggtacacggctggcccggcagcttctatgaattttacaagataatatag

SEQ ID NO: 1865 - DNA, 411 bp, Artificial Sequence
  derived and/or modified sequence
atgtggctggagatcctgctgaccagcgtgctgggcttcgccatctattggtttatttcccgagataaagaggaaacattgcctctggaggacggctggtggggccctggtactcggtccgcggcgagggaggatgatagtattaggccatttaaggtggaaacatccgatgaagaaattcatgatttgcaccaacgaattgacaagtttagatttaccccacccctcgaagattcttgctttcattatggtttcaattccaactacctgaagaaagtcatctcttattggcgaaacgaattcgactggaagaaacaggtggagattctcaacagatacccccactttaagacgaagatcgagggtctcgatatccatttcattcatgtcaaacccccccaactgccgtag

SEQ ID NO: 1866 - DNA, 1368 bp, Artificial Sequence
  derived and/or modified sequence
atgtggctggagattctcctcacttcagtgctaggtttcgccatctattggtttatctctcgtgataaggaggagacactgcctctagaggacggctggtggggcccaggcacacgctccgctgccagagaagacgattccatccgcccttttaaggtggagacttctgacgaagagattcacgacctccaccaaagaatcgacaaattccgtttcacacctcccctagaggacagctgtttccattatggcttcaactcaaattatctcaagaaagtcattagctactggaggaacgagttcgattggaaaaagcaagttgaaatcctgaatagatatccacactttaagacaaaaatcgaagggctggatatacacttcattcatgtcaaaccaccacagttgccggcaggacatactcccaagcccctactaatggttcatgggtggccagggagtttttatgagttctataagatcatacctctcttaaccgaccctaagaatcacggactgtccgatgagcatgtgttcgaggttatatgcccctccattcccggatacggtttttcagaggcttctagcaagaaaggattcaactccgttgccaccgcaaggattttctacaagctcatgctgaggctaggattccaagagttttacattcagggaggagactgggggtcactgatctgcaccaacatggcccagctggtcccaagccatgtgaaagggctccacttaaacatggccctggtgctgtccaacttcagcaccttaactttgctcttggggcagcggtttgggcgattcctgggcctcaccgagcgagatgtggagctgctgtatcctgtcaaagagaaagttttctacagcctcatgcgcgagtctggctacatgcacatccagtgtaccaagccagatactgtgggatctgctttaaatgactcacccgtgggcctggctgcctatattttggagaaattctccacatggactaatactgagttccgctacttggaggacggaggattggagaggaaatttagcctagatgacctgctgacaaatgtgatgctctactggaccacaggaactatcatctcttcccagaggttttataaagagaacctcggtcagggatggatgacccagaagcacgagagaatgaaagtgtacgtgccaactggcttctccgccttcccctttgagctactgcacaccccagagaagtgggttcgattcaaatatccaaagcttatttcctactcctacatggtaagaggcggacattttgctgcatttgaggagccagagttgcttgcccaggacatccgtaagtttttaagcgttctggaaaggcagtag

SEQ ID NO: 1867 - DNA, 1368 bp, Artificial Sequence
  derived and/or modified sequence
atgtggctcgaaattttacttacctcggtcctgggctttgccatttattggtttatcagtcgtgacaaggaggaaacactgcccttagaggatgggtggtgggggcctggcacacgaagtgctgcccgagaagatgacagcattcgccctttcaaagtcgaaacttccgatgaagagatccatgaccttcatcagcgaattgacaagttccggttcacacctcctctggaggatagctgcttccattacggctttaacagtaattatttgaagaaggttataagctactggcgcaacgaattcgattggaaaaaacaggtcgaaatcctcaacaggtatccccatttcaagaccaaaatagaaggattagatatccactttattcatgtgaagccccctcaactacccgcagggcatacgcctaagccattgctgatggtccacggctggccagggagcttctacgagttctacaaaattataccactgcttacggacccaaaaaatcacggcctttcagacgaacacgtcttcgaagtgatttgcccgtcaatacccggatacggctttagcgaggcctcatccaagaagggctttaacagcgtcgccaccgcaagaattttttataaattaatgctgcgcctggggtttcaggagttttatatccagggcggtgattggggttccctgatctgcaccaacatggcacagctcgtcccctcacacgttaaaggcctgcatctcaacatggcactggtgctctcaaactttagcacactgactctcttgctcggtcagcggtttggacgattcctagggctgactgagagggacgttgagctgttgtatcctgtgaaggagaaggttttctattctctcatgagggaatccgggtatatgcacatccagtgcactaagcccgataccgtggggtctgctctgaatgactccccggtggggctagcagcgtacattctcgaaaaattttctacttggaccaacacagaatttaggtatttggaggacgggggacttgagcggaagttcagcttggacgaccttctaaccaatgtgatgctttactggacaacaggtactatcatatcctctcaacggttctacaaggagaatttaggccaggggtggatgacccagaaacatgagcgcatgaaagtgtacgtgccaacgggtttcagcgcattcccctttgagctgctgcacacccccgagaaatgggtcagatttaagtacccaaagttaatctcatacagttacatggtgagaggtggccactttgcggcatttgaagagcctgagctactcgctcaggacatcaggaagttcttgtccgtactggaacgacagtag

SEQ ID NO: 1868 - DNA, 486 bp, Artificial Sequence
  derived and/or modified sequence
atgtggctggagatcctgttgacctccgtcttaggcttcgctatttattggttcatctcacgggacaaggaagaaacacttcccctggaagatggttggtggggcccagggacccgctctgcagcgcgagaagacgactcaatcagaccttttaaggtggaaacatccgatgaagagatccatgatctgcatcagagaattgacaagttcagatttacacctcctcttgaggactcatgcttccactacggctttaatagtaattatcttaagaaggtgatcagctactggaggaacgaattcgattggaagaagcaggtcgagattctgaaccgttacccacatttcaaaacgaagatcgaggggctggacatacattttatccacgtaaagcctccccagctgcctgctggtcatacccccaaacccttactgatggtgcacggatggccaggaagcttttacgaattctataaaattatctag

SEQ ID NO: 1869 - DNA, 411 bp, Artificial Sequence
  derived and/or modified sequence
atgtggctcgagatcttactgacgagtgtgctcggcttcgctatctattggttcatttcccgggacaaggaggagacgctgccactcgaggatgggtggtggggtccagggaccagatccgcagctagggaggacgacagcattagaccttttaaggtcgagacaagcgacgaggagatccacgacctccatcagcggatagacaaatttagatttactccacccctggaggattcttgcttccattatgggtttaatagcaattatttgaagaaggtgatatcctattggagaaatgaattcgactggaaaaagcaggtcgagatcctcaataggtacccacactttaaaaccaagatagaagggctggacatccacttcattcacgtaaaacctccacagctgccgtag

SEQ ID NO: 1870 - DNA, 1368 bp, Artificial Sequence
  derived and/or modified sequence
atgtggctggagatcctgctgaccagcgtgctgggcttcgccatctactggttcatcagcagagacaaggaggagaccctgcccctggaggacggctggtggggccccggcaccagaagcgccgccagagaggacgacagcatcagacccttcaaggtggagaccagcgacgaggagatccacgacctgcaccagagaatcgacaagttcagattcaccccccccctggaggacagctgcttccactacggcttcaacagcaactacctgaagaaggtgatcagctactggagaaacgagttcgactggaagaagcaggtggagatcctgaacagatacccccacttcaagaccaagatcgagggcctggacatccacttcatccacgtgaagcccccccagctgcccgccggccacacccccaagcccctgctgatggtgcacggctggcccggcagcttctacgagttctacaagatcatccccctgctgaccgaccccaagaaccacggcctgagcgacgagcacgtgttcgaggtgatctgccccagcatccccggctacggcttcagcgaggccagcagcaagaagggcttcaacagcgtggccaccgccagaatcttctacaagctgatgctgagactgggcttccaggagttctacatccagggcggcgactggggcagcctgatctgcaccaacatggcccagctggtgcccagccacgtgaagggcctgcacctgaacatggccctggtgctgagcaacttcagcaccctgaccctgctgctgggccagagattcggcagattcctgggcctgaccgagagagacgtggagctgctgtaccccgtgaaggagaaggtgttctacagcctgatgagagagagcggctacatgcacatccagtgcaccaagcccgacaccgtgggcagcgccctgaacgacagccccgtgggcctggccgcctacatcctggagaagttcagcacctggaccaacaccgagttcagatacctggaggacggcggcctggagagaaagttcagcctggacgacctgctgaccaacgtgatgctgtactggaccaccggcaccatcatcagcagccagagattctacaaggagaacctgggccagggctggatgacccagaagcacgagagaatgaaggtgtacgtgcccaccggcttcagcgccttccccttcgagctgctgcacacccccgagaagtgggtgagattcaagtaccccaagctgatcagctacagctacatggtgagaggcggccacttcgccgccttcgaggagcccgagctgctggcccaggacatcagaaagttcctgagcgtgctggagagacagtag

SEQ ID NO: 1871 - DNA, 486 bp, Artificial Sequence
  derived and/or modified sequence
atgtggctggagatcctgctgaccagcgtgctgggcttcgccatctactggttcatcagcagagacaaggaggagaccctgcccctggaggacggctggtggggccccggcaccagaagcgccgccagagaggacgacagcatcagacccttcaaggtggagaccagcgacgaggagatccacgacctgcaccagagaatcgacaagttcagattcaccccccccctggaggacagctgcttccactacggcttcaacagcaactacctgaagaaggtgatcagctactggagaaacgagttcgactggaagaagcaggtggagatcctgaacagatacccccacttcaagaccaagatcgagggcctggacatccacttcatccacgtgaagcccccccagctgcccgccggccacacccccaagcccctgctgatggtgcacggctggcccggcagcttctacgagttctacaagatcatctag

SEQ ID NO: 1872 - DNA, 411 bp, Artificial Sequence
  derived and/or modified sequence
atgtggctggagatcctgctgaccagcgtgctgggcttcgccatctactggttcatcagcagagacaaggaggagaccctgcccctggaggacggctggtggggccccggcaccagaagcgccgccagagaggacgacagcatcagacccttcaaggtggagaccagcgacgaggagatccacgacctgcaccagagaatcgacaagttcagattcaccccccccctggaggacagctgcttccactacggcttcaacagcaactacctgaagaaggtgatcagctactggagaaacgagttcgactggaagaagcaggtggagatcctgaacagatacccccacttcaagaccaagatcgagggcctggacatccacttcatccacgtgaagcccccccagctgccctag

SEQ ID NO: 1873 - DNA, 1660 bp, Artificial Sequence
  derived and/or modified sequence
gaaaactagccgaggagagccagggagccggagagatcgcgcgcctgccgccgccggagcctgcgagccgagaccgagccatgtggctagaaatcctcctcacttcagtgctgggctttgccatctactggttcatctcccgggacaaagaggaaactttgccacttgaagatgggtggtgggggccaggcacgaggtccgcagccagggaggacgacagcatccgccctttcaaggtggaaacgtcagatgaggagatccacgacttacaccagaggatcgataagttccgtttcaccccacctttggaggacagctgcttccactatggcttcaactccaactacctgaagaaagtcatctcctactggcggaatgaatttgactggaagaagcaggtggagattctcaacagataccctcacttcaagactaagattgaagggctggacatccacttcatccacgtgaagcccccccagctgcccgcaggccataccccgaagcccttgctgatggtgcacggctggcccggctctttctacgagttttataagatcatcccactcctgactgaccccaagaaccatggcctgagcgatgagcacgtttttgaagtcatctgcccttccatccctggctatggcttctcagaggcatcctccaagaaggggttcaactcggtggccaccgccaggatcttttacaagctgatgctgcggctgggcttccaggaattctacattcaaggaggggactgggggtccctgatctgcactaatatggcccagctggtgcccagccacgtgaaaggcctgcacttgaacatggctttggttttaagcaacttctctaccctgaccctcctcctgggacagcgtttcgggaggtttcttggcctcactgagagggatgtggagctgctgtaccccgtcaaggagaaggtattctacagcctgatgagggagagcggctacatgcacatccagtgcaccaagcctgacaccgtaggctctgctctgaatgactctcctgtgggtctggctgcctatattctagagaagttttccacctggaccaatacggaattccgatacctggaggatggaggcctggaaaggaagttctccctggacgacctgctgaccaacgtcatgctctactggacaacaggcaccatcatctcctcccagcgcttctacaaggagaacctgggacagggctggatgacccagaagcatgagcggatgaaggtctatgtgcccactggcttctctgccttcccttttgagctattgcacacgcctgaaaagtgggtgaggttcaagtacccaaagctcatctcctattcctacatggttcgtgggggccactttgcggcctttgaggagccggagctgctcgcccaggacatccgcaagttcctgtcggtgctggagcggcaatgacccacccctctccccccgcctgccacctccccccacaagtgccctccaggcttttcttggggaagataccccttttctgaggaatgagtttgcctccgtcccctgcccatgctgggagcccacgctcaccccctcacccctccaagctcactccccaacccccaactccgtgtggtaagcaacatggctttgatgataaacgactttactct

SEQ ID NO: 1874 - DNA, 1776 bp, Artificial Sequence
  derived and/or modified sequence
acaggcccttagagcatcgccaggtgcagagctccacagctctctttcccaaggagtaatcagagggtgagaacgtggagcctggtggacaggtgaaagcactgggatctttctgcccagaaaggggaaagttgcacatttatatcctagagggaagcgacagcagtgcttctccctgtgctgaggtacaggagccatgtggctagaaatcctcctcacttcagtgctgggctttgccatctactggttcatctcccgggacaaagaggaaactttgccacttgaagatgggtggtgggggccaggcacgaggtccgcagccagggaggacgacagcatccgccctttcaaggtggaaacgtcagatgaggagatccacgacttacaccagaggatcgataagttccgtttcaccccacctttggaggacagctgcttccactatggcttcaactccaactacctgaagaaagtcatctcctactggcggaatgaatttgactggaagaagcaggtggagattctcaacagataccctcacttcaagactaagattgaagggctggacatccacttcatccacgtgaagcccccccagctgcccgcaggccataccccgaagcccttgctgatggtgcacggctggcccggctctttctacgagttttataagatcatcccactcctgactgaccccaagaaccatggcctgagcgatgagcacgtttttgaagtcatctgcccttccatccctggctatggcttctcagaggcatcctccaagaaggggttcaactcggtggccaccgccaggatcttttacaagctgatgctgcggctgggcttccaggaattctacattcaaggaggggactgggggtccctgatctgcactaatatggcccagctggtgcccagccacgtgaaaggcctgcacttgaacatggctttggttttaagcaacttctctaccctgaccctcctcctgggacagcgtttcgggaggtttcttggcctcactgagagggatgtggagctgctgtaccccgtcaaggagaaggtattctacagcctgatgagggagagcggctacatgcacatccagtgcaccaagcctgacaccgtaggctctgctctgaatgactctcctgtgggtctggctgcctatattctagagaagttttccacctggaccaatacggaattccgatacctggaggatggaggcctggaaaggaagttctccctggacgacctgctgaccaacgtcatgctctactggacaacaggcaccatcatctcctcccagcgcttctacaaggagaacctgggacagggctggatgacccagaagcatgagcggatgaaggtctatgtgcccactggcttctctgccttcccttttgagctattgcacacgcctgaaaagtgggtgaggttcaagtacccaaagctcatctcctattcctacatggttcgtgggggccactttgcggcctttgaggagccggagctgctcgcccaggacatccgcaagttcctgtcggtgctggagcggcaatgacccacccctctccccccgcctgccacctccccccacaagtgccctccaggcttttcttggggaagataccccttttctgaggaatgagtttgcctccgtcccctgcccatgctgggagcccacgctcaccccctcacccctccaagctcactccccaacccccaactccgtgtggtaagcaacatggctttgatgataaacgactttactct

SEQ ID NO: 1875 - DNA, 567 bp, Artificial Sequence
  derived and/or modified sequence
gctgaaaactagccgaggagagccagggagccggagagatcgcgcgcctgccgccgccggagcctgcgagccgagaccgagccatgtggctagaaatcctcctcacttcagtgctgggctttgccatctactggttcatctcccgggacaaagaggaaactttgccacttgaagatgggtggtgggggccaggcacgaggtccgcagccagggaggacgacagcatccgccctttcaaggtggaaacgtcagatgaggagatccacgacttacaccagaggatcgataagttccgtttcaccccacctttggaggacagctgcttccactatggcttcaactccaactacctgaagaaagtcatctcctactggcggaatgaatttgactggaagaagcaggtggagattctcaacagataccctcacttcaagactaagattgaagggctggacatccacttcatccacgtgaagcccccccagctgcccgcaggccataccccgaagcccttgctgatggtgcacggctggcccggctctttctacgagttttataagatcatcc

SEQ ID NO: 1876 - DNA, 895 bp, Artificial Sequence
  derived and/or modified sequence
cgcgcctgccgccgccggagcctgcgagccgagaccgtaagcgcccggggccggccgggcccgcactccccggacgcagacgcggttcgggctccgcgcgggctcggccgccggggtgggcggcgggccggggcgccgaggggtcggggctgcggtcggcccgcaggggtgcagagggacttgtagttggtccgcccccagctcctgccccggccaggagactgcgcgtgccgcctactgggggaaggagcctgcaggcgaccgcggacttctcgcagggaattccgcgtcccagactgtgggcggacgccgcagggagggaggctcgcgaccccgagagcgcaccgcgtcccctggcctgggcgagctctgcttccagggccgtggctcgctcggcggtgaaatgcacttaatttgtcacccaagtcggaacactgattttcatgcgcgtccgtgtgaagagaccaccaaacaggctttgtgagccatgtggctagaaatcctcctcacttcagtgctgggctttgccatctactggttcatctcccgggacaaagaggaaactttgccacttgaagatgggtggtgggggccaggcacgaggtccgcagccagggaggacgacagcatccgccctttcaaggtggaaacgtcagatgaggagatccacgacttacaccagaggatcgataagttccgtttcaccccacctttggaggacagctgcttccactatggcttcaactccaactacctgaagaaagtcatctcctactggcggaatgaatttgactggaagaagcaggtggagattctcaacagataccctcacttcaagactaagattgaagggctggacatccacttcatccacgtgaagcccccccagctgccc

SEQ ID NO: 1877 - protein, 508 aa, Artificial Sequence
  derived and/or modified sequence
MDHLGASLWPQVGSLCLLLAGAAWAPPPNLPDPKFESKAALLAARGPEELLCFTERLEDLVCFWEEAASAGVGPGNYSFSYQLEDEPWKLCRLHQAPTARGAVRFWCSLPTADTSSFVPLELRVTAASGAPRYHRVIHINEVVLLDAPVGLVARLADESGHVVLRWLPPPETPMTSHIRYEVDVSAGNGAGSVQRVEILEGRTECVLSNLRGRTRYTFAVRARMAEPSFGGFWSAWSEPVSLLTPSDLDPLILTLSLILVVILVLLTVLALLSHRRALKQKIWPGIPSPESEFEGLFTTHKGNFQLWLYQNDGCLWWSPCTPFTEDPPASLEVLSERCWGTMQAVEPGTDDEGPLLEPVGSEHAQDTYLVLDKWLLPRNPPSEDLPGPGGSVDIVAMDEGSEASSCSSALASKPSPEGASAASFEYTILDPSSQLLRPWTLCPELPPTPPHLKYLYLVVSDSGISTDYSSGDSQGAQGGLSDGPYSNPYENSLIPAAEPLPPSYVACS

SEQ ID NO: 1878 - DNA, 1527 bp, Artificial Sequence
  derived and/or modified sequence
atggatcacttaggagcctcgctttggccccaggtcggctccctgtgccttttacttgctggggccgcatgggcaccccctccgaatctacctgaccccaaattcgagtccaaagccgcgctgctggcagcccgaggccctgaggagcttctgtgcttcaccgagagattagaggatctcgtgtgtttttgggaagaagccgcaagtgccggggtgggtccgggtaattatagtttttcctatcagttggaggacgaaccctggaagctgtgcaggctgcatcaggcccccacggcgcgaggcgctgtgcggttttggtgcagcctgcctacagctgacacctcgagcttcgtccccctcgagctccgtgtaacggctgcctccggggcaccccgttatcatcgtgtcatacacatcaacgaagtggtattgctcgacgcacccgttgggctagtagctaggcttgccgatgaatctggacatgttgtactcaggtggctgcctccaccagaaaccccaatgacgtcccacattagatacgaagtggacgtcagcgcagggaacggcgcgggttccgtgcagcgcgtggaaatactagagggaagaacagagtgtgtcctttctaatctgagaggacggacccggtacacttttgccgtgcgcgcgagaatggctgagccctcatttggaggattctggtccgcctggtccgagccagtttcactgctgactccaagtgacctggatccattgatcctcaccctcagcctgattttagtcgtaatactggtgttgctcaccgtgttggctctgctgtcacaccggagggcattgaaacagaagatctggccgggcatccccagcccggaaagtgaattcgaggggctctttaccacccacaaaggaaactttcagctgtggttgtaccaaaacgatggatgcttgtggtggtcaccatgtaccccattcactgaagaccctcctgcctcgctcgaggtcttatccgagcgctgctgggggactatgcaggcggtggagccaggaactgacgatgaaggccctctgctcgaaccagtgggaagtgaacacgcccaagacacttaccttgtgttggacaagtggctactccccaggaatccgccgagcgaagaccttcctggaccaggcggcagcgtagatattgtggccatggatgaaggttctgaagcatcgagttgctcaagcgccctggcctcaaaaccatccccagaaggcgcctcagcagcctctttcgaatacactatcctggatccctctagccagctgcttcggccctggaccctgtgtccagagctgccacccacgcccccgcatctgaaatatctgtatctcgtagtaagtgacagcgggatctctactgactacagcagcggcgattctcaaggcgcgcagggcgggcttagtgatggaccctattccaatccttacgaaaatagcctgatcccagcggccgagccgcttccaccttcctatgtagcttgcagctag

SEQ ID NO: 1879 - DNA, 1527 bp, Artificial Sequence
  derived and/or modified sequence
atggaccacctgggcgccagcctgtggccccaggtgggcagcctgtgcctgctgctggccggggccgcctgggcccccccacccaacctgcctgaccccaagtttgagagcaaggccgccctgctggccgcccggggccctgaggagctgctgtgcttcacagagcggctggaggacctggtgtgcttctgggaggaggccgccagcgctggggtgggccctggcaactacagcttctcctaccagctggaggatgagccctggaagctgtgccgcctgcaccaggcccccacagcccggggagctgtgcgcttctggtgcagcctgcccacagctgacaccagcagctttgtgcccctggagctgcgggtgacagctgccagcggggccccccgctaccacagggtcatccacatcaatgaggtggtgctgctggatgcccctgtgggcctggtggcccggctggctgatgaaagtggccacgtggtgctgcgctggctgcccccacctgagacccccatgaccagccacatccgctatgaggtggatgtgtctgctggaaatggagctggctctgtgcagagggtggagatcctggagggccgcacagaatgtgtgctgagcaacctgcggggccgcacccgctacacctttgctgtgcgggccaggatggccgagcccagctttggaggcttctggagcgcctggagcgagcctgtgtccctgctgacccccagcgacctggaccccctcatcctgaccctgagcctcatcctggtggtgatcctggtgctgctgactgtgctggccctgctgagccacagaagagccctgaagcagaagatctggccaggcatccccagccctgagagcgagtttgagggcctcttcaccacccacaagggcaacttccagctgtggctgtaccagaatgatggctgcctgtggtggagcccctgcacccccttcacagaagatcctccagccagcctggaggtgctgtctgagcgctgctggggcaccatgcaggccgtggagcctggaacagatgatgagggccccctgctggagcctgtgggcagcgagcacgcccaggacacctacctggtgctggacaagtggctgctgcccaggaaccccccatctgaggacctgcccggccctgggggctctgtggacatcgtggccatggatgagggcagcgaggccagcagctgcagcagcgccctggccagcaagcccagccctgagggcgccagcgctgccagctttgagtacaccatcctggaccccagcagccagctgctgcggccctggaccctgtgcccagagctgccccccaccccaccccacctgaagtacctgtacctggtggtgtctgacagcggcatcagcacagactacagcagcggggacagccagggcgcccagggcggcctgagtgatggcccctacagcaacccctatgagaacagcctcatcccagctgctgagcccctgcccccatcctatgtggcctgcagctag

SEQ ID NO: 1880 - DNA, 1527 bp, Artificial Sequence
  derived and/or modified sequence
atggaccacctgggcgccagcctgtggccccaggtgggcagcctgtgcctgctactggccggggccgcatgggcccccccgcctaacctgccggaccccaaatttgaatccaaggcagcactgttagcagctcgcgggcccgaggagcttttgtgttttacagagaggctggaggatctcgtatgcttttgggaagaggccgcttcggccggagttgggcctggcaactattctttttcctaccagctcgaagacgaaccctggaagctgtgcaggctgcaccaggcacctacagcacgtggcgctgtgcgtttctggtgttcacttcccacagcagacacatcgagctttgtgcctctcgaactccgggtgaccgcggcaagcggagcaccaaggtaccacagggtgatccacatcaatgaggtggtgctgttggatgcaccagtgggcctcgtcgctcgcctggctgacgagtcaggccatgtggtcttgcggtggctcccgccgcccgaaactcctatgaccagtcatattcgctacgaagtggatgttagtgctggcaatggcgccggctctgtccaaagagttgagatactagaaggccgaaccgaatgtgtgttatctaacctacggggcaggacccggtacacatttgccgtgcgggcgcgcatggcagaacccagcttcggagggttttggagtgcatggagtgaacccgtgtcactgctgaccccttctgatctcgacccattgattctcactttatccctgatactcgtggttatcttggtgttgctgaccgttctcgctttgttgtctcaccgccgggctctgaagcagaaaatctggcccgggattccatccccagaatccgagtttgaaggcctgtttaccacccataaaggcaactttcagctgtggctctaccagaatgacggctgtttgtggtggtctccttgcactccgtttaccgaagatcctcctgcctcactagaagttcttagtgagcgatgttggggaaccatgcaagccgtggaacctggcacggatgatgaaggccctctattggaaccagttggctccgagcatgcccaggatacctatctggtgctggacaagtggctcctgcctagaaatccaccatctgaggatcttcctggcccaggcggcagtgtcgatatcgtagcaatggacgaggggtctgaggcctcctcatgcagttccgccctggcttctaagcctagccccgaaggtgcctctgctgcttcttttgaatacactattttggacccctccagccagttgctccgcccatggaccctatgtcctgaactcccccccaccccaccccacctcaaatacctgtacctggtggtcagcgactctgggatttcaacggattactcatcaggcgattcccagggcgcccagggtggactatctgatggcccatactcaaatccatatgaaaattctctgattcctgccgctgaacctctacccccctcgtatgtggcctgctcttag

SEQ ID NO: 1881 - DNA, 1527 bp, Artificial Sequence
  derived and/or modified sequence
atggatcatctgggagcgtctctgtggcctcaagtaggctccctgtgtctgctgctcgccggtgcggcttgggccccaccccctaacctgccagaccccaagtttgaaagtaaagctgcccttcttgctgcaagaggtcctgaggaactcttatgcttcactgagaggctggaagatttagtctgcttttgggaagaagcagcctcggcgggagtcgggcctggaaactactccttcagctaccagctggaggatgagccatggaagctatgtaggctgcatcaggccccaaccgccaggggcgcagtcagattttggtgttcattgccaaccgccgatacctcgtcatttgtaccactggaactgcgagtgactgctgcctccggcgcaccaaggtatcatcgcgtgatccacattaacgaagtagttctgctggatgctcctgtgggcctggtcgccaggctggctgatgagtctggccacgtggtgttgcgttggctgcctccgccagaaactcccatgacatcccatatccgatacgaggtggacgtttccgcgggtaacggtgcaggatctgtacagcgggtggaaattctcgagggtagaaccgagtgtgttctgtctaatttacggggtagaacccgctatacattcgctgtgcgggctcgtatggccgaaccaagctttggagggttctggtcagcctggtcggaaccagtatctctgctgacaccatcagacctggatcctcttatcttgacactcagcctgatacttgtcgttatactcgtgctcctgactgttttagcgctacttagtcatagaagggccctcaagcagaagatatggcccggtatccctagtcccgagtcagagttcgaagggctcttcaccacacataagggtaactttcaactatggttataccagaacgacggttgcttgtggtggtctccgtgcacacctttcacggaggatccgcctgctagccttgaagtgctctccgaacggtgttgggggacgatgcaggctgtcgagccaggcaccgacgatgagggtcccttgctggagcctgttgggagcgaacacgcccaagatacctacctagtgttagataaatggctccttcctcgaaatcccccaagtgaggacttgccgggtcctggcggaagcgtggatattgtggctatggatgagggatcagaggcttcctcatgttcatcagcactcgcctcaaaaccctcccccgagggcgcttcagccgctagtttcgagtacacaatcctggacccttctagccagctattacgcccttggactctttgtccagaactgcctcccacccctccccacttgaagtacctgtacctggtggtctcggatagcgggatatcaacggactattctagtggcgactcccagggcgctcaaggaggtctctcagacggaccatactcaaatccctacgagaattccctcattcctgcggcagagccattgccgccatcttacgttgcgtgttcatag

SEQ ID NO: 1882 - DNA, 1527 bp, Artificial Sequence
  derived and/or modified sequence
atggaccacctgggcgccagcctgtggccccaggtgggcagcctgtgcctgctgctggccggcgccgcctgggcccccccccccaacctgcccgaccccaagttcgagagcaaggccgccctgctggccgccagaggccccgaggagctgctgtgcttcaccgagagactggaggacctggtgtgcttctgggaggaggccgccagcgccggcgtgggccccggcaactacagcttcagctaccagctggaggacgagccctggaagctgtgcagactgcaccaggcccccaccgccagaggcgccgtgagattctggtgcagcctgcccaccgccgacaccagcagcttcgtgcccctggagctgagagtgaccgccgccagcggcgcccccagataccacagagtgatccacatcaacgaggtggtgctgctggacgcccccgtgggcctggtggccagactggccgacgagagcggccacgtggtgctgagatggctgcccccccccgagacccccatgaccagccacatcagatacgaggtggacgtgagcgccggcaacggcgccggcagcgtgcagagagtggagatcctggagggcagaaccgagtgcgtgctgagcaacctgagaggcagaaccagatacaccttcgccgtgagagccagaatggccgagcccagcttcggcggcttctggagcgcctggagcgagcccgtgagcctgctgacccccagcgacctggaccccctgatcctgaccctgagcctgatcctggtggtgatcctggtgctgctgaccgtgctggccctgctgagccacagaagagccctgaagcagaagatctggcccggcatccccagccccgagagcgagttcgagggcctgttcaccacccacaagggcaacttccagctgtggctgtaccagaacgacggctgcctgtggtggagcccctgcacccccttcaccgaggacccccccgccagcctggaggtgctgagcgagagatgctggggcaccatgcaggccgtggagcccggcaccgacgacgagggccccctgctggagcccgtgggcagcgagcacgcccaggacacctacctggtgctggacaagtggctgctgcccagaaacccccccagcgaggacctgcccggccccggcggcagcgtggacatcgtggccatggacgagggcagcgaggccagcagctgcagcagcgccctggccagcaagcccagccccgagggcgccagcgccgccagcttcgagtacaccatcctggaccccagcagccagctgctgagaccctggaccctgtgccccgagctgccccccacccccccccacctgaagtacctgtacctggtggtgagcgacagcggcatcagcaccgactacagcagcggcgacagccagggcgcccagggcggcctgagcgacggcccctacagcaacccctacgagaacagcctgatccccgccgccgagcccctgccccccagctacgtggcctgcagctag

SEQ ID NO: 1883 - DNA, 2441 bp, Artificial Sequence
  derived and/or modified sequence
cttagaggcgcctggtcgggaagggcctggtcagctgcgtccggcggaggcagctgctgacccagctgtggactgtgccgggggcgggggacggaggggcaggagccctgggctccccgtggcgggggctgtatcatggaccacctcggggcgtccctctggccccaggtcggctccctttgtctcctgctcgctggggccgcctgggcgcccccgcctaacctcccggaccccaagttcgagagcaaagcggccttgctggcggcccgggggcccgaagagcttctgtgcttcaccgagcggttggaggacttggtgtgtttctgggaggaagcggcgagcgctggggtgggcccgggcaactacagcttctcctaccagctcgaggatgagccatggaagctgtgtcgcctgcaccaggctcccacggctcgtggtgcggtgcgcttctggtgttcgctgcctacagccgacacgtcgagcttcgtgcccctagagttgcgcgtcacagcagcctccggcgctccgcgatatcaccgtgtcatccacatcaatgaagtagtgctcctagacgcccccgtggggctggtggcgcggttggctgacgagagcggccacgtagtgttgcgctggctcccgccgcctgagacacccatgacgtctcacatccgctacgaggtggacgtctcggccggcaacggcgcagggagcgtacagagggtggagatcctggagggccgcaccgagtgtgtgctgagcaacctgcggggccggacgcgctacaccttcgccgtccgcgcgcgtatggctgagccgagcttcggcggcttctggagcgcctggtcggagcctgtgtcgctgctgacgcctagcgacctggaccccctcatcctgacgctctccctcatcctcgtggtcatcctggtgctgctgaccgtgctcgcgctgctctcccaccgccgggctctgaagcagaagatctggcctggcatcccgagcccagagagcgagtttgaaggcctcttcaccacccacaagggtaacttccagctgtggctgtaccagaatgatggctgcctgtggtggagcccctgcacccccttcacggaggacccacctgcttccctggaagtcctctcagagcgctgctgggggacgatgcaggcagtggagccggggacagatgatgagggccccctgctggagccagtgggcagtgagcatgcccaggatacctatctggtgctggacaaatggttgctgccccggaacccgcccagtgaggacctcccagggcctggtggcagtgtggacatagtggccatggatgaaggctcagaagcatcctcctgctcatctgctttggcctcgaagcccagcccagagggagcctctgctgccagctttgagtacactatcctggaccccagctcccagctcttgcgtccatggacactgtgccctgagctgccccctaccccaccccacctaaagtacctgtaccttgtggtatctgactctggcatctcaactgactacagctcaggggactcccagggagcccaagggggcttatccgatggcccctactccaacccttatgagaacagccttatcccagccgctgagcctctgccccccagctatgtggcttgctcttaggacaccaggctgcagatgatcagggatccaatatgactcagagaaccagtgcagactcaagacttatggaacagggatggcgaggcctctctcaggagcaggggcattgctgattttgtctgcccaatccatcctgctcaggaaaccacaaccttgcagtatttttaaatatgtatagtttttttttgtatctatatatatatatacacatatgtatgtaagtttttctaccatgatttctacaaacaccctttaagtcccatcttcccctgggcataggccatagggatagaagttaaagttcttgagcttattcagaagctggatctgcaatctgaatgctactcataacataacaaaatagtatgttaaacagctcttaaatcttactggcttaccacattaaatgatttctctctcctaactcagctcaaatgggcagccatccatgggatgagtcagaggttcagactcttccagtctgtagctctaccttctcttagggtacttagatggatcccctgttctacaaactgccagtcagcaagggaagaaaaagggcagcaatgaccctcaatgggccatttgagggatctggcctggaaatgggcttcctctcttcttctcacacctcactggctggaaacagtcacatgaccccagtcacatgaaaggccaggaaacttagtttagctgtacacccaggaagggcaaagctgtttaagggccactagctagtctctgccactaataataataaaagtaattctgaatcaggc

SEQ ID NO: 1884 - protein, 782 aa, Artificial Sequence
  derived and/or modified sequence
MGKRDRADRDKKKSRKRHYEDEEDDEEDAPGNDPQEAVPSAAGKQVDESGTKVDEYGAKDYRLQMPLKDDHTSRPLWVAPDGHIFLEAFSPVYKYAQDFLVAIAEPVCRPTHVHEYKLTAYSLYAAVSVGLQTSDITEYLRKLSKTGVPDGIMQFIKLCTVSYGKVKLVLKHNRYFVESCHPDVIQHLLQDPVIRECRLRNSEGEATELITETFTSKSAISKTAESSGGPSTSRVTDPQGKSDIPMDLFDFYEQMDKDEEEEEETQTVSFEVKQEMIEELQKRCIHLEYPLLAEYDFRNDSVNPDINIDLKPTAVLRPYQEKSLRKMFGNGRARSGVIVLPCGAGKSLVGVTAACTVRKRCLVLGNSAVSVEQWKAQFKMWSTIDDSQICRFTSDAKDKPIGCSVAISTYSMLGHTTKRSWEAERVMEWLKTQEWGLMILDEVHTIPAKMFRRVLTIVQAHCKLGLTATLVREDDKIVDLNFLIGPKLYEANWMELQNNGYIAKVQCAEVWCPMSPEFYREYVAIKTKKRILLYTMNPNKFRACQFLIKFHERRNDKIIVFADNVFALKEYAIRLNKPYIYGPTSQGERMQILQNFKHNPKINTIFISKVGDTSFDLPEANVLIQISSHGGSRRQEAQRLGRVLRAKKGMVAEEYNAFFYSLVSQDTQEMAYSTKRQRFLVDQGYSFKVITKLAGMEEEDLAFSTKEEQQQLLQKVLAATDLDAEEEVVAGEFGSRSSQASRRFGTMSSMSGADDTVYMEYHSSRSKAPSKHVHPLFKRFRK

SEQ ID NO: 1885 - DNA, 2751 bp, Artificial Sequence
  derived and/or modified sequence
gggagcttccggattgagccggaagtccccccagagcggatgccgcggcgggcctgtgggagcggggtcatcttctctctgctgctgtagctgccatgggcaaaagagaccgagcggaccgcgacaagaagaaatccaggaagcggcactatgaggatgaagaggatgatgaagaggacgccccggggaacgaccctcaggaagcggttccctcggcggcggggaagcaggtggatgagtcaggcaccaaagtggatgaatatggagccaaggactacaggctgcaaatgccgctgaaggacgaccacacctccaggcccctctgggtggctcccgatggccatatcttcttggaagccttctctccagtttacaaatatgcccaagacttcttggtggctattgcagagccagtgtgccgaccaacccatgtgcatgagtacaaactaactgcctactccttgtatgcagctgtcagcgttgggctgcaaaccagtgacatcaccgagtacctcaggaagctcagcaagactggagtccctgatggaattatgcagtttattaagttgtgtactgtcagctatggaaaagtcaagctggtcttgaagcacaacagatacttcgttgaaagttgccaccctgatgtaatccagcatcttctccaggaccccgtgatccgagaatgccgcttaagaaactctgaaggggaggccactgagctcatcacagagactttcacaagcaaatctgccatttctaagactgctgaaagcagtggtgggccctccacttcccgagtgacagatccacagggtaaatctgacatccccatggacctgtttgacttctatgagcaaatggacaaggatgaagaagaagaagaagagacacagacagtgtcttttgaagtcaagcaggaaatgattgaggaactccagaaacgttgcatccacctggagtaccctctgttggcagaatatgacttccggaatgattctgtcaaccctgatatcaacattgacctaaagcccacagctgtcctcagaccctatcaggagaagagcttgcgaaagatgtttggaaacgggcgtgcacgttcgggggtcattgttcttccctgcggtgctggaaagtccctggttggtgtgactgctgcatgcactgtcagaaaacgctgtctggtgctgggcaactcagctgtttctgtggagcagtggaaagcccagttcaagatgtggtccaccattgacgacagccagatctgccggttcacctccgatgccaaggacaagcccatcggctgctccgttgccattagcacctactccatgctgggccacaccaccaaaaggtcctgggaggccgagcgagtcatggagtggctcaagacccaggagtggggcctcatgatcctggatgaagtgcacaccataccagccaagatgttccgaagggtgctcaccatcgtgcaggcccactgtaagctgggtttgactgcgaccctcgtccgcgaagatgacaaaattgtggatttaaattttctgattgggcctaagctctacgaagccaactggatggagctgcagaataatggctacatcgccaaagtccagtgtgctgaggtctggtgccctatgtctcctgaattttaccgggaatatgtggcaatcaaaaccaagaaacgaatcttgctgtacaccatgaaccccaacaaatttagagcttgccagtttctgatcaagtttcatgaaaggaggaatgacaagattattgtctttgctgacaatgtgtttgccctaaaggaatatgccattcgactgaacaaaccctatatctacggacctacgtctcagggggaaaggatgcaaattctccagaatttcaagcacaaccccaaaattaacaccatcttcatatccaaggtaggtgacacttcgtttgatctgccggaagcaaatgtcctcattcagatctcatcccatggtggctccaggcgtcaggaagcccaaaggctagggcgggtgcttcgagctaaaaaagggatggttgcagaagagtacaatgcctttttctactcactggtatcccaggacacacaggaaatggcttactcaaccaagcggcagagattcttggtagatcaaggttatagcttcaaggtgatcacgaaactcgctggcatggaggaggaagacttggcgttttcgacaaaagaagagcaacagcagctcttacagaaagtcctggcagccactgacctggatgccgaggaggaggtggtggctggggaatttggctccagatccagccaggcatctcggcgctttggcaccatgagttctatgtctggggccgacgacactgtgtacatggagtaccactcatcgcggagcaaggcgcccagcaaacatgtacacccgctcttcaagcgctttaggaaatgatgcttaggcagggtacttcgttcaagaccggcgcttggcacccttgttggaaagggattttcagcataacattttccttccacctctttgaccttccctccagcgttggccaaattgtgctgaggaagatgcatcaagggcttggctgtgccttcataggtcatctagggttttataaaggaggaggagacaatattttttcaaactttttggggagtggggtcatttctgtatataaaaaatgttaatatttaaggtgtatttatgttaccgttctgaataaacagaatggaccattgaaccagta

SEQ ID NO: 1886 - DNA, 2750 bp, Artificial Sequence
  derived and/or modified sequence
gggagcttccggattgagccggaagtccccccagagcggatgccgcggcgggcctgtgggagcggggtcatcttctctctgctgctgtagctgccatgggcaaaagagaccgagcggaccgcgacaagaagaaatccaggaagcggcactatgaggatgaagaggatgatgaagaggacgccccggggaacgaccctcaggaagcggttccctcggcggcggggaagcaggtggatgagtcaggcaccaaagtggatgaatatggagccaaggactacaggctgcaaatgccgctgaaggacgaccacacctccaggcccctctgggtggctcccgatggccatatcttcttggaagccttctctccagtttacaaatatgcccaagacttcttggtggctattgcagagccagtgtgccgaccaacccatgtgcatgagtacaaactaactgcctactccttgtatgcagctgtcagcgttgggctgcaaaccagtgacatcaccgagtacctcaggaagctcagcaagactggagtccctgatggaattatgcagtttattaagttgtgtactgtcagctatggaaaagtcaagctggtcttgaagcacaacagatacttcgttgaaagttgccaccctgatgtaatccagcatcttctccaggaccccgtgatccgagaatgccgcttaagaaactctgaaggggaggccactgagctcatcacagagactttcacaagcaaatctgccatttctaagactgctgaaagcagtggtgggccctccacttcccgagtgacagatccacagggtaaatctgacatccccatggacctgtttgacttctatgagcaaatggacaaggatgaagaagaagaagaagagacacagacagtgtcttttgaagtcaagcaggaaatgattgaggaactccagaaacgttgcatccacctggagtaccctctgttggcagaatatgacttccggaatgattctgtcaaccctgatatcaacattgacctaaagcccacagctgtcctcagaccctatcaggagaagagcttgcgaaagatgtttggaaacgggcgtgcacgttcgggggtcattgttcttccctgcggtgctggaaagtccctggttggtgtgactgctgcatgcactgtcagaaaacgctgtctggtgctgggcaactcagctgtttctgtggagcagtggaaagcccagttcaagatgtggtccaccattgacgacagccagatctgccggttcacctccgatgccaaggacaagcccatcggctgctccgttgccattagcacctactccatgctgggccacaccaccaaaaggtcctgggaggccgagcgagtcatggagtggctcaagacccaggagtggggcctcatgatcctggatgaagtgcacaccataccagccaagatgttccgaagggtgctcaccatcgtgcaggcccactgtaagctgggtttgactgcgaccctcgtccgcgaagatgacaaaattgtggatttaaattttctgattgggcctaagctctacgaagccaactggatggagctgcagaataatggctacatcgccaaagtccagtgtgctgaggtctggtgccctatgtctcctgaattttaccgggaatatgtggcaatcaaaaccaagaaacgaatcttgctgtacaccatgaaccccaacaaatttagagcttgccagtttctgatcaagtttcatgaaaggaggaatgacaagattattgtctttgctgacaatgtgtttgccctaaaggaatatgccattcgactgaacaaaccctatatctacggacctacgtctcagggggaaaggatgcaaattctccagaatttcaagcacaaccccaaaattaacaccatcttcatatccaaggtaggtgacacttcgtttgatctgccggaagcaaatgtcctcattcagatctcatcccatggtggctccaggcgtcaggaagcccaaaggctagggcgggtgcttcgagctaaaaaagggatggttgcagaagagtacaatgcctttttctactcactggtatcccaggacacacaggaaatggcttactcaaccaagcggcagagattcttggtagatcaaggttatagcttcaaggtgatcacgaaactcgctggcatggaggaggaagacttggcgttttcgacaaaagaagagcaacagcagctcttacagaaagtcctggcagccactgacctggatgccgaggaggaggtggtggctggggaatttggctccagatccagccaggcatctcggcgctttggcaccatgagttctatgtctggggccgacgacactgtgtacatggagtaccactcatcgcggagcaaggcgcccagcaaacatgtacacccgctcttcaagcgctttaggaaatgatgcttaggcagggtacttcgttcaagaccggcgcttggcacccttgttggaaagggattttcagcataacattttccttccacctctttgaccttccctccagcgttggccaaattgtgctgaggaagatgcatcaagggcttggctgtgccttcataggtcatctagggttttataaaggaggaggagacaatattttttcaaactttttggggagtggggtcatttctgtatataaaaaatgttaatatttaaggtgtatttatgttaccgttctgaataaacagaatggaccattgaaccagt

SEQ ID NO: 1887 - DNA, 2920 bp, Artificial Sequence
  derived and/or modified sequence
tgctgtagctgccatgggcaaaagagaccgagcggaccgcggtgagacgttgcgcgggcacgctcagccacgactgcccttgccggccctgccccccgctctgcctcggagctgctccgggcctctgcgccggccgaccctgctggccctcccgcgcgcaccccgttgggacaggcctttgggcgggagagatgctggacctgggcgcagcccagcgaactcggcctaggggagacgggtgaggggcgcaacgcctgcgggatgcaggtggctcttagctaggagtttgcggcggcgcagacaagaagaaatccaggaagcggcactatgaggatgaagaggatgatgaagaggacgccccggggaacgaccctcaggaagcggttccctcggcggcggggaagcaggtggatgagtcaggcaccaaagtggatgaatatggagccaaggactacaggctgcaaatgccgctgaaggacgaccacacctccaggcccctctgggtggctcccgatggccatatcttcttggaagccttctctccagtttacaaatatgcccaagacttcttggtggctattgcagagccagtgtgccgaccaacccatgtgcatgagtacaaactaactgcctactccttgtatgcagctgtcagcgttgggctgcaaaccagtgacatcaccgagtacctcaggaagctcagcaagactggagtccctgatggaattatgcagtttattaagttgtgtactgtcagctatggaaaagtcaagctggtcttgaagcacaacagatacttcgttgaaagttgccaccctgatgtaatccagcatcttctccaggaccccgtgatccgagaatgccgcttaagaaactctgaaggggaggccactgagctcatcacagagactttcacaagcaaatctgccatttctaagactgctgaaagcagtggtgggccctccacttcccgagtgacagatccacagggtaaatctgacatccccatggacctgtttgacttctatgagcaaatggacaaggatgaagaagaagaagaagagacacagacagtgtcttttgaagtcaagcaggaaatgattgaggaactccagaaacgttgcatccacctggagtaccctctgttggcagaatatgacttccggaatgattctgtcaaccctgatatcaacattgacctaaagcccacagctgtcctcagaccctatcaggagaagagcttgcgaaagatgtttggaaacgggcgtgcacgttcgggggtcattgttcttccctgcggtgctggaaagtccctggttggtgtgactgctgcatgcactgtcagaaaacgctgtctggtgctgggcaactcagctgtttctgtggagcagtggaaagcccagttcaagatgtggtccaccattgacgacagccagatctgccggttcacctccgatgccaaggacaagcccatcggctgctccgttgccattagcacctactccatgctgggccacaccaccaaaaggtcctgggaggccgagcgagtcatggagtggctcaagacccaggagtggggcctcatgatcctggatgaagtgcacaccataccagccaagatgttccgaagggtgctcaccatcgtgcaggcccactgtaagctgggtttgactgcgaccctcgtccgcgaagatgacaaaattgtggatttaaattttctgattgggcctaagctctacgaagccaactggatggagctgcagaataatggctacatcgccaaagtccagtgtgctgaggtctggtgccctatgtctcctgaattttaccgggaatatgtggcaatcaaaaccaagaaacgaatcttgctgtacaccatgaaccccaacaaatttagagcttgccagtttctgatcaagtttcatgaaaggaggaatgacaagattattgtctttgctgacaatgtgtttgccctaaaggaatatgccattcgactgaacaaaccctatatctacggacctacgtctcagggggaaaggatgcaaattctccagaatttcaagcacaaccccaaaattaacaccatcttcatatccaaggtaggtgacacttcgtttgatctgccggaagcaaatgtcctcattcagatctcatcccatggtggctccaggcgtcaggaagcccaaaggctagggcgggtgcttcgagctaaaaaagggatggttgcagaagagtacaatgcctttttctactcactggtatcccaggacacacaggaaatggcttactcaaccaagcggcagagattcttggtagatcaaggttatagcttcaaggtgatcacgaaactcgctggcatggaggaggaagacttggcgttttcgacaaaagaagagcaacagcagctcttacagaaagtcctggcagccactgacctggatgccgaggaggaggtggtggctggggaatttggctccagatccagccaggcatctcggcgctttggcaccatgagttctatgtctggggccgacgacactgtgtacatggagtaccactcatcgcggagcaaggcgcccagcaaacatgtacacccgctcttcaagcgctttaggaaatgatgcttaggcagggtacttcgttcaagaccggcgcttggcacccttgttggaaagggattttcagcataacattttccttccacctctttgaccttccctccagcgttggccaaattgtgctgaggaagatgcatcaagggcttggctgtgccttcataggtcatctagggttttataaaggaggaggagacaatattttttcaaactttttggggagtggggtcatttctgtatataaaaaatgttaatatttaaggtgtatttatgttaccgttctgaataaacagaatggaccattg

SEQ ID NO: 1888 - DNA, 2349 bp, Artificial Sequence
  derived and/or modified sequence
atgggaaagcgcgacagggccgacagggataagaaaaaatcccgaaagcgtcactacgaggatgaagaggatgatgaggaagatgccccggggaacgatccccaagaagccgtcccttccgcagccggcaaacaggtggatgaaagcggcactaaagtggatgagtatggagccaaggactaccggctgcagatgccgcttaaggacgatcacacaagccgcccactgtgggtggccccagatgggcacatttttctagaggcattcagtccggtttacaaatacgcccaggacttccttgtggccatagccgagcctgtctgccgtcccacacacgtgcatgaatacaaactgacagcctatagtctgtatgctgccgtaagtgtgggccttcagaccagcgacatcacagagtatttacggaaactttcaaagacaggggtcccagacgggattatgcaatttattaagctgtgcaccgtgagttatggcaaggttaaactggtgctgaaacataatcggtattttgtggagagttgtcatccagatgtcatccaacatcttttacaggacccggtgattcgcgagtgtagattgcgtaatagcgagggggaggcaaccgagctgattaccgagaccttcacatccaaatcagcaatatctaagactgctgagtcctcgggtggtccttccacctctcgagtcaccgatccgcagggtaagtcagatatcccaatggacctctttgacttctacgaacagatggacaaagacgaggaagaagaggaggaaactcagaccgtctcttttgaggttaaacaagagatgattgaagagctgcagaagagatgtattcacctggaatatccactgctggccgagtacgacttccggaatgattcagtaaacccagatataaacatcgatttgaagcctaccgccgttctcagaccctatcaggaaaagagcctccggaagatgttcggcaacggacgggcccgcagtggggtcattgtgctgccatgcggagctggcaagagcctggttggcgtaaccgccgcctgcaccgtcagaaagcgctgcttggtgctgggcaattccgcagtcagtgttgagcagtggaaggcccaatttaagatgtggtcaaccattgacgactcccaaatttgcagatttacttctgatgcaaaggacaagccaatcggctgttccgtggcaatcagtacgtacagtatgttagggcacacaacaaagagaagctgggaggctgaacgagtgatggagtggcttaagacccaggagtggggcttgatgattctggacgaggtccatactatcccagccaagatgtttagaagggtgctgacgattgtgcaggctcattgcaagctgggactcacagctacattggtgagggaggatgataagatcgtcgacttaaactttctcataggtccaaaactgtatgaggccaactggatggaactgcagaacaacggttacatcgctaaagtgcagtgtgccgaggtgtggtgtccaatgagccctgaattttacagagaatatgtggccatcaagaccaaaaagaggattctgctgtacacaatgaatccgaataaatttagggcctgtcagtttctgatcaaattccatgagcggcgcaatgacaagataatagtgtttgctgataacgtctttgccctcaaggagtatgccatccgacttaacaaaccatatatctacgggcccacttcccagggggagcggatgcaaatcttgcagaacttcaagcataacccaaagatcaatacaatatttatttccaaggtgggagataccagcttcgatctcccggaggcaaatgtcctcattcagatttcctctcacggcggatcccgaagacaggaggcccaacggctgggacgggtgctccgtgccaagaagggtatggtcgcagaggaatacaacgcgttcttttacagtcttgtttcccaggacacccaggagatggcgtactcgacaaagcgccagcggttcctggtagaccaaggctatagtttcaaagtcatcacaaagctagctggcatggaggaggaggaccttgccttttccaccaaagaggagcagcagcagctgctgcaaaaggtcctagctgctacagatctcgacgccgaagaagaagtcgtggctggcgagttcggctcgcgaagctctcaggcatctcgacggttcgggaccatgagctccatgagtggcgcagacgataccgtgtacatggagtaccactcatctagatccaaagcacctagtaaacacgtccaccccttattcaagaggtttagaaaatag

SEQ ID NO: 1889 - DNA, 2157 bp, Artificial Sequence
  derived and/or modified sequence
atgcccctgaaagatgatcacactagcaggcctctgtgggtcgcacccgatgggcatatttttttggaggccttcagtccggtgtacaagtatgcacaggattttttggtggctattgcggagcccgtctgccgccctacccatgttcacgagtataaactcaccgcttacagcctctacgcagccgtctccgtcggcttgcaaacatctgacattaccgagtacctgcgcaaactgagcaagaccggggtgccggacggtattatgcagtttataaaactgtgtacagtctcatatggtaaagtaaaactggtgctgaagcataaccgctatttcgtcgaatcgtgccaccccgacgtcatacaacacttgctgcaggacccagttataagggagtgccgcctgcggaatagcgaaggtgaagccacagagttgatcacagagaccttcacaagcaagtcagccatatctaagaccgctgaatcgtcggggggaccttctactagccgcgtgacagatccgcagggtaaaagtgacataccaatggatcttttcgacttttatgaacaaatggataaagacgaggaggaagaagaagaaactcagactgtttcgttcgaagttaaacaggaaatgattgaagaattgcagaagcgctgcattcacctggaatatcctctgctggcggagtatgacttcaggaacgacagcgtcaatccggatattaacattgacctgaagccaactgctgtacttagaccatatcaggagaaaagtctgagaaaaatgttcgggaatggccgcgcacgcagcggagtcattgttctgccctgtggagctggtaagtctctcgtgggtgtgactgctgcgtgcacagtgagaaagcggtgtttagtgctcggaaattccgctgtctccgttgagcagtggaaggcgcagttcaagatgtggagtacaatcgacgactcccagatttgccggttcacgagtgatgccaaagacaagcccatcggctgcagtgttgccataagcacatattcaatgctcggacacactaccaagcgaagctgggaagctgaacgggtgatggagtggctgaagacccaagaatggggcctaatgattctcgacgaagttcatacaatccctgccaaaatgttccgccgtgtgctcaccatcgtccaagcacactgtaaacttggcctgactgctaccttagtcagggaagacgataagattgtggatttaaactttctcattggaccaaagctgtacgaagctaattggatggagctacagaataacggctacattgccaaagtccagtgtgcggaggtgtggtgtcccatgtcgccggagttctatcgtgaatatgtcgcaattaagacaaaaaagagaattctgttatacacaatgaaccccaacaagtttagggcttgccaattcttgatcaaatttcatgagcgaagaaatgataaaatcattgtctttgctgacaatgtgtttgcattaaaggaatatgctatcaggcttaataaaccttacatttacggacccacatctcagggagagaggatgcagatcttgcaaaactttaagcataaccccaaaatcaatactatcttcatctcaaaggtgggcgacacatccttcgacctgcccgaggctaacgtgttgatccagatttcttcccatggcgggagcaggcgccaggaggcccagcgtctggggcgggtcctgcgcgctaagaaagggatggtggcggaggagtataacgcattcttctattctctggtgtcccaggatacacaggagatggcctattcaacaaagcgccagcggtttctagtggatcagggctattcctttaaggtgatcaccaagctcgcaggcatggaggaggaagaccttgccttttccactaaggaagaacagcagcagctcctccagaaggtgctcgccgcaaccgacctagacgctgaagaagaggtcgtggccggcgagttcggatcaagatcctcccaggcctccagaaggttcggcacaatgtctagcatgtccggggccgatgatactgtatatatggagtaccactcgagtcggagtaaggccccaagcaagcacgttcacccactgttcaaacggttccggaagtag

SEQ ID NO: 1890 - DNA, 2349 bp, Artificial Sequence
  derived and/or modified sequence
atgggcaagagggacagagctgaccgggacaagaagaagagcaggaagaggcactatgaagatgaagaagatgatgaagaagatgcccctggaaatgacccccaggaggccgtgcccagcgctgctgggaagcaggtggatgaaagtggcaccaaggtggatgaatatggagccaaggactaccgcctgcagatgcccctgaaggatgaccacaccagccggcccctgtgggtggccccagatggccacatcttcctggaggccttcagccctgtgtacaagtatgcccaggacttcctggtggccatcgccgagcctgtgtgccggcccacccacgtgcatgagtacaagctgacagcctacagcctgtatgctgctgtgtctgtgggcctgcagaccagtgacatcacagagtacctgaggaagctgagcaagacaggagtgcctgatggcatcatgcagttcatcaagctgtgcaccgtgtcctatggcaaggtgaagctggtgctgaagcacaaccgctactttgtggagagctgccacccagatgtgatccagcacctgctgcaggaccccgtcatccgggagtgccgcctgaggaacagcgagggggaggccacagagctgatcacagagaccttcaccagcaagagcgccatcagcaagacagctgagagcagcggcggccccagcaccagccgggtgacagacccccagggcaagagtgacatccccatggacctgtttgacttctatgagcagatggacaaggatgaggaggaggaggaggagacccagacagtgtcctttgaggtgaagcaggagatgattgaggagctgcagaagcgctgcatccacctggagtaccccctgctggccgagtatgacttcagaaatgattctgtgaacccagacatcaacatcgacctgaagcccacagctgtgctgcggccctaccaggagaagagcctgaggaagatgtttggaaatggccgggcccggtctggagtcatcgtgctgccctgtggggccggcaagagcctggtgggcgtgacagctgcctgcaccgtgaggaagcgctgcctggtgctgggcaacagcgctgtgtctgtggagcagtggaaggcccagttcaagatgtggagcaccattgatgacagccagatctgccgcttcaccagtgatgccaaggacaagcccatcggctgcagcgtggccatcagcacctacagcatgctgggccacaccaccaagaggtcctgggaggccgagcgggtgatggagtggctgaagacccaggagtggggcctgatgatcctggatgaggtgcacaccatcccagccaagatgttccggcgggtgctgaccatcgtgcaggcccactgcaagctgggcctgacagccaccctggtgagagaagatgacaagatcgtggacctgaacttcctgattggccccaagctgtatgaggccaactggatggagctgcagaacaacggctacatcgccaaggtgcagtgtgccgaggtgtggtgccccatgagccctgagttctaccgggagtatgtggccatcaagaccaagaagaggatcctgctgtacaccatgaaccccaacaagttccgggcctgccagttcctgatcaagttccatgaaagaagaaatgacaagatcatcgtgtttgctgacaacgtgtttgccctgaaggagtatgccatccggctgaacaagccctacatctacggccccaccagccagggcgagaggatgcagatcctgcagaacttcaagcacaaccccaagatcaacaccatcttcatcagcaaggtgggggacaccagctttgacctgcctgaggccaacgtgctgatccagatcagcagccatggaggcagccggcggcaggaggcccagaggctgggccgggtgctgcgggccaagaagggcatggtggccgaggagtacaatgccttcttctacagcctggtgtcccaggacacccaggagatggcctacagcaccaagaggcagcgcttcctggtggaccagggctacagcttcaaggtgatcaccaagctggccggcatggaggaggaggacctggccttcagcaccaaggaggagcagcagcagctgctgcagaaggtgctggccgccacagacctggatgctgaggaggaggtggtggccggggagtttggcagccgcagcagccaggccagccgccgcttcggcaccatgagctccatgtctggagcagatgacacagtgtacatggagtaccacagcagccgcagcaaggcccccagcaagcacgtgcaccccctcttcaagcgcttcaggaagtag

SEQ ID NO: 1891 - DNA, 2157 bp, Artificial Sequence
  derived and/or modified sequence
atgcccctgaaggatgaccacaccagccggcccctgtgggtggccccagatggccacatcttcctggaggccttcagccctgtgtacaagtatgcccaggacttcctggtggccatcgccgagcctgtgtgccggcccacccacgtgcatgagtacaagctgacagcctacagcctgtatgctgctgtgtctgtgggcctgcagaccagtgacatcacagagtacctgaggaagctgagcaagacaggagtgcctgatggcatcatgcagttcatcaagctgtgcaccgtgtcctatggcaaggtgaagctggtgctgaagcacaaccgctactttgtggagagctgccacccagatgtgatccagcacctgctgcaggaccccgtcatccgggagtgccgcctgaggaacagcgagggggaggccacagagctgatcacagagaccttcaccagcaagagcgccatcagcaagacagctgagagcagcggcggccccagcaccagccgggtgacagacccccagggcaagagtgacatccccatggacctgtttgacttctatgagcagatggacaaggatgaggaggaggaggaggagacccagacagtgtcctttgaggtgaagcaggagatgattgaggagctgcagaagcgctgcatccacctggagtaccccctgctggccgagtatgacttcagaaatgattctgtgaacccagacatcaacatcgacctgaagcccacagctgtgctgcggccctaccaggagaagagcctgaggaagatgtttggaaatggccgggcccggtctggagtcatcgtgctgccctgtggggccggcaagagcctggtgggcgtgacagctgcctgcaccgtgaggaagcgctgcctggtgctgggcaacagcgctgtgtctgtggagcagtggaaggcccagttcaagatgtggagcaccattgatgacagccagatctgccgcttcaccagtgatgccaaggacaagcccatcggctgcagcgtggccatcagcacctacagcatgctgggccacaccaccaagaggtcctgggaggccgagcgggtgatggagtggctgaagacccaggagtggggcctgatgatcctggatgaggtgcacaccatcccagccaagatgttccggcgggtgctgaccatcgtgcaggcccactgcaagctgggcctgacagccaccctggtgagagaagatgacaagatcgtggacctgaacttcctgattggccccaagctgtatgaggccaactggatggagctgcagaacaacggctacatcgccaaggtgcagtgtgccgaggtgtggtgccccatgagccctgagttctaccgggagtatgtggccatcaagaccaagaagaggatcctgctgtacaccatgaaccccaacaagttccgggcctgccagttcctgatcaagttccatgaaagaagaaatgacaagatcatcgtgtttgctgacaacgtgtttgccctgaaggagtatgccatccggctgaacaagccctacatctacggccccaccagccagggcgagaggatgcagatcctgcagaacttcaagcacaaccccaagatcaacaccatcttcatcagcaaggtgggggacaccagctttgacctgcctgaggccaacgtgctgatccagatcagcagccatggaggcagccggcggcaggaggcccagaggctgggccgggtgctgcgggccaagaagggcatggtggccgaggagtacaatgccttcttctacagcctggtgtcccaggacacccaggagatggcctacagcaccaagaggcagcgcttcctggtggaccagggctacagcttcaaggtgatcaccaagctggccggcatggaggaggaggacctggccttcagcaccaaggaggagcagcagcagctgctgcagaaggtgctggccgccacagacctggatgctgaggaggaggtggtggccggggagtttggcagccgcagcagccaggccagccgccgcttcggcaccatgagctccatgtctggagcagatgacacagtgtacatggagtaccacagcagccgcagcaaggcccccagcaagcacgtgcaccccctcttcaagcgcttcaggaagtag

SEQ ID NO: 1892 - DNA, 2349 bp, Artificial Sequence
  derived and/or modified sequence
atgggcaagcgggaccgggccgaccgggacaagaagaagagccggaagcggcattatgaggacgaagaagacgacgaggaagacgcccctggtaacgacccacaagaagcagtgcctagcgctgcagggaagcaagttgatgaatctggcacaaaggtggatgagtatggggccaaggattatcggctgcagatgcctctaaaggacgatcatacgagccggcctctgtgggtcgccccggacggacacattttccttgaagctttttcccctgtatataaatacgcccaggactttctcgtggctattgcagaacccgtttgccggcctactcatgttcacgagtacaagttgaccgcatattccctgtacgcagctgtgagcgtgggcctgcagacctccgacattaccgaatacctgcgcaagctgagtaaaactggagtgcccgatggcattatgcagttcatcaagttgtgcaccgtgagctatggcaaggttaaattggtgctgaagcacaacaggtacttcgtggaatcatgtcacccggacgtaattcagcatttgctccaggatcctgtaatccgtgagtgccggcttagaaattccgaaggcgaagccacagaattaattacggagactttcactagtaaaagtgccatctccaagacagctgagagctctgggggcccatccacgtcgagggtaacggatccccaagggaaatctgacattcctatggatctgtttgacttttatgagcagatggacaaagacgaagaagaagaggaggagacccaaactgtctctttcgaggtgaagcaggagatgatagaagaactccagaaacggtgtattcacttggagtatccattattagccgaatatgattttcggaatgacagtgtgaaccctgatatcaatattgacctcaaacctactgctgttctgagaccttatcaggaaaagagtttaagaaaaatgtttggaaacggtcgggcgagatcaggcgtaatcgttctcccatgtggcgccggcaagtcattagtgggtgtcactgctgcctgtacagttcgcaagcgctgtctggtgctgggtaactctgcagttagtgtggagcagtggaaagctcagttcaaaatgtggtctacaatcgacgactcccagatttgtcggttcacgtccgatgctaaggacaaacctattgggtgtagtgtcgctatttcaacctacagcatgttgggtcatactaccaagcgctcttgggaggccgagcgcgtgatggaatggttgaaaactcaagagtggggcctaatgattttggatgaggtgcacacaatcccagccaagatgttccgccgtgtcctcacaatcgtgcaggcgcactgtaagctggggctgaccgcaaccctcgtacgcgaagatgataagatcgtggatttgaactttctgattggtcccaaactatatgaggctaattggatggaacttcagaataacgggtacatcgccaaggttcagtgcgccgaggtatggtgtccaatgtcgcctgagttttaccgagaatatgtagctataaaaacaaagaagcgaattctgctgtacacaatgaatcctaataagtttagagcctgtcagtttctgataaagttccatgagcgccggaacgacaaaataatcgtgttcgcagataacgtgttcgctctcaaagagtacgcaatccggctgaataaaccctatatttatggcccaactagccagggcgagcgcatgcagatcttgcagaacttcaaacataaccctaaaatcaacaccatattcatatcaaaggtgggtgatacgagtttcgacctgcccgaggctaatgtactgatccagatcagttctcacggaggttccaggaggcaggaggcacaacgcctgggccgcgtgctgagagctaaaaagggtatggtcgctgaagagtacaatgctttcttttacagcctggtgagccaagatacacaggaaatggcatacagtactaagagacagaggtttctagtagaccaggggtactccttcaaagttataacaaagcttgccggtatggaagaggaagatttggccttcagtaccaaagaagaacagcagcaactgctgcagaaggtcctggctgctacggatttagacgcggaggaggaggtggtggcgggggaattcggcagcagaagctcacaagccagtcgccgatttggcacaatgagctctatgtccggagcagacgacacagtttacatggaataccatagttctcgcagcaaagccccctcgaaacatgtgcaccctctgttcaaacgctttcggaagtag

SEQ ID NO: 1893 - DNA, 2157 bp, Artificial Sequence
  derived and/or modified sequence
atgcccctgaaggacgaccacaccagccggcccctgtgggtggccccagacggccatattttcctggaagcttttagtcctgtgtacaaatacgcccaggactttttggtggccatagctgagccagtgtgcaggccaacacacgttcacgagtacaaactcacagcttacagcctgtacgccgctgtctcggtcggactgcaaacctctgatattaccgagtacctacgtaagctttccaaaactggggttcccgacggtattatgcagtttatcaagctgtgcaccgtatcatacggcaaggtgaagctcgttcttaaacataatcgctactttgtcgaatcctgccatccagacgtcatccaacatctcctgcaggaccctgtcatccgggagtgccgactacgcaactccgagggcgaggccaccgaactgatcaccgagactttcacttcgaagagtgcaatttcaaagacagctgagagcagtggcggcccctctactagccgcgtgactgaccctcagggtaaaagtgacattccaatggatttgttcgacttctatgagcagatggataaggacgaagaggaagaggaggaaacgcagacggtgtcatttgaggtgaagcaggaaatgattgaagagcttcagaagaggtgtattcacctcgagtaccctttactggccgagtacgatttccgtaatgacagcgtgaatcccgatattaacatagacttgaaaccaacagccgtgcttcggccgtaccaggagaagtcactgcgcaagatgtttggcaatggtagagcccgctccggggtcattgttttaccttgtggggcaggaaagtcactggtgggcgtgactgccgcatgtacggtcagaaagagatgcctcgtactgggcaacagtgcagtgtccgtagaacagtggaaagcccagtttaagatgtggtctaccatagatgacagccagatctgtcggttcacgagtgatgccaaagacaagcctataggctgttctgtggccatcagtacctatagtatgcttgggcatacaaccaaaagaagctgggaggcagaaagggttatggagtggcttaaaacccaggagtggggtctcatgattctggatgaggtccataccattcccgctaagatgttccgtcgggttctgactatcgtccaggcacattgcaagctaggcttgactgcaacgttagtgagggaggacgacaagatcgtagatcttaacttcctcatcgggccaaaactgtatgaagccaattggatggagctgcagaacaatggctatattgccaaggtccagtgtgccgaggtttggtgtccaatgtcacccgaattctatagggagtatgtggctataaaaacaaaaaagcggatcctcctgtacacaatgaaccccaacaagttcagagcctgccagtttctaatcaaatttcatgagcgacgcaacgataagatcattgtgttcgcggataatgtatttgccctgaaggaatatgccatcaggctcaataaaccttatatctacggtccgacatcacagggagaacggatgcagatcctacaaaattttaagcacaacccaaagatcaataccatttttatttccaaagttggggacacatctttcgacctaccagaggcgaatgtgcttatacagatttcatctcacggaggatccagacggcaagaggctcagcgcctaggacgggtcctgcgcgcaaagaagggcatggtagcagaggaatataatgcctttttctacagcctggtatcccaggatacccaagaaatggcctactctaccaaacgtcagcgatttcttgtggaccagggttatagcttcaaagttataaccaagctggccggaatggaagaagaggacttggccttcagtacaaaggaggagcagcagcagctccttcaaaaggtgctggctgccactgatctagacgcagaggaggaggtcgtcgctggagaatttggcagtaggagcagccaagcctcccggcggtttggtacgatgagctccatgtcaggtgctgatgacacagtgtatatggaatatcacagctcacggagtaaggctccatccaaacacgtacacccacttttcaaacggttcaggaagtag

SEQ ID NO: 1894 - DNA, 2349 bp, Artificial Sequence
  derived and/or modified sequence
atgggcaagcgagaccgggctgatcgagataagaagaagagtcggaagaggcattacgaggacgaggaggacgacgaggaggacgctcctggcaacgacccgcaagaagctgtgcctagtgcggctggaaaacaggtggacgagtctgggacgaaggtagatgaatacggagctaaggactaccgcctccagatgcccttaaaggatgatcacacatctagacccctctgggtggctcccgatggccatatctttttagaagctttcagccccgtttacaagtacgctcaggacttcctcgtcgccattgccgaacctgtgtgcagaccaactcacgtgcacgaatacaaattgaccgcttattcactctacgctgccgtgagtgtcggcctgcagacatcggacatcactgaatacctgcgcaagctgagcaagacgggggtgcctgacggcatcatgcagtttattaagctgtgtacagtcagctacggaaaagtgaagctcgttttgaaacataacagatacttcgtggagtcctgccaccctgatgtgattcagcatctgctgcaggatccggtgattagagagtgtcgtcttaggaacagcgagggggaagcaacggagctgataacagaaactttcaccagtaagtcagccattagcaagacagcggaaagctcagggggacctagtacatcaagggtgacggacccccagggaaaatcagacatccccatggacctgttcgacttttatgagcagatggataaggatgaggaggaggaggaggagacccaaacggttagtttcgaggttaaacaggaaatgattgaggagctgcaaaagcggtgcatccatttagagtatcccctgctagctgaatacgatttcaggaatgactcagtgaatccagacattaacatcgacctgaagccaacagcggtgcttcgcccataccaggagaagtctcttcgcaagatgtttggtaatgggcgagcccgatcaggggtaattgttctcccctgcggcgcaggaaagagcttagtgggggttacagctgcatgcacagtgcgaaaacgttgcctggtgctaggaaactccgccgtgagcgtcgagcagtggaaggctcagtttaaaatgtggtctactatagacgactctcaaatttgcagattcacgagtgacgctaaagataagcccatcggctgctccgtggcaatttccacttactctatgctggggcacaccaccaagcggagctgggaggcagagagagtaatggaatggcttaaaacgcaggagtggggcctcatgatccttgacgaggttcacactatcccagctaaaatgttcagaagagtcctcaccatcgtacaggcccactgtaagctggggttgacagccaccttggttcgggaagatgataaaattgttgatctgaacttcctgatagggccaaagctgtacgaagccaactggatggagctgcagaacaacggctacatagcgaaagttcagtgcgccgaggtctggtgtccaatgtctccagaattctaccgcgagtacgtggccattaaaactaaaaagcgaattctcctgtacaccatgaatccaaataaattccgtgcttgtcagttccttatcaaatttcacgaacgaaggaatgataaaatcatcgttttcgccgataacgtcttcgccttgaaagagtacgcaattcggctcaacaagccatacatttacggccctacctctcagggagagcgtatgcagatcctccagaacttcaaacacaatcccaaaatcaatacaatctttatctcgaaagtgggtgatacgtcctttgatttgccggaggccaatgtcctgattcaaatatcctcacacggagggtcgcgcagacaggaggcccagaggctggggagagtcttgagggcgaaaaagggcatggtggccgaagaatacaacgcatttttctatagtttagtgtcccaagatacacaagagatggcttacagtaccaagcgccaaagattcttagtggaccaagggtactcctttaaagttatcaccaagctggctggaatggaagaggaagaccttgctttcagtaccaaggaggagcagcaacagttgctgcagaaggtgctcgcagctaccgatcttgacgctgaggaggaagtggttgctggcgaattcgggagcagatcctcgcaggcatcacggaggtttggtaccatgagctccatgtccggagctgatgataccgtatacatggagtaccacagctcgaggagcaaagcgcctagtaagcacgtccaccccctgttcaaaaggtttcggaaatag

SEQ ID NO: 1895 - DNA, 2157 bp, Artificial Sequence
  derived and/or modified sequence
atgcctctgaaggacgatcacacttccagacccctgtgggttgccccagatggacatatcttcctggaggcttttagccctgtttataagtatgctcaggactttctcgttgccatcgccgaaccggtctgcagacctacccacgtacacgagtataaactgacagcttacagcttgtacgcagccgtgtcagtcggactgcagacgtctgacatcacagagtatttgaggaagttgagcaaaacaggagtacccgacggcatcatgcagttcatcaaattatgcacagtgtcttacggtaaggttaagttggtactcaagcacaatcgttactttgtggagtcctgccacccagatgttatccagcacctcctgcaggatccagttattcgggagtgccgactacgaaacagcgagggagaggccactgaacttataaccgagaccttcacatccaaatccgccatcagcaagacagcagaatcctctggcggaccgtctacatcccgggtgactgatccacagggaaagagcgatattccaatggacctgttcgatttttatgagcaaatggataaagatgaggaagaggaggaggaaacccagacggtatcattcgaagtcaagcaggagatgatcgaagaattacagaagagatgcatacaccttgagtacccacttttggccgagtatgatttccgcaacgacagtgtcaaccccgatattaacattgatctgaagccaacagccgtcttgaggccttaccaggaaaaaagcctgcggaaaatgttcgggaacgggagagcccgaagcggcgttatcgtgttaccatgtggtgccggtaaatctctggtgggagtaactgccgcttgtactgtcaggaaacgatgtctcgtgcttggcaactcggccgtctctgtggaacagtggaaggcgcagtttaaaatgtggagcaccattgacgatagccaaatctgtcgattcacgagtgacgccaaggacaagccaatcggttgcagcgttgccattagtacatacagtatgcttggacatacaaccaaacgctcctgggaagccgagagagtgatggagtggctgaagactcaggaatggggtctgatgattttggatgaagtacatacgattcccgcaaagatgttccgcagggtgttgacaattgttcaagctcattgtaaactagggctgacagctactctggtacgggaagacgacaagatcgtggatctcaactttctgatagggcctaaactctatgaggccaattggatggaactgcagaacaacggctatattgctaaggtgcagtgcgccgaagtctggtgtcctatgagccccgagttttacagggagtatgtggctattaaaacaaaaaaacgaatcctgctgtacactatgaatcccaacaagttccgggcatgccaatttctcattaagttccatgagcgcaggaatgataagatcatcgtcttcgccgacaacgtcttcgcgctcaaagaatatgccatcaggctgaacaagccttatatctacgggccaacttcgcaaggcgagagaatgcagatcctccaaaactttaagcacaaccccaagataaatacaatttttatcagtaaggtaggcgataccagtttcgatttacccgaggccaacgtgctcattcagatctcctctcacggaggctcgcgcagacaggaagctcagcgtctcggacgggtccttcgtgccaaaaaaggcatggtagctgaagagtacaatgcattcttttattccttagtatcccaggatacacaagagatggcttactccaccaaacggcagcggtttttggtggatcaggggtattcttttaaagtcatcactaagctggcaggcatggaagaagaagacctggcgttctctactaaggaagagcagcagcagcttctgcaaaaagtgctggcggcaacggacctcgacgccgaggaggaggtcgtggctggagagttcggcagtagatcttctcaggccagcagaaggttcggcacaatgtccagcatgtcaggggcagacgacacagtctacatggagtatcactcaagtagatctaaagcaccatctaaacacgtgcaccctctattcaaacggtttcgaaagtag

SEQ ID NO: 1896 - DNA, 2349 bp, Artificial Sequence
  derived and/or modified sequence
atgggcaagagagacagagccgacagagacaagaagaagagcagaaagagacactacgaggacgaggaggacgacgaggaggacgcccccggcaacgacccccaggaggccgtgcccagcgccgccggcaagcaggtggacgagagcggcaccaaggtggacgagtacggcgccaaggactacagactgcagatgcccctgaaggacgaccacaccagcagacccctgtgggtggcccccgacggccacatcttcctggaggccttcagccccgtgtacaagtacgcccaggacttcctggtggccatcgccgagcccgtgtgcagacccacccacgtgcacgagtacaagctgaccgcctacagcctgtacgccgccgtgagcgtgggcctgcagaccagcgacatcaccgagtacctgagaaagctgagcaagaccggcgtgcccgacggcatcatgcagttcatcaagctgtgcaccgtgagctacggcaaggtgaagctggtgctgaagcacaacagatacttcgtggagagctgccaccccgacgtgatccagcacctgctgcaggaccccgtgatcagagagtgcagactgagaaacagcgagggcgaggccaccgagctgatcaccgagaccttcaccagcaagagcgccatcagcaagaccgccgagagcagcggcggccccagcaccagcagagtgaccgacccccagggcaagagcgacatccccatggacctgttcgacttctacgagcagatggacaaggacgaggaggaggaggaggagacccagaccgtgagcttcgaggtgaagcaggagatgatcgaggagctgcagaagagatgcatccacctggagtaccccctgctggccgagtacgacttcagaaacgacagcgtgaaccccgacatcaacatcgacctgaagcccaccgccgtgctgagaccctaccaggagaagagcctgagaaagatgttcggcaacggcagagccagaagcggcgtgatcgtgctgccctgcggcgccggcaagagcctggtgggcgtgaccgccgcctgcaccgtgagaaagagatgcctggtgctgggcaacagcgccgtgagcgtggagcagtggaaggcccagttcaagatgtggagcaccatcgacgacagccagatctgcagattcaccagcgacgccaaggacaagcccatcggctgcagcgtggccatcagcacctacagcatgctgggccacaccaccaagagaagctgggaggccgagagagtgatggagtggctgaagacccaggagtggggcctgatgatcctggacgaggtgcacaccatccccgccaagatgttcagaagagtgctgaccatcgtgcaggcccactgcaagctgggcctgaccgccaccctggtgagagaggacgacaagatcgtggacctgaacttcctgatcggccccaagctgtacgaggccaactggatggagctgcagaacaacggctacatcgccaaggtgcagtgcgccgaggtgtggtgccccatgagccccgagttctacagagagtacgtggccatcaagaccaagaagagaatcctgctgtacaccatgaaccccaacaagttcagagcctgccagttcctgatcaagttccacgagagaagaaacgacaagatcatcgtgttcgccgacaacgtgttcgccctgaaggagtacgccatcagactgaacaagccctacatctacggccccaccagccagggcgagagaatgcagatcctgcagaacttcaagcacaaccccaagatcaacaccatcttcatcagcaaggtgggcgacaccagcttcgacctgcccgaggccaacgtgctgatccagatcagcagccacggcggcagcagaagacaggaggcccagagactgggcagagtgctgagagccaagaagggcatggtggccgaggagtacaacgccttcttctacagcctggtgagccaggacacccaggagatggcctacagcaccaagagacagagattcctggtggaccagggctacagcttcaaggtgatcaccaagctggccggcatggaggaggaggacctggccttcagcaccaaggaggagcagcagcagctgctgcagaaggtgctggccgccaccgacctggacgccgaggaggaggtggtggccggcgagttcggcagcagaagcagccaggccagcagaagattcggcaccatgagcagcatgagcggcgccgacgacaccgtgtacatggagtaccacagcagcagaagcaaggcccccagcaagcacgtgcaccccctgttcaagagattcagaaagtag

SEQ ID NO: 1897 - DNA, 2157 bp, Artificial Sequence
  derived and/or modified sequence
atgcccctgaaggacgaccacaccagcagacccctgtgggtggcccccgacggccacatcttcctggaggccttcagccccgtgtacaagtacgcccaggacttcctggtggccatcgccgagcccgtgtgcagacccacccacgtgcacgagtacaagctgaccgcctacagcctgtacgccgccgtgagcgtgggcctgcagaccagcgacatcaccgagtacctgagaaagctgagcaagaccggcgtgcccgacggcatcatgcagttcatcaagctgtgcaccgtgagctacggcaaggtgaagctggtgctgaagcacaacagatacttcgtggagagctgccaccccgacgtgatccagcacctgctgcaggaccccgtgatcagagagtgcagactgagaaacagcgagggcgaggccaccgagctgatcaccgagaccttcaccagcaagagcgccatcagcaagaccgccgagagcagcggcggccccagcaccagcagagtgaccgacccccagggcaagagcgacatccccatggacctgttcgacttctacgagcagatggacaaggacgaggaggaggaggaggagacccagaccgtgagcttcgaggtgaagcaggagatgatcgaggagctgcagaagagatgcatccacctggagtaccccctgctggccgagtacgacttcagaaacgacagcgtgaaccccgacatcaacatcgacctgaagcccaccgccgtgctgagaccctaccaggagaagagcctgagaaagatgttcggcaacggcagagccagaagcggcgtgatcgtgctgccctgcggcgccggcaagagcctggtgggcgtgaccgccgcctgcaccgtgagaaagagatgcctggtgctgggcaacagcgccgtgagcgtggagcagtggaaggcccagttcaagatgtggagcaccatcgacgacagccagatctgcagattcaccagcgacgccaaggacaagcccatcggctgcagcgtggccatcagcacctacagcatgctgggccacaccaccaagagaagctgggaggccgagagagtgatggagtggctgaagacccaggagtggggcctgatgatcctggacgaggtgcacaccatccccgccaagatgttcagaagagtgctgaccatcgtgcaggcccactgcaagctgggcctgaccgccaccctggtgagagaggacgacaagatcgtggacctgaacttcctgatcggccccaagctgtacgaggccaactggatggagctgcagaacaacggctacatcgccaaggtgcagtgcgccgaggtgtggtgccccatgagccccgagttctacagagagtacgtggccatcaagaccaagaagagaatcctgctgtacaccatgaaccccaacaagttcagagcctgccagttcctgatcaagttccacgagagaagaaacgacaagatcatcgtgttcgccgacaacgtgttcgccctgaaggagtacgccatcagactgaacaagccctacatctacggccccaccagccagggcgagagaatgcagatcctgcagaacttcaagcacaaccccaagatcaacaccatcttcatcagcaaggtgggcgacaccagcttcgacctgcccgaggccaacgtgctgatccagatcagcagccacggcggcagcagaagacaggaggcccagagactgggcagagtgctgagagccaagaagggcatggtggccgaggagtacaacgccttcttctacagcctggtgagccaggacacccaggagatggcctacagcaccaagagacagagattcctggtggaccagggctacagcttcaaggtgatcaccaagctggccggcatggaggaggaggacctggccttcagcaccaaggaggagcagcagcagctgctgcagaaggtgctggccgccaccgacctggacgccgaggaggaggtggtggccggcgagttcggcagcagaagcagccaggccagcagaagattcggcaccatgagcagcatgagcggcgccgacgacaccgtgtacatggagtaccacagcagcagaagcaaggcccccagcaagcacgtgcaccccctgttcaagagattcagaaagtag

SEQ ID NO: 1898 - protein, 1186 aa, Artificial Sequence
  derived and/or modified sequence
MGVQGLWKLLECSGRQVSPEALEGKILAVDISIWLNQALKGVRDRHGNSIENPHLLTLFHRLCKLLFFRIRPIFVFDGDAPLLKKQTLVKRRQRKDLASSDSRKTTEKLLKTFLKRQAIKTAFRSKRDEALPSLTQVRRENDLYVLPPLQEEEKHSSEEEDEKEWQERMNQKQALQEEFFHNPQAIDIESEDFSSLPPEVKHEILTDMKEFTKRRRTLFEAMPEESDDFSQYQLKGLLKKNYLNQHIEHVQKEMNQQHSGHIRRQYEDEGGFLKEVESRRVVSEDTSHYILIKGIQAKTVAEVDSESLPSSSKMHGMSFDVKSSPCEKLKTEKEPDATPPSPRTLLAMQAALLGSSSEEELESENRRQARGRNAPAAVDEGSISPRTLSAIKRALDDDEDVKVCAGDDVQTGGPGAEEMRINSSTENSDEGLKVRDGKGIPFTATLASSSVNSAEEHVASTNEGREPTDSVPKEQMSLVHVGTEAFPISDESMIKDRKDRLPLESAVVRHSDAPGLPNGRELTPASPTCTNSVSKNETHAEVLEQQNELCPYESKFDSSLLSSDDETKCKPNSASEVIGPVSLQETSSIVSVPSEAVDNVENVVSFNAKEHENFLETIQEQQTTESAGQDLISIPKAVEPMEIDSEESESDGSFIEVQSVISDEELQAEFPETSKPPSEQGEEELVGTREGEAPAESESLLRDNSERDDVDGEPQEAEKDAEDSLHEWQDINLEELETLESNLLAQQNSLKAQKQQQERIAATVTGQMFLESQELLRLFGIPYIQAPMEAEAQCAILDLTDQTSGTITDDSDIWLFGARHVYRNFFNKNKFVEYYQYVDFHNQLGLDRNKLINLAYLLGSDYTEGIPTVGCVTAMEILNEFPGHGLEPLLKFSEWWHEAQKNPKIRPNPHDTKVKKKLRTLQLTPGFPNPAVAEAYLKPVVDDSKGSFLWGKPDLDKIREFCQRYFGWNRTKTDESLFPVLKQLDAQQTQLRIDSFFRLAQQEKEDAKRIKSQRLNRAVTCMLRKEKEAAASEIEAVSVAMEKEFELLDKAKGKTQKRGITNTLEESSSLKRKRLSDSKGKNTCGGFLGETCLSESSDGSSSEDAESSSLMNVQRRTAAKEPKTSASDSQNSVKEAPVKNGGATTSSSSDSDDDGGKEKMVLVTARSVFGKKRRKLRRARGRKRKT

SEQ ID NO: 1899 - protein, 419 aa, Artificial Sequence
  derived and/or modified sequence
MFLESQELLRLFGIPYIQAPMEAEAQCAILDLTDQTSGTITDDSDIWLFGARHVYRNFFNKNKFVEYYQYVDFHNQLGLDRNKLINLAYLLGSDYTEGIPTVGCVTAMEILNEFPGHGLEPLLKFSEWWHEAQKNPKIRPNPHDTKVKKKLRTLQLTPGFPNPAVAEAYLKPVVDDSKGSFLWGKPDLDKIREFCQRYFGWNRTKTDESLFPVLKQLDAQQTQLRIDSFFRLAQQEKEDAKRIKSQRLNRAVTCMLRKEKEAAASEIEAVSVAMEKEFELLDKAKGKTQKRGITNTLEESSSLKRKRLSDSKGKNTCGGFLGETCLSESSDGSSSEDAESSSLMNVQRRTAAKEPKTSASDSQNSVKEAPVKNGGATTSSSSDSDDDGGKEKMVLVTARSVFGKKRRKLRRARGRKRKT

SEQ ID NO: 1900 - protein, 1018 aa, Artificial Sequence
  derived and/or modified sequence
MNQKQALQEEFFHNPQAIDIESEDFSSLPPEVKHEILTDMKEFTKRRRTLFEAMPEESDDFSQYQLKGLLKKNYLNQHIEHVQKEMNQQHSGHIRRQYEDEGGFLKEVESRRVVSEDTSHYILIKGIQAKTVAEVDSESLPSSSKMHGMSFDVKSSPCEKLKTEKEPDATPPSPRTLLAMQAALLGSSSEEELESENRRQARGRNAPAAVDEGSISPRTLSAIKRALDDDEDVKVCAGDDVQTGGPGAEEMRINSSTENSDEGLKVRDGKGIPFTATLASSSVNSAEEHVASTNEGREPTDSVPKEQMSLVHVGTEAFPISDESMIKDRKDRLPLESAVVRHSDAPGLPNGRELTPASPTCTNSVSKNETHAEVLEQQNELCPYESKFDSSLLSSDDETKCKPNSASEVIGPVSLQETSSIVSVPSEAVDNVENVVSFNAKEHENFLETIQEQQTTESAGQDLISIPKAVEPMEIDSEESESDGSFIEVQSVISDEELQAEFPETSKPPSEQGEEELVGTREGEAPAESESLLRDNSERDDVDGEPQEAEKDAEDSLHEWQDINLEELETLESNLLAQQNSLKAQKQQQERIAATVTGQMFLESQELLRLFGIPYIQAPMEAEAQCAILDLTDQTSGTITDDSDIWLFGARHVYRNFFNKNKFVEYYQYVDFHNQLGLDRNKLINLAYLLGSDYTEGIPTVGCVTAMEILNEFPGHGLEPLLKFSEWWHEAQKNPKIRPNPHDTKVKKKLRTLQLTPGFPNPAVAEAYLKPVVDDSKGSFLWGKPDLDKIREFCQRYFGWNRTKTDESLFPVLKQLDAQQTQLRIDSFFRLAQQEKEDAKRIKSQRLNRAVTCMLRKEKEAAASEIEAVSVAMEKEFELLDKAKGKTQKRGITNTLEESSSLKRKRLSDSKGKNTCGGFLGETCLSESSDGSSSEDAESSSLMNVQRRTAAKEPKTSASDSQNSVKEAPVKNGGATTSSSSDSDDDGGKEKMVLVTARSVFGKKRRKLRRARGRKRKT

SEQ ID NO: 1901 - protein, 232 aa, Artificial Sequence
  derived and/or modified sequence
MGVQGLWKLLECSGRQVSPEALEGKILAVDISIWLNQALKGVRDRHGNSIENPHLLTLFHRLCKLLFFRIRPIFVFDGDAPLLKKQTLVKRRQRKDLASSDSRKTTEKLLKTFLKRQAIKTAFRSKRDEALPSLTQVRRENDLYVLPPLQEEEKHSSEEEDEKEWQERMNQKQALQEEFFHNPQAIDIESEDFSSLPPEVKHEILTDMKEFTKRRRTLFEAMPEVYLPLLQP

SEQ ID NO: 1902 - DNA, 3561 bp, Artificial Sequence
  derived and/or modified sequence
atgggcgtgcagggcctgtggaagctgctggagtgcagcggcagacaggtgagccccgaggccctggagggcaagatcctggccgtggacatcagcatctggctgaaccaggccctgaagggcgtgagagacagacacggcaacagcatcgagaacccccacctgctgaccctgttccacagactgtgcaagctgctgttcttcagaatcagacccatcttcgtgttcgacggcgacgcccccctgctgaagaagcagaccctggtgaagagaagacagagaaaggacctggccagcagcgacagcagaaagaccaccgagaagctgctgaagaccttcctgaagagacaggccatcaagaccgccttcagaagcaagagagacgaggccctgcccagcctgacccaggtgagaagagagaacgacctgtacgtgctgccccccctgcaggaggaggagaagcacagcagcgaggaggaggacgagaaggagtggcaggagagaatgaaccagaagcaggccctgcaggaggagttcttccacaacccccaggccatcgacatcgagagcgaggacttcagcagcctgccccccgaggtgaagcacgagatcctgaccgacatgaaggagttcaccaagagaagaagaaccctgttcgaggccatgcccgaggagagcgacgacttcagccagtaccagctgaagggcctgctgaagaagaactacctgaaccagcacatcgagcacgtgcagaaggagatgaaccagcagcacagcggccacatcagaagacagtacgaggacgagggcggcttcctgaaggaggtggagagcagaagagtggtgagcgaggacaccagccactacatcctgatcaagggcatccaggccaagaccgtggccgaggtggacagcgagagcctgcccagcagcagcaagatgcacggcatgagcttcgacgtgaagagcagcccctgcgagaagctgaagaccgagaaggagcccgacgccaccccccccagccccagaaccctgctggccatgcaggccgccctgctgggcagcagcagcgaggaggagctggagagcgagaacagaagacaggccagaggcagaaacgcccccgccgccgtggacgagggcagcatcagccccagaaccctgagcgccatcaagagagccctggacgacgacgaggacgtgaaggtgtgcgccggcgacgacgtgcagaccggcggccccggcgccgaggagatgagaatcaacagcagcaccgagaacagcgacgagggcctgaaggtgagagacggcaagggcatccccttcaccgccaccctggccagcagcagcgtgaacagcgccgaggagcacgtggccagcaccaacgagggcagagagcccaccgacagcgtgcccaaggagcagatgagcctggtgcacgtgggcaccgaggccttccccatcagcgacgagagcatgatcaaggacagaaaggacagactgcccctggagagcgccgtggtgagacacagcgacgcccccggcctgcccaacggcagagagctgacccccgccagccccacctgcaccaacagcgtgagcaagaacgagacccacgccgaggtgctggagcagcagaacgagctgtgcccctacgagagcaagttcgacagcagcctgctgagcagcgacgacgagaccaagtgcaagcccaacagcgccagcgaggtgatcggccccgtgagcctgcaggagaccagcagcatcgtgagcgtgcccagcgaggccgtggacaacgtggagaacgtggtgagcttcaacgccaaggagcacgagaacttcctggagaccatccaggagcagcagaccaccgagagcgccggccaggacctgatcagcatccccaaggccgtggagcccatggagatcgacagcgaggagagcgagagcgacggcagcttcatcgaggtgcagagcgtgatcagcgacgaggagctgcaggccgagttccccgagaccagcaagccccccagcgagcagggcgaggaggagctggtgggcaccagagagggcgaggcccccgccgagagcgagagcctgctgagagacaacagcgagagagacgacgtggacggcgagccccaggaggccgagaaggacgccgaggacagcctgcacgagtggcaggacatcaacctggaggagctggagaccctggagagcaacctgctggcccagcagaacagcctgaaggcccagaagcagcagcaggagagaatcgccgccaccgtgaccggccagatgttcctggagagccaggagctgctgagactgttcggcatcccctacatccaggcccccatggaggccgaggcccagtgcgccatcctggacctgaccgaccagaccagcggcaccatcaccgacgacagcgacatctggctgttcggcgccagacacgtgtacagaaacttcttcaacaagaacaagttcgtggagtactaccagtacgtggacttccacaaccagctgggcctggacagaaacaagctgatcaacctggcctacctgctgggcagcgactacaccgagggcatccccaccgtgggctgcgtgaccgccatggagatcctgaacgagttccccggccacggcctggagcccctgctgaagttcagcgagtggtggcacgaggcccagaagaaccccaagatcagacccaacccccacgacaccaaggtgaagaagaagctgagaaccctgcagctgacccccggcttccccaaccccgccgtggccgaggcctacctgaagcccgtggtggacgacagcaagggcagcttcctgtggggcaagcccgacctggacaagatcagagagttctgccagagatacttcggctggaacagaaccaagaccgacgagagcctgttccccgtgctgaagcagctggacgcccagcagacccagctgagaatcgacagcttcttcagactggcccagcaggagaaggaggacgccaagagaatcaagagccagagactgaacagagccgtgacctgcatgctgagaaaggagaaggaggccgccgccagcgagatcgaggccgtgagcgtggccatggagaaggagttcgagctgctggacaaggccaagggcaagacccagaagagaggcatcaccaacaccctggaggagagcagcagcctgaagagaaagagactgagcgacagcaagggcaagaacacctgcggcggcttcctgggcgagacctgcctgagcgagagcagcgacggcagcagcagcgaggacgccgagagcagcagcctgatgaacgtgcagagaagaaccgccgccaaggagcccaagaccagcgccagcgacagccagaacagcgtgaaggaggcccccgtgaagaacggcggcgccaccaccagcagcagcagcgacagcgacgacgacggcggcaaggagaagatggtgctggtgaccgccagaagcgtgttcggcaagaagagaagaaagctgagaagagccagaggcagaaagagaaagacctag

SEQ ID NO: 1903 - DNA, 1260 bp, Artificial Sequence
  derived and/or modified sequence
atgttcctggagagccaggagctgctgagactgttcggcatcccctacatccaggcccccatggaggccgaggcccagtgcgccatcctggacctgaccgaccagaccagcggcaccatcaccgacgacagcgacatctggctgttcggcgccagacacgtgtacagaaacttcttcaacaagaacaagttcgtggagtactaccagtacgtggacttccacaaccagctgggcctggacagaaacaagctgatcaacctggcctacctgctgggcagcgactacaccgagggcatccccaccgtgggctgcgtgaccgccatggagatcctgaacgagttccccggccacggcctggagcccctgctgaagttcagcgagtggtggcacgaggcccagaagaaccccaagatcagacccaacccccacgacaccaaggtgaagaagaagctgagaaccctgcagctgacccccggcttccccaaccccgccgtggccgaggcctacctgaagcccgtggtggacgacagcaagggcagcttcctgtggggcaagcccgacctggacaagatcagagagttctgccagagatacttcggctggaacagaaccaagaccgacgagagcctgttccccgtgctgaagcagctggacgcccagcagacccagctgagaatcgacagcttcttcagactggcccagcaggagaaggaggacgccaagagaatcaagagccagagactgaacagagccgtgacctgcatgctgagaaaggagaaggaggccgccgccagcgagatcgaggccgtgagcgtggccatggagaaggagttcgagctgctggacaaggccaagggcaagacccagaagagaggcatcaccaacaccctggaggagagcagcagcctgaagagaaagagactgagcgacagcaagggcaagaacacctgcggcggcttcctgggcgagacctgcctgagcgagagcagcgacggcagcagcagcgaggacgccgagagcagcagcctgatgaacgtgcagagaagaaccgccgccaaggagcccaagaccagcgccagcgacagccagaacagcgtgaaggaggcccccgtgaagaacggcggcgccaccaccagcagcagcagcgacagcgacgacgacggcggcaaggagaagatggtgctggtgaccgccagaagcgtgttcggcaagaagagaagaaagctgagaagagccagaggcagaaagagaaagacctag

SEQ ID NO: 1904 - DNA, 699 bp, Artificial Sequence
  derived and/or modified sequence
atgggcgtgcagggcctgtggaagctgctggagtgcagcggcagacaggtgagccccgaggccctggagggcaagatcctggccgtggacatcagcatctggctgaaccaggccctgaagggcgtgagagacagacacggcaacagcatcgagaacccccacctgctgaccctgttccacagactgtgcaagctgctgttcttcagaatcagacccatcttcgtgttcgacggcgacgcccccctgctgaagaagcagaccctggtgaagagaagacagagaaaggacctggccagcagcgacagcagaaagaccaccgagaagctgctgaagaccttcctgaagagacaggccatcaagaccgccttcagaagcaagagagacgaggccctgcccagcctgacccaggtgagaagagagaacgacctgtacgtgctgccccccctgcaggaggaggagaagcacagcagcgaggaggaggacgagaaggagtggcaggagagaatgaaccagaagcaggccctgcaggaggagttcttccacaacccccaggccatcgacatcgagagcgaggacttcagcagcctgccccccgaggtgaagcacgagatcctgaccgacatgaaggagttcaccaagagaagaagaaccctgttcgaggccatgcccgaggtgtacctgcccctgctgcagccctag

SEQ ID NO: 1905 - DNA, 3561 bp, Artificial Sequence
  derived and/or modified sequence
atgggggtgcaaggactctggaagctgctggaatgctccgggcgacaggtatcacctgaggccttggaggggaaaattttggcggtggatatctccatttggctaaatcaagctctgaaaggcgttcgagacaggcacgggaattccatcgagaaccctcacctcctgactctgttccaccgactctgtaagctgctcttcttcagaatccgcccaatctttgtgttcgacggagacgcccctctacttaagaagcaaacactcgtgaagcgtaggcaacgaaaggatttggcatccagtgattctagaaagacaacagagaaattgctcaaaacattccttaaaagacaggcaatcaaaacagcatttcggagtaaaagagatgaggcactcccctccctcactcaggtacggcgggagaacgatttatatgtcttacctcccttacaggaagaagaaaagcattcatcagaagaagaggacgagaaagagtggcaggagcggatgaaccaaaaacaggcacttcaggaggagttcttccacaatccacaggccatcgacatagagtctgaagacttctcaagcctgccccccgaggtgaaacacgaaatcctgactgacatgaaagaatttactaagcggagacgcacactcttcgaggcgatgcctgaagagtccgacgacttctcgcaataccagctcaaaggacttttgaagaaaaactatttaaatcagcacattgaacatgtgcaaaaggagatgaatcagcagcactcagggcacatccgccggcaatatgaggacgagggaggattccttaaggaagttgagagtaggagagtcgtctctgaggataccagccactacatcctcatcaaaggtattcaggccaaaactgtcgccgaagtggactccgagtcattgcccagtagttccaaaatgcacggcatgagcttcgatgtgaagtctagcccttgcgaaaaacttaagaccgaaaaggaacccgacgctacacctccatcgcccagaacgctgctcgccatgcaagccgcactattgggctcctcttctgaggaagaactcgaaagtgagaatcggaggcaggccagagggagaaacgccccggccgcggtggacgagggctctatctcgccaagaacactttccgcaattaaaagggctctcgatgacgacgaagacgtgaaggtatgcgcaggtgatgacgtccaaactgggggacccggcgctgaagaaatgaggattaatagcagcacagaaaattccgacgaaggtcttaaggtcagagacgggaagggcataccgtttaccgctacgctagctagttcttcggtaaattcagccgaggagcacgtcgctagcacaaatgaggggcgagaacctactgacagtgtcccaaaggagcagatgtccctcgtgcatgtgggaacagaggcatttcctatctcagatgaatccatgatcaaggaccgaaaggatagattacccttggaaagcgccgtggtgagacactctgacgctcctggcctcccaaatggacgagaactgacccctgcaagtcctacatgcaccaactctgtttcaaaaaacgagactcacgctgaggtcttagaacagcaaaacgagctgtgtccttacgaaagcaaattcgattcatctctgttgagcagtgacgacgagacaaagtgtaaaccaaattcggcaagtgaggttatcggcccggtgtccttgcaggaaacttcctctatcgttagtgtgcccagcgaagctgtggacaatgtggaaaacgtggtttcattcaatgcaaaggagcatgagaactttctcgagactattcaagaacagcagacaactgagagtgctggacaggatttgatttccatccccaaagcggttgagcccatggaaatagactccgaagaaagcgagtctgacggttcctttatagaagtgcagtccgtcatctccgatgaagagctgcaggccgagttccccgagacatctaagccaccttcggagcagggggaagaagaactggtaggtacgagggaaggcgaggctccagctgaatcagaatcgcttctgcgtgacaactcagagagggacgacgtagatggagagccacaggaggcagagaaagacgctgaggatagtctacacgagtggcaggacatcaatctggaggaactcgagacattggagtccaaccttctggcccagcagaacagtctgaaggcacagaaacagcagcaggagcggatcgcggccaccgtgaccggtcagatgttcctcgagtcacaggagctgctgcgactctttggcattccgtacatccaggccccaatggaggctgaggcgcaatgtgctatacttgaccttaccgatcagacgtctggcaccatcacggatgattctgacatctggctgttcggcgccaggcacgtctatcgcaactttttcaacaagaacaaattcgttgaatactaccagtacgtcgacttccacaatcaattaggcttagatagaaataagctaatcaacctcgcctacctactgggcagcgactataccgaaggcatccctaccgtcggatgtgtgaccgcaatggagattctcaatgaatttcccggccacgggctagagccgctgttaaaattttctgaatggtggcacgaggcacagaaaaaccctaaaatccgcccgaatccccatgacacaaaagtgaaaaaaaagctcagaaccctgcagcttacccctgggttccccaaccccgctgtcgcagaagcatacttaaagcctgtggtggatgattccaaaggttctttcctgtggggcaagcctgatctcgataaaatcagagagttttgtcagcgctattttgggtggaaccgcaccaagaccgacgagtcgctctttccagtcctgaagcagctagacgctcagcaaacgcagctcaggattgactctttctttcggcttgctcagcaggagaaagaagacgccaagcgcatcaagagccaaaggcttaacagggccgtgacctgcatgctgaggaaggaaaaggaggcagccgcctccgagatcgaagctgtgtcggttgccatggagaaagaatttgaacttttggacaaagcgaaggggaaaacccaaaagcgaggcattaccaacaccttggaggaatctagcagcctgaagcgcaaaaggctgtctgactctaaaggcaaaaacacttgtggaggtttcttgggagagacatgcctatctgagagttccgatggcagctcttctgaagacgccgaatccagctccctcatgaacgtgcagcggcggacagctgccaaagaacccaagacatcagcctcagacagccagaattccgtgaaggaagcccctgttaagaatggcggggctaccacttcttcatcaagcgacagcgacgacgatggtggaaaggagaaaatggttctggttaccgctagatctgtgtttggcaagaaaaggagaaagctgcgcagagccagagggcgcaaacgtaagacctag

SEQ ID NO: 1906 - DNA, 1260 bp, Artificial Sequence
  derived and/or modified sequence
atgttcctcgagtctcaggaactgctgcgtctatttggcatcccatatattcaggcacctatggaagctgaagcccagtgcgccatcctggatttaacagaccagactagcggtactatcaccgatgactccgacatttggctgtttggcgcgcgacacgtctatcggaatttcttcaacaagaataaattcgttgagtattaccaatatgtagattttcataatcagctgggcctcgaccgcaacaagcttattaacctggcatatctgcttggatccgattataccgagggaatccccacagtgggctgtgttacagccatggagatcctgaatgagttcccagggcacggacttgagcccttactgaaattttctgagtggtggcatgaggcccaaaagaaccccaagattcgtcctaatccacacgatacaaaagtgaagaaaaagctgcgcactctgcagctgacgccgggctttccaaatcctgcagtggccgaggcatacctcaaaccagttgtagatgactcaaagggatcttttctgtggggcaaaccagatcttgataagatcagagaattctgccaacgctatttcgggtggaaccggacaaagactgacgagtcactgtttcccgtcttgaagcagctggacgcccagcagactcagctgcgcatcgatagcttcttccgacttgcccagcaggaaaaggaggatgcgaagcggattaaaagtcagagactgaacagggccgtgacctgcatgcttagaaaagaaaaggaggctgccgcctccgaaatagaagcagtcagcgtagccatggaaaaagaatttgagctgctagacaaggctaaaggcaagactcaaaagagaggaattacaaatactcttgaggagtcatcgtccctgaagaggaaacgactgtccgactccaagggtaagaatacctgtggagggttcttgggggaaacttgtctgagcgaaagttccgacgggtcttcaagcgaagatgctgagagcagtagccttatgaatgttcagaggaggaccgctgctaaggagccaaaaacctcagcatccgattcacagaactccgtcaaggaggcccctgtgaaaaacggaggcgctaccacatcttccagttccgatagtgacgatgacggcgggaaggaaaagatggtactggtgaccgcccggtcggtcttcggaaagaagcgtaggaagcttagacgagcacgtggcaggaaaagaaagacatag

SEQ ID NO: 1907 - DNA, 699 bp, Artificial Sequence
  derived and/or modified sequence
atgggagtgcagggtctctggaaactcctcgaatgtagtggaaggcaggtgagccccgaggcactcgagggaaaaatcctcgccgtcgacatcagtatctggttaaatcaagcactcaaaggagtgagagatcgccacggtaatagcatcgaaaatccccatcttctcacattgttccaccggctttgtaagctgctgttctttaggatccggccaatcttcgtgttcgacggcgatgctcctctcctcaagaagcagacattggtgaaacgcagacagcgaaaggacctcgcgtcatcagactctaggaagacaactgagaagttgttgaaaacctttctcaaaaggcaagcaatcaagactgcttttcggagtaaaagggatgaggctctgccttccctcacccaggtccggcgtgaaaatgatctgtacgttctcccgcctctgcaggaagaggagaagcatagttctgaggaggaggacgaaaaagaatggcaagaacgaatgaaccagaagcaagctcttcaggaagaattcttccacaatccacaagcgattgacattgagtcagaagattttagctctctgcctcccgaggtcaagcatgaaatactaacagacatgaaggagttcacaaagaggcggcgaacgctattcgaagctatgccagaggtgtatttacccttgctacaaccctag

SEQ ID NO: 1908 - DNA, 5076 bp, Artificial Sequence
  derived and/or modified sequence
tttgccaacgttaaggacgcgcagctgtgacacagccccaggaagtccagatgacatgtgcccaaggtggttggggcacagattggttttatacattttagggagacaggagacatcaatcaacatatgtaagtacactggttccttccagaaaggtggggacaactcggaagcaggaagggcttctaggtcacaggtagatgagagacaaaaggctgcatacgagtttctgataagcctttccaaaggagacaatcagaatatgcatctatctcagtgagcagaaggatgactgactagaatgggaggcaggttttgccctgagcagttcccagcttgacttttcccttttgcttagtaattttgggaccctaacattttcacaggctttaaattttattattctttagttactacgtgctagcatataaataaatagtacaaaaccaagaaggcatccaccttttggttgtctcttcacgtgtaaaacaacactttgtgttaagtatcttcacacacggcggcgcaaaggtagaaaccgatactaaaaaagcgtgtagaaaatagttcccagcctgggcaacacagggagacctcatttctacaaaaataattcgccaagcatagtggtgcgcacctgcggtcccagctacttgagaggctgagatgggaaagttgcttgagctcgggcagcaggagttccaggctgcagtgagctaagaatgcgccactggactccagtatgggcgacagcgtgagaccctgtctcaaacaaaaacaaaagcccgttactccaccaagaaggcgcttttgcacattgttttaatgcttaacgccttcaggatgccagcgtgacggaagcaagtaaccaccaaggcatcaccactggcgctaaacttctcacttccggagtgctgcaagcgcagaaaatatacgtcatgtgcggaggcggagcttccgccctgcgcgtcgtattagacggaaaccgagcgggcccatttttcatgggtttgcggacccaccagcgaaggcgggaggtgtcgcagggacatcttctggctgtttccgtcgcctgcgtggcccttgcaccccggtcttccattagcggcgcagacgtttgggcctaagcgctgggcgaggcgaggccctgcccctccccgccaacggccattctctggacctgtctttcttccgggaggcggtgacagctgctgagacgtgttgcagccagagtctctccgctttaatgcgctcccattagtgccgtcccccactggaaaaccgtggcttctgtattatttgccatctttgttgtgtaggagcagggagggcttcctcccggggtcctaggcggcggtgcagtccgtcgtagaagaattagagtagaagttgtcggggtccgctcttaggacgcagccgcctcatgggggtccaggggctctggaagctgctggagtgctccgggcggcaggtcagccccgaagcgctggaagggaagatcctggctgttgatattagcatttggttaaaccaagcacttaaaggagtccgggatcgccatgggaactcaatagaaaatcctcatcttctcactttgtttcatcggctctgcaaactcttattttttcgaattcgtcctatttttgtgtttgatggggatgctccactattgaagaaacagactttggtgaagagaaggcagagaaaggacttagcgtccagtgactccaggaaaacgacagagaagcttctgaaaacatttttgaaaagacaagccatcaaaactgccttcagaagcaaaagagatgaagcactacccagtcttacccaagttcgaagagaaaacgacctctatgttttgcctcctttacaagaggaagaaaaacacagttcagaagaggaagatgaaaaagaatggcaagaaagaatgaatcaaaaacaagcattacaggaagagttctttcataatcctcaagcgatagatattgagtctgaggacttcagcagcctgccccctgaagtaaagcatgaaatcttgactgatatgaaagagttcaccaagcgcagaagaacattatttgaagcaatgccagaggagtctgatgacttttcacagtaccaactcaaaggcttgcttaaaaagaactatctgaaccagcatatagaacatgtccaaaaggaaatgaatcagcaacattcaggacacatccgaaggcagtatgaagatgaagggggctttctgaaggaggtagagtcaaggagagtggtctctgaagacacttcacattacatcttgataaaaggtattcaagctaagacagttgcagaagtggattcagagtctcttccttcttccagcaaaatgcacggcatgtcttttgacgtgaagtcatctccatgtgaaaaactgaagacagagaaagagcctgatgctacccctccttctccaagaactttactagctatgcaagctgccctgctgggaagtagctcagaagaggagctggagagtgaaaatcgaaggcaggcccgtgggaggaacgcacctgctgctgtagacgaaggctccatatcaccccggactctttcagccattaagagagctcttgacgatgacgaagatgtaaaagtgtgtgctggggatgatgtgcagacgggagggccaggagcagaagaaatgcgtataaacagctccaccgagaacagtgatgaaggacttaaagtgagagatggaaaaggaataccgtttactgcaacacttgcgtcatctagtgtgaactctgcagaggagcacgtagccagcactaatgaggggagagagcccacagactcagttccaaaagaacaaatgtcacttgttcacgtggggactgaagcctttccgataagtgatgagtctatgattaaggacagaaaagatcggctgcctctggagagtgcagtggttagacatagtgacgcacctgggctcccgaatggaagggaactgacaccggcatctccaacttgtacaaattctgtgtcaaagaatgaaacacatgctgaagtgcttgagcagcagaacgaactttgcccatatgagagtaaattcgattcttctcttctttcaagtgatgatgaaacaaaatgtaaaccgaattctgcttctgaagtcattggccctgtcagtttgcaagaaacaagtagcatagtaagtgtcccttcagaggcagtagataatgtggaaaatgtggtgtcatttaatgctaaagagcatgagaattttctggaaaccatccaagaacagcagaccactgaatctgcaggccaggatttaatttccattccaaaggccgtggaaccaatggaaattgactcggaagaaagtgaatctgatggaagtttcattgaagtgcaaagtgtgattagtgatgaggaacttcaagcagaattccctgaaacttccaaacctccctcagaacaaggcgaagaggaactggtaggaactagggagggagaagcccctgctgagtccgagagcctcctgagggacaactctgagagggacgacgtggatggtgagccacaggaagctgagaaagatgcggaagattcgctccatgaatggcaagatattaatttggaggagttggaaactctggagagcaacctcttagcacagcagaattcactgaaagctcaaaaacagcagcaagaacggatcgctgctactgtcaccggacagatgttcctggaaagccaggaactcctgcgcctgttcggcattccctacatccaggctcccatggaagcagaggcgcagtgcgccatcctggacctgactgatcagacttccggaaccatcactgatgacagtgatatctggctgtttggagcgcggcatgtctatagaaacttttttaataaaaacaagtttgtagaatattatcaatatgtggactttcacaatcaattgggattggaccggaataagttaataaatttggcttatttgcttggaagtgattataccgaaggaataccaactgtgggttgtgtaaccgccatggaaattctcaatgaattccctgggcatggcctggaacctctcctaaaattctcagaatggtggcatgaagctcaaaaaaatccaaagataagacctaatcctcatgacaccaaagtgaaaaaaaaattacggacattgcaactcacccctggctttcctaacccagctgttgccgaggcctacctcaaacccgtggtggatgactcgaagggatcctttctgtgggggaaacctgatctcgacaaaattagagaattttgtcagcggtatttcggctggaacagaacgaagacagatgaatctctgtttcctgtattaaagcaactcgatgcccagcagacacagctccgaattgattccttctttagattagcacaacaggagaaagaagatgctaaacgtattaagagccagagactaaacagagctgtgacatgtatgctaaggaaagagaaagaagcagcagccagcgaaatagaagcagtttctgttgccatggagaaagaatttgagctacttgataaggcaaaaggaaaaacccagaagagaggcataacaaataccttagaagagtcatcaagcctgaaaagaaagaggctttcagattctaaaggaaagaatacatgcggtggatttttgggggagacctgcctctcagaatcatctgatggatcttcaagtgaagatgctgaaagttcatctttaatgaatgtacaaaggagaacagctgcgaaagagccaaaaaccagtgcttcagattcgcagaactcagtgaaggaagctcccgtgaagaatggaggtgcgaccaccagcagctctagtgatagtgatgacgatggagggaaagagaagatggtcctcgtgaccgccagatctgtgtttgggaagaaaagaaggaaactaagacgtgcgaggggaagaaaaaggaaaacctaattaaaaaatatgtatcctctataattagttatgacagccatttgtaatgaatttgtcgcaaagacgtaataaaattaactggtggcacggtc

SEQ ID NO: 1909 - DNA, 2986 bp, Artificial Sequence
  derived and/or modified sequence
caccacaagctggatgtgagtgtgcttatggatcctgaggtataactgtctcaggccttttcagcaacagtgccaggaagtatatttatgtatacatatacatgcacacacacatctatatttatttctatgtctatctgtactaaaatccatgagtttatactgacatctgcaattccatggggttcagtctagcctcctgcttctttatagtttccctaacaatgagaaacattgctccccttatcctcaatacatttacatctgcttattctccctggatatgtaaccatctccccctcccactggcctcctccttggccctgctctcttctttgcttcagctgtgtccttggtgccagctcccagtccctgagagccccctcctctgttctgattgtctccttaaacccagctggacaggccttgccagccctctccacctacagggaaggaaggcaaccattaaatatattttaaggagaaggaaagacagtaagacagtaagagaggagagaagggaagtggaagaggaagaactatttcttagtcacagctttattctgtgctgtgtaaatagcataaaaacatactgagcaacttccatgattgtttatatactttgataatcctcctttttgaatttttaaaacaatgtcagttaacttagaacatatttatataaagcgaatatacaaatcttaagagagtttcctactttcaaagacagtgccagtttacctaattgaaaaggcttgttttgaagttacaggcatttgtgattacatttatttattaataacgctactattacatgtattctgttatagtcatatctttcctttttaggatgtagcatttttcaggttcctccagaaagctcttgatgattgcaggatcattttaatgttttgattgtagatgaagtgaccttttaattttggtacaggaagtttcattgaagtgcaaagtgtgattagtgatgaggaacttcaagcagaattccctgaaacttccaaacctccctcagaacaaggcgaagaggaactggtaggaactagggagggagaagcccctgctgagtccgagagcctcctgagggacaactctgagagggacgacgtggatggtgagccacaggaagctgagaaagatgcggaagattcgctccatgaatggcaagatattaatttggtaataccgtaacattgtgtttcgacttcttgctgaggaagccaggttaagtaggttttgagttttaaggagttggtggatgagtatttagtagctatttgcagtacatcttgtggttgctgatggcttcatttttgtgtaggttactggctgggatagactccgttttccatgtggtttagtgatgaatctctaaagatattacagagtcttggttagacatccagtggagtacttcctaaggagaaagagcttattggtaatttcagtcagactaaatgcaggctttttgtaaacaaaactcatttggattattaatataaatctataaatgaaaaaacattttataggaggagttggaaactctggagagcaacctcttagcacagcagaattcactgaaagctcaaaaacagcagcaagaacggatcgctgctactgtcaccggacagatgttcctggaaagccaggaactcctgcgcctgttcggcattccctacatccaggctcccatggaagcagaggcgcagtgcgccatcctggacctgactgatcagacttccggaaccatcactgatgacagtgatatctggctgtttggagcgcggcatgtctatagaaacttttttaataaaaacaagtttgtagaatattatcaatatgtggactttcacaatcaattgggattggaccggaataagttaataaatttggcttatttgcttggaagtgattataccgaaggaataccaactgtgggttgtgtaaccgccatggaaattctcaatgaattccctgggcatggcctggaacctctcctaaaattctcagaatggtggcatgaagctcaaaaaaatccaaagataagacctaatcctcatgacaccaaagtgaaaaaaaaattacggacattgcaactcacccctggctttcctaacccagctgttgccgaggcctacctcaaacccgtggtggatgactcgaagggatcctttctgtgggggaaacctgatctcgacaaaattagagaattttgtcagcggtatttcggctggaacagaacgaagacagatgaatctctgtttcctgtattaaagcaactcgatgcccagcagacacagctccgaattgattccttctttagattagcacaacaggagaaagaagatgctaaacgtattaagagccagagactaaacagagctgtgacatgtatgctaaggaaagagaaagaagcagcagccagcgaaatagaagcagtttctgttgccatggagaaagaatttgagctacttgataaggcaaaaggaaaaacccagaagagaggcataacaaataccttagaagagtcatcaagcctgaaaagaaagaggctttcagattctaaaggaaagaatacatgcggtggatttttgggggagacctgcctctcagaatcatctgatggatcttcaagtgaagatgctgaaagttcatctttaatgaatgtacaaaggagaacagctgcgaaagagccaaaaaccagtgcttcagattcgcagaactcagtgaaggaagctcccgtgaagaatggaggtgcgaccaccagcagctctagtgatagtgatgacgatggagggaaagagaagatggtcctcgtgaccgccagatctgtgtttgggaagaaaagaaggaaactaagacgtgcgaggggaagaaaaaggaaaacctaattaaaaaatatgtatcctctataattagttatgacagccatttgtaatgaatttgtcgcaaagacgtaataaaattaact

SEQ ID NO: 1910 - DNA, 1142 bp, Artificial Sequence
  derived and/or modified sequence
ggaaaccgagcgggcccatttttcatgggtttgcggacccaccagcgaaggcgggaggtgtcgcagggacatcttctggctgtttccgtcgcctgcgtggcccttgcaccccggtcttccattagcggcgcagacgtttgggcctaagcgctgggcgaggcgaggccctgcccctccccgccaacggccattctctggacctgtctttcttccgggaggcggtgacagctgctgagacgtgttgcagccagagtctctccgctttaatgcgctcccattagtgccgtcccccactggaaaaccgtggcttctgtattatttgccatctttgttgtgtaggagcagggagggcttcctcccggggtcctaggcggcggtgcagtccgtcgtagaagaattagagtagaagttgtcggggtccgctcttaggacgcagccgcctcatgggggtccaggggctctggaagctgctggagtgctccgggcggcaggtcagccccgaagcgctggaagggaagatcctggctgttgatattagcatttggttaaaccaagcacttaaaggagtccgggatcgccatgggaactcaatagaaaatcctcatcttctcactttgtttcatcggctctgcaaactcttattttttcgaattcgtcctatttttgtgtttgatggggatgctccactattgaagaaacagactttggtgaagagaaggcagagaaaggacttagcgtccagtgactccaggaaaacgacagagaagcttctgaaaacatttttgaaaagacaagccatcaaaactgccttcagaagcaaaagagatgaagcactacccagtcttacccaagttcgaagagaaaacgacctctatgttttgcctcctttacaagaggaagaaaaacacagttcagaagaggaagatgaaaaagaatggcaagaaagaatgaatcaaaaacaagcattacaggaagagttctttcataatcctcaagcgatagatattgagtctgaggacttcagcagcctgccccctgaagtaaagcatgaaatcttgactgatatgaaagagttcaccaagcgcagaagaacattatttgaagcaatgccagaggtatatcttcctctgctgcagccctag

SEQ ID NO: 1911 - DNA, 3561 bp, Artificial Sequence
  derived and/or modified sequence
atgggcgtgcagggcctgtggaagctgctggagtgcagcggccggcaggtgtccccagaggccctggagggcaagatcctggccgtggacatcagcatctggctgaaccaggccctgaagggcgtgcgggacagacatggcaacagcattgagaacccccacctgctgaccctcttccaccggctgtgcaagctgctcttcttccgcatccggcccatctttgtgtttgatggagatgcccccctgctgaagaagcagaccctggtgaagaggcggcagaggaaggacctggccagcagtgacagcaggaagaccacagagaagctgctgaagaccttcctgaagaggcaggccatcaagacagccttccgcagcaagagagatgaggccctgcccagcctgacccaggtgcggcgggagaatgacctgtatgtgctgccccccctgcaggaggaggagaagcacagcagcgaggaggaggatgagaaggagtggcaggagaggatgaaccagaagcaggccctgcaggaggagttcttccacaacccccaggccatcgacatcgagagcgaggacttcagcagcctgcccccagaggtgaagcatgagatcctgacagacatgaaggagttcaccaagagaagaaggaccctgtttgaggccatgcctgaggagagtgatgacttcagccagtaccagctgaagggcctgctgaagaagaactacctgaaccagcacattgaacatgtgcagaaggagatgaaccagcagcacagcggccacatccggcggcagtatgaagatgagggcggcttcctgaaggaggtggagagcagaagagtggtgtctgaggacaccagccactacatcctgatcaagggcatccaggccaagacagtggccgaggtggacagcgagagcctgcccagcagcagcaagatgcacggcatgagctttgatgtgaagagcagcccctgtgagaagctgaagacagagaaggagccagatgccaccccacccagccccaggaccctgctggccatgcaggccgccctgctgggcagcagcagcgaggaggagctggagagcgagaacagacggcaggcccggggcagaaatgccccagctgctgtggatgagggcagcatcagccccaggaccctgagcgccatcaagagggccctggatgatgatgaagatgtgaaggtgtgtgctggagatgatgtgcagacaggaggccctggagctgaggagatgaggatcaacagcagcacagagaacagtgatgagggcctgaaggtgagagatggcaagggcatccccttcaccgccaccctggccagcagctctgtgaacagcgctgaggagcacgtggccagcaccaatgaaggccgggagcccacagacagcgtgcccaaggagcagatgagcctggtgcacgtgggcacagaggccttccccatcagtgatgagagcatgatcaaggacaggaaggaccggctgcccctggagagcgctgtggtgcgccacagtgatgcccctggcctgcccaacggccgggagctgaccccagccagccccacctgcaccaacagcgtgtccaagaatgagacccacgccgaggtgctggagcagcagaatgagctgtgcccctatgagagcaagtttgacagcagcctgctgagcagtgatgatgagaccaagtgcaagcccaacagcgccagcgaggtgattggccctgtgtccctgcaggagaccagcagcatcgtgtctgtgcccagcgaggccgtggacaacgtggagaatgtggtgtccttcaatgccaaggagcacgagaacttcctggagaccatccaggagcagcagaccacagagagcgctggccaggacctgatcagcatccccaaggctgtggagcccatggagattgattctgaggagagcgagagtgatggcagcttcatcgaggtgcagagcgtcatcagtgatgaggagctgcaggccgagttccctgagaccagcaagccacccagcgagcagggcgaggaggagctggtgggcacccgggagggggaggccccagctgagagcgagagcctgctgcgggacaacagcgagagagatgatgtggatggagagccccaggaggccgagaaggatgctgaggacagcctgcacgagtggcaggacatcaacctggaggagctggagaccctggagagcaacctgctggcccagcagaacagcctgaaggcccagaagcagcagcaggagagaattgctgccaccgtgacaggccagatgttcctggagagccaggagctgctgcggctgtttggcatcccctacatccaggcccccatggaggccgaggcccagtgtgccatcctggacctgacagaccagaccagcggcaccatcacagatgacagcgacatctggctgtttggagcccggcacgtgtacagaaacttcttcaacaagaacaagtttgtggagtactaccagtatgtggacttccacaaccagctgggcctggacaggaacaagctgatcaacctggcctacctgctgggcagtgactacacagagggcatccccaccgtgggctgtgtgacagccatggagatcctgaatgagttccctggccacggcctggagcccctgctgaagttcagcgagtggtggcatgaggcccagaagaaccccaagatccggcccaacccccatgacaccaaggtgaagaagaagctgcggaccctgcagctgaccccaggcttccccaacccagctgtggccgaggcctacctgaagcctgtggtggatgacagcaagggcagcttcctgtggggcaagccagacctggacaagatccgggagttctgccagcgctacttcggctggaacagaaccaagacagatgagagcctcttccctgtgctgaagcagctggatgcccagcagacccagctgagaattgacagcttcttccggctggcccagcaggagaaggaggatgccaagaggatcaagagccagaggctgaacagagctgtgacctgcatgctgaggaaggagaaggaggccgccgccagcgagattgaggccgtgtctgtggccatggagaaggagtttgagctgctggacaaggccaagggcaagacccagaagaggggcatcaccaacaccctggaggagagcagcagcctgaagaggaagaggctgagtgacagcaagggcaagaacacctgtggcggcttcctgggggagacctgcctgtctgagagcagtgatggcagcagcagtgaagatgctgagagcagcagcctgatgaatgtgcagaggagaacagctgccaaggagcccaagaccagcgccagtgacagccagaacagcgtgaaggaggcccctgtgaagaatggaggagccaccaccagcagcagcagtgacagtgatgatgatggcggcaaggagaagatggtgctggtgacagcccggtctgtgtttgggaagaagaggaggaagctgcggcgggcccggggcaggaagaggaagacctag

SEQ ID NO: 1912 - DNA, 1260 bp, Artificial Sequence
  derived and/or modified sequence
atgttcctggagagccaggagctgctgcggctgtttggcatcccctacatccaggcccccatggaggccgaggcccagtgtgccatcctggacctgacagaccagaccagcggcaccatcacagatgacagcgacatctggctgtttggagcccggcacgtgtacagaaacttcttcaacaagaacaagtttgtggagtactaccagtatgtggacttccacaaccagctgggcctggacaggaacaagctgatcaacctggcctacctgctgggcagtgactacacagagggcatccccaccgtgggctgtgtgacagccatggagatcctgaatgagttccctggccacggcctggagcccctgctgaagttcagcgagtggtggcatgaggcccagaagaaccccaagatccggcccaacccccatgacaccaaggtgaagaagaagctgcggaccctgcagctgaccccaggcttccccaacccagctgtggccgaggcctacctgaagcctgtggtggatgacagcaagggcagcttcctgtggggcaagccagacctggacaagatccgggagttctgccagcgctacttcggctggaacagaaccaagacagatgagagcctcttccctgtgctgaagcagctggatgcccagcagacccagctgagaattgacagcttcttccggctggcccagcaggagaaggaggatgccaagaggatcaagagccagaggctgaacagagctgtgacctgcatgctgaggaaggagaaggaggccgccgccagcgagattgaagctgtgtctgtggccatggagaaggagtttgagctgctggacaaggccaagggcaagacccagaagaggggcatcaccaacaccctggaggagagcagcagcctgaagaggaagaggctgagtgacagcaagggcaagaacacctgtggcggcttcctgggggagacctgcctgtctgagagcagtgatggcagcagcagtgaagatgctgagagcagcagcctgatgaatgtgcagaggagaacagctgccaaggagcccaagaccagcgccagtgacagccagaacagcgtgaaggaggcccctgtgaagaatggaggagccaccaccagcagcagcagtgacagtgatgatgatggcggcaaggagaagatggtgctggtgacagcccggtctgtgtttgggaagaagaggaggaagctgcggcgggcccggggcaggaagaggaagacctag

SEQ ID NO: 1913 - DNA, 699 bp, Artificial Sequence
  derived and/or modified sequence
atgggcgtgcagggcctgtggaagctgctggagtgcagcggccggcaggtgtccccagaggccctggagggcaagatcctggccgtggacatcagcatctggctgaaccaggccctgaagggcgtgcgggacagacatggcaacagcattgagaacccccacctgctgaccctcttccaccggctgtgcaagctgctcttcttccgcatccggcccatctttgtgtttgatggagatgcccccctgctgaagaagcagaccctggtgaagaggcggcagaggaaggacctggccagcagtgacagcaggaagaccacagagaagctgctgaagaccttcctgaagaggcaggccatcaagacagccttccgcagcaagagagatgaggccctgcccagcctgacccaggtgcggcgggagaatgacctgtatgtgctgccccccctgcaggaggaggagaagcacagcagcgaggaggaggatgagaaggagtggcaggagaggatgaaccagaagcaggccctgcaggaggagttcttccacaacccccaggccatcgacatcgagagcgaggacttcagcagcctgcccccagaggtgaagcatgagatcctgacagacatgaaggagttcaccaagagaagaaggaccctgtttgaggccatgcctgaggtgtacctgcccctgctgcagccctag

SEQ ID NO: 1914 - DNA, 3561 bp, Artificial Sequence
  derived and/or modified sequence
atgggcgtgcagggcctgtggaagctgctggagtgcagcggccggcaggtgtccccagaggctcttgaagggaaaatcttggccgtcgacatttcaatttggctgaaccaagctttaaagggggtccgcgacagacatggcaactctattgaaaaccctcacttgcttacactgttccaccggctgtgcaagctgttgttttttagaattcggcctatctttgtattcgatggggatgcacctctgctcaaaaaacaaaccctagtgaagcgacggcagcggaaagacctggccagctccgactctaggaaaactaccgagaaacttcttaaaacattcctgaaaaggcaggctattaagactgctttccgctctaaacgggacgaagcgctcccttcactgacccaggtccgcagggaaaatgatctctacgtattgccaccactgcaggaggaggaaaaacatagcagcgaggaggaagacgagaaggagtggcaagaacggatgaatcagaaacaggcccttcaggaagaattttttcacaacccccaagccatcgatatcgagtcggaagacttttcttcactccctccagaagtgaagcacgagattctgacagatatgaaggaattcactaagaggcggcgcacccttttcgaagcgatgccagaagagtccgatgacttctcccagtatcaactgaagggtctcctgaagaagaattatctgaaccaacacattgaacatgtgcagaaagaaatgaaccagcaacacagcggacacatcagaagacagtatgaggacgagggaggtttcctgaaagaagtcgaatctcggagagttgtgtcagaagatacttctcattatatcctgattaaaggtattcaggcaaagactgttgccgaagtggacagcgagagtttgccttcgtcctccaaaatgcacggcatgtcctttgacgttaagagcagcccttgtgagaagctgaaaaccgagaaagagcctgacgctacaccgccaagcccccgaaccctgttggcaatgcaggccgcactgttgggttcaagctcggaggaggaactcgagagcgaaaacagacgtcaggctagggggagaaatgcccctgcagccgtagatgaagggtccatctctcctagaacattaagtgccataaagagggcactcgatgacgatgaggatgttaaggtctgtgctggggatgacgttcaaactgggggacccggagccgaggagatgcggatcaactcatccactgagaacagcgacgaaggactcaaagttagggatggcaagggaatccctttcacagctacgctagccagttcttccgtgaactctgcagaagagcatgttgcctctacgaacgaggggcgggagcccaccgattcggtacctaaagagcaaatgagccttgtgcatgtgggcactgaggcattccccatctctgacgagagtatgataaaggaccgcaaggaccgcctccccctggagtctgccgtcgtccgccactcggatgcccccgggctgccaaatggtcgggagctgacacctgcctcgcctacctgtaccaatagcgtcagtaaaaacgaaactcatgccgaagtactggagcagcagaacgagctgtgtccatatgaatccaagtttgatagcagtctcctgagtagcgatgacgagactaagtgtaagcctaactcggcttcagaggtgatcgggccagtatctcttcaggaaacctcatctatcgttagcgttccgagcgaagccgtcgacaatgttgaaaacgtcgtttccttcaacgccaaagagcatgagaacttcctcgagacaattcaggagcagcaaaccactgagagcgccggccaggacctgatctccatccccaaggccgtggaaccaatggaaattgactctgaggaatcagaaagcgatggtagctttattgaggtacagtctgtgatcagtgatgaagaactgcaagctgagttccctgagacatctaagccaccctcagaacaaggggaggaagaactcgtgggaactagagagggcgaagcccctgctgagtcagagagcctgctgagagataactccgaaagggatgacgtagacggcgagccgcaggaggcggagaaggacgctgaggattccttacatgaatggcaggacattaacctggaggaactggagacgctggaaagtaatttgctggcacaacaaaactcactgaaagcacagaagcaacagcaggagagaatagctgccacagttacaggccagatgtttctggagtctcaggagctgctgagactgttcggaattccctacatccaggcccccatggaggcggaagcacaatgcgcaattcttgacctgacggaccaaactagtgggacaatcaccgatgattccgatatctggctgttcggagccaggcatgtctatagaaattttttcaataagaacaaattcgtcgagtactaccagtatgtggactttcataaccaactggggctggataggaataagcttatcaacctcgcttaccttctgggaagcgattacacggaaggaattcctacggtgggctgtgttactgccatggaaatcctaaatgagttccccggccatggcttggagcctttattaaagttctcagaatggtggcatgaagcacagaagaatcctaaaattcggcccaatccacacgacactaaggtgaagaaaaaactccgcacactgcaactgactcctgggtttcccaatcctgctgtcgccgaggcctacttgaagcctgtggtcgacgattccaaaggctcgttcctttgggggaagccagatctagacaaaattagggagttttgtcaaagatactttggttggaacagaactaagaccgatgagagcttgttccctgtcttaaagcaacttgacgcgcaacagacgcaactgaggatcgactcatttttcaggctggcgcaacaggagaaggaagacgctaagcgcataaaatctcagagactgaacagggctgtgacatgtatgctacgcaaggaaaaagaagccgcggcctctgaaatcgaggcagtctcggtggccatggaaaaggagttcgagcttcttgacaaagctaagggcaagacccagaaacgcggcattactaacactcttgaagaatcatcttccctgaaacgcaagcgcctcagtgattcaaagggaaaaaacacctgcggagggttcctcggagaaacctgcctgtccgaatccagcgacggatcttccagtgaagacgcagagtccagctccctaatgaatgttcaaaggcgcactgcagcaaaagaaccaaagaccagcgcttccgacagccagaactccgtgaaggaagctccggtgaagaatggaggggcgaccacaagctcctcctcagactccgacgacgacgggggcaaagagaagatggtcttagtcacggctcgctcagtcttcggcaaaaaacgaaggaaactgcgccgcgctcggggtcgcaaaaggaagacctag

SEQ ID NO: 1915 - DNA, 1260 bp, Artificial Sequence
  derived and/or modified sequence
atgttcctggagagccaggagctgctgcggctgttcggcatcccctacatccaggccccaatggaggcagaggcccagtgcgccatcctggatttaactgaccaaacaagtggaactatcactgatgactcggacatctggttgtttggcgctagacatgtttacagaaactttttcaacaaaaataagtttgtcgaatactatcaatatgttgatttccacaatcagcttgggctcgataggaataaactcatcaacctggcgtacctgttgggatccgactacaccgagggtatcccaactgtgggttgcgtcaccgcgatggagattcttaatgagtttcccgggcacggcttagaacctctgctgaagttctcagagtggtggcacgaagcacaaaagaatccgaaaatccgacccaatccccatgatactaaggtaaagaaaaagctcaggaccctccagttaacacccggatttcccaatccagcggtcgcagaagcctacctcaaacctgtcgtggatgattccaaaggctccttcctgtggggcaagcccgacttagacaagatcagagagttctgccagcggtattttggctggaataggaccaaaactgacgagtccctcttcccggtgctgaagcagctggatgcgcaacagacccaattgcggatcgactctttttttcggttagctcagcaagagaaagaagacgctaaacgcataaaaagtcagcggctcaatcgggccgtgacatgtatgctgaggaaggagaaagaggctgccgcctccgagatagaggccgtgtctgttgctatggagaaggagttcgagctgctggacaaggccaaaggaaaaacgcaaaagagggggatcacaaacactttggaggagtcttcatcattaaagcgcaagcggctctctgatagtaaaggaaaaaatacatgtggggggtttcttggggagacttgtctgagcgaatctagcgacgggtcaagctcagaagatgcagagagctcaagcctgatgaacgtgcagcggcgtaccgccgccaaagagccaaagacttccgcttcggattcacagaactcggtgaaagaagcacccgtaaaaaatgggggcgccactacctcctcatcaagcgacagtgacgacgatggcggcaaggaaaaaatggtcctcgtgaccgctcggtccgtgttcggcaaaaaaagaagaaagctccgccgagcaagaggccgcaagcggaagacatag

SEQ ID NO: 1916 - DNA, 699 bp, Artificial Sequence
  derived and/or modified sequence
atgggcgtgcagggcctgtggaagctgctggagtgcagcggccggcaggtgtcgcctgaggccctcgagggcaagattttggctgtcgacataagcatctggctgaaccaggcccttaaaggggtccgggatcgccatggtaactcaatcgagaatccgcatctacttactctcttccaccgtctatgcaaattgctcttcttccgaatcaggcccatattcgtgttcgacggagacgccccactgctgaagaagcagaccctcgtgaaacggcgccagagaaaagatctggcctctagcgattctcgaaagaccacagagaagcttctgaaaacctttctaaagcggcaagctatcaaaactgcctttcgctctaagagagacgaggccctgccatctctcacgcaggttagacgcgaaaatgatctgtatgtgttgccacctctgcaggaggaggagaagcattcttccgaggaagaagacgagaaggagtggcaggaaagaatgaatcagaagcaggctctgcaggaggagttttttcataacccacaggccatcgatattgagtccgaggacttcagttctctgccgccggaggtcaagcacgagatcttaaccgacatgaaggagttcaccaagcgtcgtcggaccctgttcgaggccatgcctgaagtgtacctacccttgcttcagccctag

SEQ ID NO: 1917 - DNA, 3561 bp, Artificial Sequence
  derived and/or modified sequence
atgggcgtgcagggattatggaaactccttgagtgcagcgggaggcaggtatctccagaggcacttgaaggaaagatcctggctgtagatatctcaatctggctaaatcaggcactgaagggagtgagggaccgacatggcaacagcatagaaaaccctcacctgcttaccctgttccatcgtctctgcaaacttcttttttttaggatcaggccaatcttcgtcttcgatggagatgcccctctcctcaaaaagcagactctcgttaagaggcggcagcgtaaggacctggcaagctccgatagtcgtaagaccactgaaaagttgctgaaaaccttcctgaaacggcaggccatcaagacagcttttagaagcaaaagggacgaagccctcccgagcctgacacaagtgcggagggagaatgatctctacgtccttccccctttgcaggaagaagaaaaacactcaagcgaagaggaagatgagaaggagtggcaggagaggatgaatcaaaaacaggctcttcaggaggaattttttcacaatcctcaagctatagacatcgaatccgaggacttttcatctctgccccctgaagtgaagcacgagatcctcactgatatgaaagaatttaccaaaaggagacgtactctattcgaggcaatgcctgaagagagtgacgacttttcccaataccagctgaagggccttttgaagaagaattatctgaatcagcatatcgagcacgtccagaaggaaatgaaccagcagcactccgggcatatcagacgacagtacgaagacgagggaggcttcctgaaagaagtggaatctagacgtgttgtgtcagaggatacgagccattatatcttgatcaaggggatccaagcaaagaccgttgctgaggttgactcagaatcgttgccatcctctagcaagatgcatggaatgtcattcgatgttaagtcttccccatgcgagaagctgaagacggaaaaggaaccggacgctactcccccatcacccaggactctgctagcaatgcaggcagccctacttggctctagttcagaagaggaattggagtctgagaatcggagacaggctaggggacggaatgctccagcagccgtggacgagggctctatctctccacgtacacttagcgctatcaaaagggcactggacgatgatgaagatgtcaaggtatgtgcaggagacgacgtacagaccggcggaccaggtgcagaggagatgcggataaattctagcaccgaaaatagtgacgaaggtctgaaggtcagggatggaaaggggataccttttacagccacactagcctcttcgagcgttaattcagcagaggaacacgtagcatcgacaaacgaaggcagggagcccacagatagtgtaccgaaggagcagatgagtttagttcacgtaggcaccgaagctttcccaatatcagatgagtccatgattaaagacagaaaggacaggctcccgttggaaagcgccgtggtgagacattccgacgcgcctggtctgcccaatgggagggagctcactccagctagccctacatgcacaaattctgtgtcaaaaaacgaaacccacgcagaagtattagagcagcagaatgagctgtgcccatacgagagcaaattcgacagcagccttctgagcagcgatgacgaaacaaaatgcaaaccaaatagtgcctcagaagtgatcggcccagtgagcctgcaagaaacgtcttcaatcgtgtctgtccctagtgaagcagtcgataatgttgagaacgtcgtaagcttcaacgcaaaagagcatgagaactttttggagaccatccaggagcagcagactacagagtcagccggtcaagacctaattagcatcccaaaagcagttgagccgatggagattgactcagaggagagcgagtccgatggttcctttatcgaggttcagtctgtaatcagcgacgaggagctgcaggccgaatttcccgagacaagcaagccaccttcagagcagggcgaggaggagctggtcgggactagagaaggagaggccccagctgaatcagagtcattgttgagagataatagcgaacgcgacgacgttgacggagaacctcaggaggcagaaaaggacgcagaggacagtctgcatgagtggcaagatataaacctggaggaattggagacgctggagagtaacttattggcgcagcagaacagcctgaaagcccagaaacagcaacaggaaagaattgctgctacagttactgggcaaatgttcctggaaagtcaggagcttcttcgtctctttggcatcccatacattcaggccccaatggaggccgaagcccagtgtgccattctggacctgactgatcagacgtctggcaccattactgatgattctgatatttggttgtttggagctaggcacgtgtaccgcaactttttcaacaaaaacaaatttgtggaatattatcagtatgtggattttcataaccagctcggcctcgatcgtaacaaattgataaatctcgcctatttgctgggctctgactacaccgaaggaattcccacagtgggatgcgtcacagctatggaaatactcaacgagtttcccggacacggcctggagccacttctgaaattcagcgagtggtggcatgaggcacagaaaaaccccaagatccgaccaaacccgcatgacacaaaagtcaaaaaaaaacttaggaccctgcagcttacccctggtttccccaatcccgctgtcgctgaagcatatctaaagcctgtggtggatgacagcaagggctcatttctgtgggggaagccggacctggataaaattcgcgagttttgccagagatacttcggatggaacaggactaagacagatgagagccttttccccgtgcttaaacagctggatgcccagcaaacacaattgcggatagactccttcttcagactagcacaacaagaaaaggaggacgccaaaagaataaagagccagcgactcaacagagccgtcacctgtatgcttaggaaagagaaggaagctgcggctagtgagatcgaggcagtcagcgtggccatggagaaggagtttgagctgcttgataaagccaaggggaaaacgcagaagcggggaattactaataccctggaggaaagttcttcgctcaagaggaagcgactttctgacagcaaaggcaagaacacctgtggcggattcttaggagaaacatgcttgagtgaatctagcgatggcagctcgtccgaagacgcggagagttcctccttaatgaacgttcaacgaaggactgccgcaaaagagccaaaaacatccgctagcgatagtcagaacagcgtcaaagaggcccctgtgaagaatgggggtgcaacaacaagttcttcttccgattcagacgatgatggcggaaaggaaaaaatggttttagttacagccagatccgtgttcggcaagaaacggcgaaagctgcgacgggcacggggtcgcaaacgcaagacctag

SEQ ID NO: 1918 - DNA, 1260 bp, Artificial Sequence
  derived and/or modified sequence
atgtttcttgagtcacaggagttgctccgattatttggaatcccctatattcaggcaccaatggaggcagaggcccaatgtgcgattctggatctgaccgatcagacgtccggtactataaccgacgacagcgacatctggctgttcggagcaagacacgtgtatcgtaattttttcaacaaaaacaaatttgtggaatactatcagtacgtagactttcacaatcagctgggactggatcgtaataagctcatcaatctggcctacctcctcgggtcagattataccgagggcataccaacagtggggtgtgtaaccgcaatggaaattttaaatgagttccccggacacgggctggagcctcttttaaagtttagcgagtggtggcatgaggcacagaagaatcctaaaataaggcctaacccacacgatactaaggtcaagaaaaagctgcgaactctgcagctcactccaggattcccaaaccctgccgtcgccgaggcataccttaaacccgtcgtggatgattccaaaggatctttcctgtggggcaaacccgatctggacaaaattagagaattttgccaacgatatttcgggtggaacagaactaagaccgatgagtcgctattcccagttctcaagcaattagacgcgcaacagacacagctccgtattgacagcttctttcgactagcacagcaggagaaagaggatgcaaagcgcatcaaatctcagcgactgaatcgagcagtgacctgtatgctccgaaaggagaaggaagccgcagctagcgagattgaggcagtgagcgttgcaatggaaaaggagttcgaactcttggacaaagctaaggggaagactcagaaaagaggaataacgaatacactggaagaatcatcgagtctcaaaagaaagaggctgtccgactcaaagggtaagaatacctgcggaggcttcttgggggagacatgcctatctgaaagcagtgatggaagcagttctgaggatgctgaatcttcttcattaatgaacgtccagaggagaacagccgctaaggaacccaagacgtccgctagcgactcacagaattctgtgaaggaggccccagtgaagaatgggggtgctaccacctcctcaagctcagattctgatgacgacggcggaaaggaaaagatggttctggttacggccagaagcgtgttcggcaagaaaagaaggaagcttcgtagggcccgtggtcgtaagagaaaaacctag

SEQ ID NO: 1919 - DNA, 699 bp, Artificial Sequence
  derived and/or modified sequence
atgggtgtccagggcctgtggaagttgctcgagtgcagcggaagacaggtgagccccgaagcactcgagggaaaaatcctcgctgttgatatttccatctggttgaaccaagctctaaagggagtgagggacaggcatggcaattctatcgaaaacccccatctgctaactcttttccatagattgtgcaagctgctattctttcgaattagaccaatctttgtcttcgacggtgacgcacccctcctgaaaaaacagacattggttaagcgacgtcagcggaaggacctcgcctcctctgattccaggaaaactacagagaagctgctcaaaactttcttgaagaggcaggccataaagacagcctttcggtcaaagcgcgacgaggctctgccctcccttacacaggtgagaagagagaacgatctgtacgttctgccacctttgcaagaagaggaaaaacactcctccgaagaggaagacgagaaagaatggcaggaaagaatgaatcagaagcaggccttacaagaggaattcttccacaatcctcaggcgatagacatcgagtcggaggatttcagcagcttgcctccggaggtcaagcatgaaatattgaccgatatgaaagagtttacaaagaggcgccgtaccctctttgaggcaatgcccgaggtgtacctgccactccttcaaccatag

SEQ ID NO: 1920 - protein, 1493 aa, Artificial Sequence
  derived and/or modified sequence
MPNEGIPHSSQTQEQDCLQSQPVSNNEEMAIKQESGGDGEVEEYLSFRSVGDGLSTSAVGCASAAPRRGPALLHIDRHQIQAVEPSAQALELQGLGVDVYDQDVLEQGVLQQVDNAIHEASRASQLVDVEKEYRSVLDDLTSCTTSLRQINKIIEQLSPQAATSRDINRKLDSVKRQKYNKEQQLKKITAKQKHLQAILGGAEVKIELDHASLEEDAEPGPSSLGSMLMPVQETAWEELIRTGQMTPFGTQIPQKQEKKPRKIMLNEASGFEKYLADQAKLSFERKKQGCNKRAARKAPAPVTPPAPVQNKNKPNKKARVLSKKEERLKKHIKKLQKRALQFQGKVGLPKARRPWESDMRPEAEGDSEGEESEYFPTEEEEEEEDDEVEGAEADLSGDGTDYELKPLPKGGKRQKKVPVQEIDDDFFPSSGEEAEAASVGEGGGGGRKVGRYRDDGDEDYYKQRLRRWNKLRLQDKEKRLKLEDDSEESDAEFDEGFKVPGFLFKKLFKYQQTGVRWLWELHCQQAGGILGDEMGLGKTIQIIAFLAGLSYSKIRTRGSNYRFEGLGPTVIVCPTTVMHQWVKEFHTWWPPFRVAILHETGSYTHKKEKLIRDVAHCHGILITSYSYIRLMQDDISRYDWHYVILDEGHKIRNPNAAVTLACKQFRTPHRIILSGSPMQNNLRELWSLFDFIFPGKLGTLPVFMEQFSVPITMGGYSNASPVQVKTAYKCACVLRDTINPYLLRRMKSDVKMSLSLPDKNEQVLFCRLTDEQHKVYQNFVDSKEVYRILNGEMQIFSGLIALRKICNHPDLFSGGPKNLKGLPDDELEEDQFGYWKRSGKMIVVESLLKIWHKQGQRVLLFSQSRQMLDILEVFLRAQKYTYLKMDGTTTIASRQPLITRYNEDTSIFVFLLTTRVGGLGVNLTGANRVVIYDPDWNPSTDTQARERAWRIGQKKQVTVYRLLTAGTIEEKIYHRQIFKQFLTNRVLKDPKQRRFFKSNDLYELFTLTSPDASQSTETSAIFAGTGSDVQTPKCHLKRRIQPAFGADHDVPKRKKFPASNISVNDATSSEEKSEAKGAEVNAVTSNRSDPLKDDPHMSSNVTSNDRLGEETNAVSGPEELSVISGNGECSNSSGTGKTSMPSGDESIDEKLGLSYKRERPSQAQTEAFWENKQMENNFYKHKSKTKHHSVAEEETLEKHLRPKQKPKNSKHCRDAKFEGTRIPHLVKKRRYQKQDSENKSEAKEQSNDDYVLEKLFKKSVGVHSVMKHDAIMDGASPDYVLVEAEANRVAQDALKALRLSRQRCLGAVSGVPTWTGHRGISGAPAGKKSRFGKKRNSNFSVQHPSSTSPTEKCQDGIMKKEGKDNVPEHFSGRAEDADSSSGPLASSSLLAKMRARNHLILPERLESESGHLQEASALLPTTEHDDLLVEMRNFIAFQAHTDGQASTREILQEFESKLSASQSCVFRELLRNLCTFHRTSGGEGIWKLKPEYC

SEQ ID NO: 1921 - protein, 870 aa, Artificial Sequence
  derived and/or modified sequence
QQPFHRHLLMTTALHSEKLIRDVAHCHGILITSYSYIRLMQDDISRYDWHYVILDEGHKIRNPNAAVTLACKQFRTPHRIILSGSPMQNNLRELWSLFDFIFPGKLGTLPVFMEQFSVPITMGGYSNASPVQVKTAYKCACVLRDTINPYLLRRMKSDVKMSLSLPDKNEQIFSGLIALRKICNHPDLFSGGPKNLKGLPDDELEEDQFGYWKRSGKMIVVESLLKIWHKQGQRVLLFSQSRQMLDILEVFLRAQKYTYLKMDGTTTIASRQPLITRYNEDTSIFVFLLTTRVGGLGVNLTGANRVVIYDPDWNPSTDTQARERAWRIGQKKQVTVYRLLTAGTIEEKIYHRQIFKQFLTNRVLKDPKQRRFFKSNDLYELFTLTSPDASQSTETSAIFAGTGSDVQTPKCHLKRRIQPAFGADHDVPKRKKFPASNISVNDATSSEEKSEAKGAEVNAVTSNRSDPLKDDPHMSSNVTSNDRLGEETNAVSGPEELSVISGNGECSNSSGTGKTSMPSGDESIDEKLGLSYKRERPSQAQTEAFWENKQMENNFYKHKSKTKHHSVAEEETLEKHLRPKQKPKNSKHCRDAKFEGTRIPHLVKKRRYQKQDSENKSEAKEQSNDDYVLEKLFKKSVGVHSVMKHDAIMDGASPDYVLVEAEANRVAQDALKALRLSRQRCLGAVSGVPTWTGHRGISGAPAGKKSRFGKKRNSNFSVQHPSSTSPTEKCQDGIMKKEGKDNVPEHFSGRAEDADSSSGPLASSSLLAKMRARNHLILPERLESESGHLQEASALLPTTEHDDLLVEMRNFIAFQAHTDGQASTREILQEFESKLSASQSCVFRELLRNLCTFHRTSGGEGIWKLKPEYC

SEQ ID NO: 1922 - protein, 179 aa, Artificial Sequence
  derived and/or modified sequence
MPNEGIPHSSQTQEQDCLQSQPVSNNEEMAIKQESGGDGEVEEYLSFRSVGDGLSTSAVGCASAAPRRGPALLHIDRHQIQAVEPSAQALELQGLGVDVYDQDVLEQGVLQQVDNAIHEASRASQLVDVEKEYRSVLDDLTSCTTSLRQINKIIEQLSPQAATSRDINRKLDSVKRQKY

SEQ ID NO: 1923 - protein, 105 aa, Artificial Sequence
  derived and/or modified sequence
MSLSLPDKNEQVLFCRLTDEQHKVYQNFVDSKEVYRILNGEMQEVLQSFTSIHLHESPLNFFRSFQVRGSRSHYPGKGMQTTLGIVNFLVVTLKRKKRNRFSPDL

SEQ ID NO: 1924 - protein, 863 aa, Artificial Sequence
  derived and/or modified sequence
MQDDISRYDWHYVILDEGHKIRNPNAAVTLACKQFRTPHRIILSGSPMQNNLRELWSLFDFIFPGKLGTLPVFMEQFSVPITMGGYSNASPVQVKTAYKCACVLRDTINPYLLRRMKSDVKMSLSLPDKNEQVLFCRLTDEQHKVYQNFVDSKEVYRILNGEMQIFSGLIALRKICNHPDLFSGGPKNLKGLPDDELEEDQFGYWKRSGKMIVVESLLKIWHKQGQRVLLFSQSRQMLDILEVFLRAQKYTYLKMDGTTTIASRQPLITRYNEDTSIFVFLLTTRVGGLGVNLTGANRVVIYDPDWNPSTDTQARERAWRIGQKKQVTVYRLLTAGTIEEKIYHRQIFKQFLTNRVLKDPKQRRFFKSNDLYELFTLTSPDASQSTETSAIFAGTGSDVQTPKCHLKRRIQPAFGADHDVPKRKKFPASNISVNDATSSEEKSEAKGAEVNAVTSNRSDPLKDDPHMSSNVTSNDRLGEETNAVSGPEELSVISGNGECSNSSGTGKTSMPSGDESIDEKLGLSYKRERPSQAQTEAFWENKQMENNFYKHKSKTKHHSVAEEETLEKHLRPKQKPKNSKHCRDAKFEGTRIPHLVKKRRYQKQDSENKSEAKEQSNDDYVLEKLFKKSVGVHSVMKHDAIMDGASPDYVLVEAEANRVAQDALKALRLSRQRCLGAVSGVPTWTGHRGISGAPAGKKSRFGKKRNSNFSVQHPSSTSPTEKCQDGIMKKEGKDNVPEHFSGRAEDADSSSGPLASSSLLAKMRARNHLILPERLESESGHLQEASALLPTTEHDDLLVEMRNFIAFQAHTDGQASTREILQEFESKLSASQSCVFRELLRNLCTFHRTSGGEGIWKLKPEYC

SEQ ID NO: 1925 - DNA, 7006 bp, Artificial Sequence
  derived and/or modified sequence
agcagaagtcggagtcgctgttgggggcggtgtctatggttgagctgagggcgcaggcgccacggcccgtcgagctgggttccaaggcggctggcggcggtagcgtctctgtttccttgtgggcgctcgcgcggccctgggtagtctgtagagaatgccaaatgagggaatcccccactcaagtcaaactcaggagcaagactgtttacagagtcaacctgtcagtaataatgaagaaatggcaatcaagcaagaaagtggtggtgatggggaggtggaggagtacctctcctttcgttctgtgggtgacgggctgtccacctctgctgtggggtgcgcatcagcagctccgaggagagggccagccctgctgcacatcgaccgacatcagatccaggcagtagagcctagcgcccaggcccttgagctgcagggtttgggtgtggacgtctatgaccaggacgtgctggaacagggagtgcttcagcaggtggacaatgccatccatgaggccagccgtgcctcccagctcgttgacgtggagaaggagtatcggtcggtcctggatgacctcacgtcatgtacgacatccctaaggcaaatcaataaaattattgaacagcttagccctcaagctgccaccagcagagacatcaacaggaaactagattctgtaaaacgacagaagtataataaggaacaacagctaaaaaagatcactgcaaaacaaaagcatctccaggccatccttggaggagcagaggtgaaaattgaactagatcacgccagtctggaggaggatgcagagccggggccatccagtcttggcagcatgctcatgcctgtccaggagactgcctgggaagagctcatccgcactggccagatgacaccttttggtacccagatccctcagaaacaggagaaaaagcccagaaaaatcatgcttaatgaagcatcaggcttcgaaaagtatttggcagatcaagcaaaactgtcttttgaaaggaagaagcaaggttgtaataaaagagcagctagaaaagctccagccccagtcacgcctccagccccagtgcaaaataaaaacaaaccaaacaagaaagccagagttctgtccaaaaaagaggagcgtttgaaaaagcacatcaagaaactccagaagagggctttgcagttccaggggaaagtgggattgccaaaggcaaggagaccttgggagtcagacatgaggccagaggcagagggagactctgagggtgaagagtctgagtatttccccacagaggaggaggaagaggaggaagatgacgaggtggagggggcagaggcggacctgtctggagatggtactgactatgagctgaagcctctgcccaagggcgggaaacggcagaagaaagtgccagtgcaggagattgatgatgactttttcccaagttctggggaagaagctgaagctgcttctgtaggagaaggaggaggaggaggtcggaaagtgggaagataccgagatgatggagatgaagattattataagcagcggttaaggagatggaataaactgagactgcaggacaaagagaaacgtctgaagctggaggacgattctgaggaaagtgatgctgaatttgacgaaggttttaaagtgccaggttttctgttcaaaaagctttttaagtaccagcagacaggtgttaggtggctgtgggaattgcactgccagcaggcaggaggaattctgggagatgaaatgggattgggcaagaccatccagataattgccttcttggcaggtctgagctacagcaagatcaggactcgtggttcaaattacaggtttgaggggttgggtccaactgtaattgtctgtccaacaacagtgatgcatcagtgggtgaaggaatttcacacgtggtggcctccgttcagagtggcaattctacatgaaaccggttcctatacccacaaaaaggagaaactaattcgagatgttgctcattgtcatggaattttgatcacatcttactcctacattcgattgatgcaggatgacattagcaggtatgactggcactatgtgatcttggacgaaggacacaaaattcgaaatccaaatgctgctgtcacccttgcttgcaaacagtttcgcacccctcatcggatcattctgtctggctcaccgatgcaaaataacctccgagagctgtggtcgctctttgacttcatcttcccgggaaagttaggcacgttgcctgtgtttatggagcagttctccgtccccatcaccatggggggatattcaaatgcttccccagtacaggtcaaaactgcttacaagtgtgcatgtgtcttacgagataccataaatccatacctactgcggagaatgaagtcagatgtcaagatgagcctttctttgccagataaaaatgaacaggtcttattttgccgtcttacagatgagcagcataaagtctaccaaaatttcgttgattccaaagaagtttacaggattctcaatggagagatgcagattttctccggacttatagccctaagaaaaatttgcaaccaccctgatctcttttctggaggtcccaagaatctcaaaggtcttcctgatgatgaactagaagaagatcagtttgggtactggaaacgttctgggaaaatgattgttgttgagtctttgttgaaaatatggcacaagcagggtcagcgagtattgctgttttctcagtcaaggcagatgctggacatacttgaagtattccttagagcccaaaagtatacctatctcaagatggatggtaccactacaatagcttcaagacagccactgattacgagatacaatgaggacacatccatatttgtgtttcttctgaccacgcgggtgggcggcttaggtgtcaacctgacgggggcaaacagagttgtcatctatgacccagactggaacccaagcacggacacgcaggcccgggagcgagcatggagaataggccagaagaagcaagtgactgtgtacaggctcctgactgcgggcaccattgaagaaaagatctaccaccgacaaatcttcaagcagtttttgacaaatagagtgctaaaagacccaaaacaaaggcggtttttcaaatccaatgatctctatgagctatttactctgactagtcctgatgcatcccagagcactgaaacaagtgcaatttttgcaggaactggatcagatgttcagacacccaaatgccatctaaaaagaaggattcaaccagcctttggagcagaccatgatgttccaaaacgcaagaagttccctgcttctaacatatctgtaaatgatgccacatcatctgaagagaaatctgaggctaaaggagctgaagtaaatgcagtaacttctaatcgaagtgatcctttgaaagatgaccctcacatgagtagtaatgtaactagcaatgataggcttggagaagagacaaatgcagtatctggaccagaagagttgtcagtgattagtggaaatggggaatgttcaaattcttcaggaacaggcaaaacttctatgccatctggtgatgaaagcattgatgaaaagttaggtctttcttacaaaagagaaagacccagccaggctcaaacagaagctttttgggagaataaacaaatggaaaataatttttataagcacaagtcaaaaacaaaacatcatagtgtggcagaagaagagaccctggagaaacatctgagaccaaagcaaaagcctaagaactctaagcattgcagagacgccaagtttgaaggaactcgaattccacacctggtgaagaaaaggcgttaccagaagcaagacagtgaaaacaagagtgaggccaaggaacagagcaatgacgattatgttttggaaaagcttttcaaaaaatcagttggcgtgcacagtgtcatgaagcacgatgccatcatggatggagccagcccagattatgtactggtggaggcagaagccaaccgagtggcccaggatgccctgaaagcactgaggctctctcgtcagcggtgtctgggagcagtgtctggtgttcccacctggactggccacagggggatttctggtgcaccagcaggaaaaaagagtagatttggtaagaaaaggaattctaacttctctgtgcagcatccttcatcaacatctccaacagagaagtgccaggatggcatcatgaaaaaggagggaaaagataatgtccctgagcattttagtggaagagcagaagatgcagactcttcatccgggcccctcgcttcctcctcactcttggctaaaatgagagctagaaaccacctgattctgccagagcgtttagaaagtgaaagcgggcacctgcaggaagcttctgccctgctgcccaccacagaacacgatgaccttctggtggagatgagaaacttcatcgctttccaggcccacactgatggccaggccagcaccagggagatactgcaggagtttgaatccaagttatctgcatcacagtcttgtgtcttccgagaactattgagaaatctgtgcactttccatagaacttctggtggtgaaggaatttggaaactcaagccagaatactgctaaacaacattgcttcctaaactttcaagtccctttttctaacgggcatttctgattattaatttattattaataatcatgtttgtcaatggaagttggctgcacttgatgtttgtttgcatgatgtctacctcagaattaaaactttaaggaagaagaaactcttctctgaaagttaaaagttttaataatgctagctaaaggagaaaatacttggattgatttttttttttttggcaatctaattatattgtaaatcaggtacctaacagttactccttggagcacatttgttcctttacccaaaagatgctgtcagggagcacagttagaagtttgcagaacagaaatctcaatatttttttttattggtgctaaaaacaggtcttacattcagtcagacctgttcaataagttcatcaatatctgataacagcattattttgatgcttaaactttaaacatttatatttaccatttgccacccacaaaggtcaggtttgttatttgttgtttgataattatattaattttcttggaaagatcctcttttcaaggtactggtaaattggtgagtatttttattagtaaagcatgaaatagtatggtaataaatgataagacatgtatttgtggaaagctgtagggtattcagtttaccctggctttcctttaagcagagggcatctttttctctcctacagtcacaaaatgtgttatcattaaaaaaaatcaaattaaagccaaaagtaggtacataaaaaccacacacatgcatgcacacaaacatcactgcagcccacagcagacccagccgttgttaccatgaagtgacaccactccaggcctctcttgtctgcaggctggcaggctgtcttctctccagttgccttcgtcttgcgcctgcctttgcattccttgcgacgggctttcttgtttctgcggtttggattccagccaaggctgtttgtatctcactactgtttatgtgtttgtggttctgtgatggtgttgctttgatcctcagtttattttcttacccatgtttttcttgtttccttctcaggatgattttatcatctcatctttgaagtgttgttttccgaaattcatcgtattcctgaaatttcttcttagctgtcttagtgcagtttgtttcttggatttgtattctctggcatgctcttttcctctctctcatttttctgtagtatgcctgccctcctaccctgctatttctttacatctctctcatgcttaacatggatagctgtgtccagatcttctgtctgctcatccatgtgactcagagaggagggttctgggcaggggggccttgccggactgcatgagaggacatgagttttgctttctctgctctaatattttgcttaagccaagaatccttttcttagagatgttctatatgattcctgtcaggattttctagttttttttggattatagcttgttcatttcttttgtttttagtttggtttatatataatgagggaagaagatgattacattatttttgtcactttgccatcattgtttagaagtcatagaaagaatttttaaataggccaataagtcttaaacttgagtacttggcttagaagaaagtcaaaactccttcctttttgactaagtggtttgtttctggggagctcttaatttctatttttataatcattagcctataaggaaattgtgtcttccttgttctcagggtgatctgctgaccttgttcactcatgaagcatttgggtatcatacttatagtgtctgaaacataaactgtattgagctagacaaggtatagcctcctcttcaagtagcaaatactatcaaaagctataatgcagtaggagcaaggtggtccttgttccagtttttgtctcagttctgctgctgatgtaccatgatcttgggaaggtggtgtctcagtgtggagatctgacacattgttaccgtgcctcctggctggagggacttggagaacaatgcagttaagtagaatggttttaacaatacagagaaatttattcatttagataaaaatctgatttttagaactttaaaagctttgtacagtgtaaatagatttaatgtatttaacatgctttatcagcacaaataaaggattttaaaattttgtcaaaaaattaaatgttaatactatcaccattaaaaatgttcaagcaatagtctgcctccccacccccacaccatcttgcacctgttccacagctaagtacagccctaggtttggtgtgtattctccatgcatttagagaatcacatgacacagactgctgctataatgtcattttcccattcttcctttactaataaaatttttgagtttta

SEQ ID NO: 1926 - DNA, 4482 bp, Artificial Sequence
  derived and/or modified sequence
atgcccaacgagggcatcccccacagcagccagacccaggagcaggactgcctgcagagccagcccgtgagcaacaacgaggagatggccatcaagcaggagagcggcggcgacggcgaggtggaggagtacctgagcttcagaagcgtgggcgacggcctgagcaccagcgccgtgggctgcgccagcgccgcccccagaagaggccccgccctgctgcacatcgacagacaccagatccaggccgtggagcccagcgcccaggccctggagctgcagggcctgggcgtggacgtgtacgaccaggacgtgctggagcagggcgtgctgcagcaggtggacaacgccatccacgaggccagcagagccagccagctggtggacgtggagaaggagtacagaagcgtgctggacgacctgaccagctgcaccaccagcctgagacagatcaacaagatcatcgagcagctgagcccccaggccgccaccagcagagacatcaacagaaagctggacagcgtgaagagacagaagtacaacaaggagcagcagctgaagaagatcaccgccaagcagaagcacctgcaggccatcctgggcggcgccgaggtgaagatcgagctggaccacgccagcctggaggaggacgccgagcccggccccagcagcctgggcagcatgctgatgcccgtgcaggagaccgcctgggaggagctgatcagaaccggccagatgacccccttcggcacccagatcccccagaagcaggagaagaagcccagaaagatcatgctgaacgaggccagcggcttcgagaagtacctggccgaccaggccaagctgagcttcgagagaaagaagcagggctgcaacaagagagccgccagaaaggcccccgcccccgtgaccccccccgcccccgtgcagaacaagaacaagcccaacaagaaggccagagtgctgagcaagaaggaggagagactgaagaagcacatcaagaagctgcagaagagagccctgcagttccagggcaaggtgggcctgcccaaggccagaagaccctgggagagcgacatgagacccgaggccgagggcgacagcgagggcgaggagagcgagtacttccccaccgaggaggaggaggaggaggaggacgacgaggtggagggcgccgaggccgacctgagcggcgacggcaccgactacgagctgaagcccctgcccaagggcggcaagagacagaagaaggtgcccgtgcaggagatcgacgacgacttcttccccagcagcggcgaggaggccgaggccgccagcgtgggcgagggcggcggcggcggcagaaaggtgggcagatacagagacgacggcgacgaggactactacaagcagagactgagaagatggaacaagctgagactgcaggacaaggagaagagactgaagctggaggacgacagcgaggagagcgacgccgagttcgacgagggcttcaaggtgcccggcttcctgttcaagaagctgttcaagtaccagcagaccggcgtgagatggctgtgggagctgcactgccagcaggccggcggcatcctgggcgacgagatgggcctgggcaagaccatccagatcatcgccttcctggccggcctgagctacagcaagatcagaaccagaggcagcaactacagattcgagggcctgggccccaccgtgatcgtgtgccccaccaccgtgatgcaccagtgggtgaaggagttccacacctggtggccccccttcagagtggccatcctgcacgagaccggcagctacacccacaagaaggagaagctgatcagagacgtggcccactgccacggcatcctgatcaccagctacagctacatcagactgatgcaggacgacatcagcagatacgactggcactacgtgatcctggacgagggccacaagatcagaaaccccaacgccgccgtgaccctggcctgcaagcagttcagaaccccccacagaatcatcctgagcggcagccccatgcagaacaacctgagagagctgtggagcctgttcgacttcatcttccccggcaagctgggcaccctgcccgtgttcatggagcagttcagcgtgcccatcaccatgggcggctacagcaacgccagccccgtgcaggtgaagaccgcctacaagtgcgcctgcgtgctgagagacaccatcaacccctacctgctgagaagaatgaagagcgacgtgaagatgagcctgagcctgcccgacaagaacgagcaggtgctgttctgcagactgaccgacgagcagcacaaggtgtaccagaacttcgtggacagcaaggaggtgtacagaatcctgaacggcgagatgcagatcttcagcggcctgatcgccctgagaaagatctgcaaccaccccgacctgttcagcggcggccccaagaacctgaagggcctgcccgacgacgagctggaggaggaccagttcggctactggaagagaagcggcaagatgatcgtggtggagagcctgctgaagatctggcacaagcagggccagagagtgctgctgttcagccagagcagacagatgctggacatcctggaggtgttcctgagagcccagaagtacacctacctgaagatggacggcaccaccaccatcgccagcagacagcccctgatcaccagatacaacgaggacaccagcatcttcgtgttcctgctgaccaccagagtgggcggcctgggcgtgaacctgaccggcgccaacagagtggtgatctacgaccccgactggaaccccagcaccgacacccaggccagagagagagcctggagaatcggccagaagaagcaggtgaccgtgtacagactgctgaccgccggcaccatcgaggagaagatctaccacagacagatcttcaagcagttcctgaccaacagagtgctgaaggaccccaagcagagaagattcttcaagagcaacgacctgtacgagctgttcaccctgaccagccccgacgccagccagagcaccgagaccagcgccatcttcgccggcaccggcagcgacgtgcagacccccaagtgccacctgaagagaagaatccagcccgccttcggcgccgaccacgacgtgcccaagagaaagaagttccccgccagcaacatcagcgtgaacgacgccaccagcagcgaggagaagagcgaggccaagggcgccgaggtgaacgccgtgaccagcaacagaagcgaccccctgaaggacgacccccacatgagcagcaacgtgaccagcaacgacagactgggcgaggagaccaacgccgtgagcggccccgaggagctgagcgtgatcagcggcaacggcgagtgcagcaacagcagcggcaccggcaagaccagcatgcccagcggcgacgagagcatcgacgagaagctgggcctgagctacaagagagagagacccagccaggcccagaccgaggccttctgggagaacaagcagatggagaacaacttctacaagcacaagagcaagaccaagcaccacagcgtggccgaggaggagaccctggagaagcacctgagacccaagcagaagcccaagaacagcaagcactgcagagacgccaagttcgagggcaccagaatcccccacctggtgaagaagagaagataccagaagcaggacagcgagaacaagagcgaggccaaggagcagagcaacgacgactacgtgctggagaagctgttcaagaagagcgtgggcgtgcacagcgtgatgaagcacgacgccatcatggacggcgccagccccgactacgtgctggtggaggccgaggccaacagagtggcccaggacgccctgaaggccctgagactgagcagacagagatgcctgggcgccgtgagcggcgtgcccacctggaccggccacagaggcatcagcggcgcccccgccggcaagaagagcagattcggcaagaagagaaacagcaacttcagcgtgcagcaccccagcagcaccagccccaccgagaagtgccaggacggcatcatgaagaaggagggcaaggacaacgtgcccgagcacttcagcggcagagccgaggacgccgacagcagcagcggccccctggccagcagcagcctgctggccaagatgagagccagaaaccacctgatcctgcccgagagactggagagcgagagcggccacctgcaggaggccagcgccctgctgcccaccaccgagcacgacgacctgctggtggagatgagaaacttcatcgccttccaggcccacaccgacggccaggccagcaccagagagatcctgcaggagttcgagagcaagctgagcgccagccagagctgcgtgttcagagagctgctgagaaacctgtgcaccttccacagaaccagcggcggcgagggcatctggaagctgaagcccgagtactgctag

SEQ ID NO: 1927 - DNA, 2613 bp, Artificial Sequence
  derived and/or modified sequence
cagcagcccttccacagacacctgctgatgaccaccgccctgcacagcgagaagctgatcagagacgtggcccactgccacggcatcctgatcaccagctacagctacatcagactgatgcaggacgacatcagcagatacgactggcactacgtgatcctggacgagggccacaagatcagaaaccccaacgccgccgtgaccctggcctgcaagcagttcagaaccccccacagaatcatcctgagcggcagccccatgcagaacaacctgagagagctgtggagcctgttcgacttcatcttccccggcaagctgggcaccctgcccgtgttcatggagcagttcagcgtgcccatcaccatgggcggctacagcaacgccagccccgtgcaggtgaagaccgcctacaagtgcgcctgcgtgctgagagacaccatcaacccctacctgctgagaagaatgaagagcgacgtgaagatgagcctgagcctgcccgacaagaacgagcagatcttcagcggcctgatcgccctgagaaagatctgcaaccaccccgacctgttcagcggcggccccaagaacctgaagggcctgcccgacgacgagctggaggaggaccagttcggctactggaagagaagcggcaagatgatcgtggtggagagcctgctgaagatctggcacaagcagggccagagagtgctgctgttcagccagagcagacagatgctggacatcctggaggtgttcctgagagcccagaagtacacctacctgaagatggacggcaccaccaccatcgccagcagacagcccctgatcaccagatacaacgaggacaccagcatcttcgtgttcctgctgaccaccagagtgggcggcctgggcgtgaacctgaccggcgccaacagagtggtgatctacgaccccgactggaaccccagcaccgacacccaggccagagagagagcctggagaatcggccagaagaagcaggtgaccgtgtacagactgctgaccgccggcaccatcgaggagaagatctaccacagacagatcttcaagcagttcctgaccaacagagtgctgaaggaccccaagcagagaagattcttcaagagcaacgacctgtacgagctgttcaccctgaccagccccgacgccagccagagcaccgagaccagcgccatcttcgccggcaccggcagcgacgtgcagacccccaagtgccacctgaagagaagaatccagcccgccttcggcgccgaccacgacgtgcccaagagaaagaagttccccgccagcaacatcagcgtgaacgacgccaccagcagcgaggagaagagcgaggccaagggcgccgaggtgaacgccgtgaccagcaacagaagcgaccccctgaaggacgacccccacatgagcagcaacgtgaccagcaacgacagactgggcgaggagaccaacgccgtgagcggccccgaggagctgagcgtgatcagcggcaacggcgagtgcagcaacagcagcggcaccggcaagaccagcatgcccagcggcgacgagagcatcgacgagaagctgggcctgagctacaagagagagagacccagccaggcccagaccgaggccttctgggagaacaagcagatggagaacaacttctacaagcacaagagcaagaccaagcaccacagcgtggccgaggaggagaccctggagaagcacctgagacccaagcagaagcccaagaacagcaagcactgcagagacgccaagttcgagggcaccagaatcccccacctggtgaagaagagaagataccagaagcaggacagcgagaacaagagcgaggccaaggagcagagcaacgacgactacgtgctggagaagctgttcaagaagagcgtgggcgtgcacagcgtgatgaagcacgacgccatcatggacggcgccagccccgactacgtgctggtggaggccgaggccaacagagtggcccaggacgccctgaaggccctgagactgagcagacagagatgcctgggcgccgtgagcggcgtgcccacctggaccggccacagaggcatcagcggcgcccccgccggcaagaagagcagattcggcaagaagagaaacagcaacttcagcgtgcagcaccccagcagcaccagccccaccgagaagtgccaggacggcatcatgaagaaggagggcaaggacaacgtgcccgagcacttcagcggcagagccgaggacgccgacagcagcagcggccccctggccagcagcagcctgctggccaagatgagagccagaaaccacctgatcctgcccgagagactggagagcgagagcggccacctgcaggaggccagcgccctgctgcccaccaccgagcacgacgacctgctggtggagatgagaaacttcatcgccttccaggcccacaccgacggccaggccagcaccagagagatcctgcaggagttcgagagcaagctgagcgccagccagagctgcgtgttcagagagctgctgagaaacctgtgcaccttccacagaaccagcggcggcgagggcatctggaagctgaagcccgagtactgctag

SEQ ID NO: 1928 - DNA, 318 bp, Artificial Sequence
  derived and/or modified sequence
atgagcctgagcctgcccgacaagaacgagcaggtgctgttctgcagactgaccgacgagcagcacaaggtgtaccagaacttcgtggacagcaaggaggtgtacagaatcctgaacggcgagatgcaggaggtgctgcagagcttcaccagcatccacctgcacgagagccccctgaacttcttcagaagcttccaggtgagaggcagcagaagccactaccccggcaagggcatgcagaccaccctgggcatcgtgaacttcctggtggtgaccctgaagagaaagaagagaaacagattcagccccgacctgtag

SEQ ID NO: 1929 - DNA, 2592 bp, Artificial Sequence
  derived and/or modified sequence
atgcaggacgacatcagcagatacgactggcactacgtgatcctggacgagggccacaagatcagaaaccccaacgccgccgtgaccctggcctgcaagcagttcagaaccccccacagaatcatcctgagcggcagccccatgcagaacaacctgagagagctgtggagcctgttcgacttcatcttccccggcaagctgggcaccctgcccgtgttcatggagcagttcagcgtgcccatcaccatgggcggctacagcaacgccagccccgtgcaggtgaagaccgcctacaagtgcgcctgcgtgctgagagacaccatcaacccctacctgctgagaagaatgaagagcgacgtgaagatgagcctgagcctgcccgacaagaacgagcaggtgctgttctgcagactgaccgacgagcagcacaaggtgtaccagaacttcgtggacagcaaggaggtgtacagaatcctgaacggcgagatgcagatcttcagcggcctgatcgccctgagaaagatctgcaaccaccccgacctgttcagcggcggccccaagaacctgaagggcctgcccgacgacgagctggaggaggaccagttcggctactggaagagaagcggcaagatgatcgtggtggagagcctgctgaagatctggcacaagcagggccagagagtgctgctgttcagccagagcagacagatgctggacatcctggaggtgttcctgagagcccagaagtacacctacctgaagatggacggcaccaccaccatcgccagcagacagcccctgatcaccagatacaacgaggacaccagcatcttcgtgttcctgctgaccaccagagtgggcggcctgggcgtgaacctgaccggcgccaacagagtggtgatctacgaccccgactggaaccccagcaccgacacccaggccagagagagagcctggagaatcggccagaagaagcaggtgaccgtgtacagactgctgaccgccggcaccatcgaggagaagatctaccacagacagatcttcaagcagttcctgaccaacagagtgctgaaggaccccaagcagagaagattcttcaagagcaacgacctgtacgagctgttcaccctgaccagccccgacgccagccagagcaccgagaccagcgccatcttcgccggcaccggcagcgacgtgcagacccccaagtgccacctgaagagaagaatccagcccgccttcggcgccgaccacgacgtgcccaagagaaagaagttccccgccagcaacatcagcgtgaacgacgccaccagcagcgaggagaagagcgaggccaagggcgccgaggtgaacgccgtgaccagcaacagaagcgaccccctgaaggacgacccccacatgagcagcaacgtgaccagcaacgacagactgggcgaggagaccaacgccgtgagcggccccgaggagctgagcgtgatcagcggcaacggcgagtgcagcaacagcagcggcaccggcaagaccagcatgcccagcggcgacgagagcatcgacgagaagctgggcctgagctacaagagagagagacccagccaggcccagaccgaggccttctgggagaacaagcagatggagaacaacttctacaagcacaagagcaagaccaagcaccacagcgtggccgaggaggagaccctggagaagcacctgagacccaagcagaagcccaagaacagcaagcactgcagagacgccaagttcgagggcaccagaatcccccacctggtgaagaagagaagataccagaagcaggacagcgagaacaagagcgaggccaaggagcagagcaacgacgactacgtgctggagaagctgttcaagaagagcgtgggcgtgcacagcgtgatgaagcacgacgccatcatggacggcgccagccccgactacgtgctggtggaggccgaggccaacagagtggcccaggacgccctgaaggccctgagactgagcagacagagatgcctgggcgccgtgagcggcgtgcccacctggaccggccacagaggcatcagcggcgcccccgccggcaagaagagcagattcggcaagaagagaaacagcaacttcagcgtgcagcaccccagcagcaccagccccaccgagaagtgccaggacggcatcatgaagaaggagggcaaggacaacgtgcccgagcacttcagcggcagagccgaggacgccgacagcagcagcggccccctggccagcagcagcctgctggccaagatgagagccagaaaccacctgatcctgcccgagagactggagagcgagagcggccacctgcaggaggccagcgccctgctgcccaccaccgagcacgacgacctgctggtggagatgagaaacttcatcgccttccaggcccacaccgacggccaggccagcaccagagagatcctgcaggagttcgagagcaagctgagcgccagccagagctgcgtgttcagagagctgctgagaaacctgtgcaccttccacagaaccagcggcggcgagggcatctggaagctgaagcccgagtactgctag

SEQ ID NO: 1930 - DNA, 4482 bp, Artificial Sequence
  derived and/or modified sequence
atgccaaatgagggcattccccattcttcacagacccaggagcaggactgtctgcagagccaacctgtcagtaacaacgaagagatggccataaagcaggagagcggcggcgatggcgaggtggaggagtacttgagtttccgcagtgtgggcgatggtctgtctacctcagccgtcggctgcgccagcgcagcccccagaagggggcccgcgttgcttcatattgatcggcaccagattcaggctgtagaaccatctgctcaagccctggagcttcagggattgggagtcgacgtatatgaccaggacgtgctggaacaaggtgtcttacagcaggtggataacgctattcacgaggccagcagagcctctcagctggtggacgtggagaaggaatatcgttctgtcttggacgacctcactagttgcactaccagtctgcggcaaatcaataaaattatagaacagctttctccccaggcagccacttctcgcgacattaatcgcaagctggattctgtgaaacggcaaaagtacaataaagagcagcagctgaaaaaaattacagcgaagcaaaaacacttgcaagccattctcggaggggccgaggtcaagatcgaactggaccacgcctccctagaggaagacgctgagccaggtccttccagtctcgggagtatgcttatgccagtccaggaaacagcctgggaggagctgatccgtactgggcagatgaccccattcggcacacaaataccccaaaagcaggagaaaaaaccccgcaagatcatgctgaacgaagcctctggctttgaaaaatacctggccgaccaagctaaactcagttttgagagaaagaaacaggggtgtaacaagagggctgctaggaaggctccggcccctgtaacgccccctgcacccgtccagaacaagaataaacctaataagaaagccagggttctgtctaagaaggaggagagactgaaaaagcacataaagaagctccaaaagcgagctttgcagtttcagggcaaagttggcttgcccaaggctagacgaccttgggagagcgacatgaggccggaagccgaaggggactccgagggagaggagtctgagtacttcccgaccgaggaagaggaggaggaagaggacgatgaagtggaaggggccgaagctgacctgagcggcgacgggaccgattacgagctgaagcccctcccaaagggcggcaagcgacagaaaaaggttccagtgcaggagatcgacgatgactttttcccctccagtggagaagaggccgaagcggctagtgtgggggagggcggcggcggcggccggaaagtgggcaggtaccgtgacgacggagatgaggactattataagcaaaggttaaggaggtggaacaagctgagattgcaggataaggaaaagaggctgaagctggaggacgactccgaagaaagcgatgccgaatttgatgagggtttcaaggtacccggctttctttttaaaaaactattcaaatatcagcagaccggcgtgaggtggctgtgggaactgcactgtcagcaagcaggaggcatacttggcgacgagatgggtcttgggaagaccatccagatcatagccttccttgccggactgtcttattccaaaatacgcactaggggctccaattaccggtttgagggcctggggcccacagtgatcgtttgtccaaccactgtgatgcaccaatgggtgaaggagtttcatacgtggtggccaccttttagagtcgcgattctccacgagaccggctcatatacacataaaaaagagaaactcatcagggatgtagcccattgccacgggattttaatcacgtcctatagttatatcagactgatgcaggacgatatcagccgctacgactggcactatgtgatcctggacgaggggcacaaaattcgcaatccaaacgccgctgtcaccctggcatgcaagcagttcaggacacctcatagaatcatcctgtccggtagtcccatgcagaacaacctccgcgaactctggtcactctttgattttatctttcctggtaaactgggcaccctgcctgttttcatggagcagttctcagtgcccatcaccatgggcggctatagcaacgcctcaccagtccaggtcaaaactgcttacaaatgtgcctgcgtgctccgtgacaccataaatccttaccttctgagaaggatgaaaagcgacgtgaaaatgtccctcagtcttcctgacaagaacgaacaggtgctattctgtcggctcaccgatgagcagcacaaggtttaccaaaacttcgtcgactctaaagaagtttatcgaatcctgaacggagaaatgcagatctttagcggtttgattgcgctccgtaagatctgtaatcaccccgatttgttcagtggcggccctaaaaacctaaaaggattgcccgatgacgagctggaagaggaccagttcggatattggaaacggagcggcaaaatgatcgtggtggagagcctgctaaagatctggcataaacaggggcaacgtgttctccttttcagtcaaagccgccagatgctggacattttggaagtattcctgcgggcacagaagtacacctatctgaagatggacggaaccaccaccatcgcctcaaggcagccattaatcacacgttacaatgaagatacctcaatctttgtgtttctgctcaccactcgggtcggaggccttggcgtcaatctgactggcgcgaacagagtggtcatctatgaccccgattggaatcccagcaccgacacacaggctagggaacgcgcttggcggattgggcagaagaaacaagtgaccgtgtaccgcttgctgactgctggcaccattgaagagaaaatttaccatagacagatcttcaaacaatttctgaccaatcgtgtccttaaagaccctaaacagagaagattttttaagtctaacgacctttacgaactgttcaccctgaccagccctgacgcatcccagtccaccgagacaagtgctatttttgctgggactggttccgacgtgcaaacacccaagtgccatcttaaaaggcgcattcaaccggctttcggggccgatcatgatgttccaaaacgaaaaaaattccccgcctccaacataagtgtcaacgacgcaacatcatctgaggaaaagagcgaagccaagggcgctgaggtgaatgccgtaaccagcaacagatctgatccccttaaagatgatcctcacatgagctccaatgtgacttccaatgatcgcttgggagaggaaaccaatgctgtgagtggtcccgaggaactgtcagtcatttctgggaatggagagtgcagcaacagctctggcaccgggaagaccagtatgccaagtggggacgagagcatcgacgaaaagctaggcctgtcctataaaagggaacggcctagtcaagcgcaaaccgaagccttctgggaaaacaagcagatggagaacaacttttacaagcacaaatccaagactaagcatcatagcgtcgcagaggaagagacgctggagaaacatctgagacctaagcagaaacctaagaatagtaaacattgtagggatgcaaagttcgaaggaactcgtatacctcacttagtgaagaagagacgttaccagaaacaggattcggaaaataaaagcgaagcgaaggaacaatcgaatgatgactacgtgttagagaagctcttcaagaagtccgtcggggttcatagcgtcatgaagcatgatgctattatggatggcgcctcacccgactatgtgcttgttgaggcagaagcaaacagagttgcccaggacgcgctgaaggctctcagactgtccagacaaaggtgcctgggggctgtgtctggagtgcctacatggaccggccacaggggcatctccggagcacctgcgggcaaaaagtcaagattcggtaaaaagcggaacagcaacttcagcgtgcagcaccctagttccacatctccaaccgaaaagtgccaggatggcatcatgaaaaaggagggcaaggataatgttcccgagcactttagtgggcgagccgaggacgctgatagttcatcaggccctctggcgtcatctagcctactggccaagatgagggctaggaaccacctcatcctgccagagagacttgaatcggagagcggccacttgcaggaggcatctgcgttgttgccgactacagagcatgacgacctgctggtagagatgcggaactttatcgcctttcaagcacatacagacggtcaggccagcaccagggaaattctccaggaattcgaatctaagttgtccgcgtctcagagctgtgtgtttcgagagctgcttcgcaatttgtgcactttccaccgcactagtggaggtgagggtatctggaagctcaaacccgaatactgttag

SEQ ID NO: 1931 - DNA, 2613 bp, Artificial Sequence
  derived and/or modified sequence
cagcagccattccataggcatttgctgatgacgactgccttacattcggagaaactgatccgcgacgtggctcactgccacggaattctgatcacgagttactcatatatccgcctcatgcaggatgatatttccaggtacgactggcactacgtgatcctggacgagggccataagattcgaaatccgaatgccgcggtcaccttagcctgcaagcagttcagaacccctcaccgcatcatactgtctggatcccctatgcagaacaatctgagagaactgtggtctctttttgatttcatttttcccggcaaattgggtacgttaccggtctttatggaacagttctccgtgccaattaccatggggggctattccaatgcaagccccgttcaggttaaaaccgcttataaatgtgcctgtgtactgagagacaccattaatccatacctgttacgccgtatgaagtccgatgtgaagatgagtctctctctcccagacaaaaatgaacagatcttctcaggactgattgccctgaggaaaatttgcaaccatcctgatctgttctctgggggcccaaaaaatctcaaagggctacctgatgatgagttggaggaagaccagttcggctactggaaaagatctggtaaaatgatcgtggttgaaagcctgctgaagatctggcataagcaggggcagagagttctcctatttagtcagagccgccagatgctggatattttggaggtctttttgagagctcagaagtatacctacctaaagatggacggaaccactacgattgcctcacggcagcccctgattacacggtacaacgaagacacaagtatttttgtgttcttactgacaacacgggtgggcggattgggcgtaaatctgaccggcgccaaccgcgtagttatatacgatcccgattggaacccttctacagatacccaagcgcgagaaagagcctggaggattggacaaaagaaacaagtgacagtgtatcgcttgctgactgccggcactattgaggaaaagatttaccatcgtcagattttcaagcagttcctcaccaaccgcgttctcaaagacccaaaacaacgacggttctttaagtctaacgacctgtacgagctgttcactctgacctcccccgatgcctcgcagtccacagagacgagcgctatctttgccggtaccgggagtgacgttcagacccctaaatgtcatctgaagagaaggattcagcctgcttttggtgccgatcatgatgtccccaagaggaagaaatttccggcgtccaacataagcgttaacgacgctacatcatcagaagagaagtcggaagcaaagggcgcagaagttaacgccgtgacgtccaatcgcagcgatcccctgaaggacgacccacatatgagttccaatgtcacttccaacgatagactgggcgaggaaaccaacgctgtgtcagggcctgaggagctgagcgtgatctccgggaacggtgagtgtagtaattcgtccggcaccggcaagacatccatgccctcaggcgacgagagcattgatgaaaaactgggactttcctataaaagagaacgtcccagccaggcccagacggaggccttctgggaaaataagcagatggagaacaatttttacaagcacaaaagcaagaccaagcaccactctgttgcagaggaggaaaccctcgaaaaacaccttcggcccaagcagaagcccaagaacagcaaacactgccgagacgcgaaatttgagggaactagaattcctcacctggttaaaaagaggcgataccagaaacaagactcagagaacaagtcagaggcaaaagagcaaagtaatgacgactatgttcttgagaaactttttaagaaaagtgtcggagtccactccgtaatgaagcacgacgcaattatggatggagccagccctgactacgtcctcgtggaggccgaggccaacagagtggcccaggatgccctgaaagctttgagactgtctcgtcagagatgtctgggcgcagtcagcggtgtccccacttggactggccaccgcgggatcagcggggctccagctggtaaaaagtcaaggttcggcaaaaagcgcaattccaacttttctgtgcagcacccttcttcaacaagccctactgaaaagtgtcaggacggtataatgaagaaggagggcaaggataatgttcctgaacatttctctggccgagcagaagacgctgactcctcatccgggcccctagcatctagctctctgcttgcaaaaatgagagcaagaaatcatttaatcctacctgagcgcttggagtcagaatccggccacctgcaggaagcctctgccttactgcccactaccgaacacgacgacctgcttgtagagatgcgaaattttatagcctttcaggctcataccgatggacaggcatccacaagggaaatcctgcaggaattcgagtccaagctttccgcgtcccagtcttgtgtttttcgggagcttctgcgcaacctctgtaccttccaccgaacgagcgggggagagggtatctggaaactcaaacccgagtactgctag

SEQ ID NO: 1932 - DNA, 318 bp, Artificial Sequence
  derived and/or modified sequence
atgtcgctgagtttgcccgataaaaacgagcaagtgctgttctgccgcctgacggacgaacagcacaaagtctatcagaactttgtggacagtaaggaagtatacagaatactcaacggagaaatgcaagaggttctccagtcctttacatccattcatctgcacgaaagcccactgaacttctttaggtcgttccaagttcgcgggagccgatcccactaccccggtaaaggcatgcagacaaccctcggcattgtgaacttcttggttgtaactctcaaaagaaagaagcgcaatcggttcagtccagacctgtag

SEQ ID NO: 1933 - DNA, 2592 bp, Artificial Sequence
  derived and/or modified sequence
atgcaggacgatatctccagatatgactggcattacgtaatactggacgaggggcacaaaatcaggaatccgaacgccgcagtgacattggcgtgcaagcaatttcgcacgcctcaccgcattattctctcgggatcacccatgcagaataatctacgcgaactatggtctctgtttgacttcatttttccaggtaagctgggaaccctaccagtgttcatggagcagttcagtgtgccaatcaccatgggggggtactctaacgctagccccgtccaggtgaagacagcttacaagtgcgcatgcgtccttcgagacactataaatccttatttgcttcgtagaatgaagtcagacgtgaaaatgtcactgtcactgcctgacaaaaacgagcaagtactcttttgcagactgaccgacgaacaacacaaagtctatcagaattttgtggactccaaggaagtgtacaggattttaaatggagaaatgcagatctttagcgggctcatcgcgctgcggaagatttgtaatcacccagacttattttcaggagggcctaagaacctcaaaggcttacctgacgatgaactggaagaagaccagttcgggtactggaagagaagcggcaagatgatagtggtcgagtctctgttaaagatttggcataaacagggccagcgcgtactgctgttcagtcagtcgaggcaaatgctggacattctggaggtatttttgagagcacaaaaatacacttatttgaagatggacgggacaactacaatagcatcccggcagcccctcatcacacggtataatgaagacaccagtatctttgtgtttttgctgacaacacgagtcggcggtctgggcgtaaacctaactggagccaatagggtggtgatttacgacccagattggaatccgtctaccgacacacaagcaagggagcgcgcctggcggataggtcagaaaaagcaagtgaccgtctatagacttctgacggcggggaccattgaagagaagatctatcatagacagatcttcaaacagttcctgacaaaccgggtcttaaaggacccaaaacaacgtagattcttcaagagtaacgacctttatgagttgttcactttgacgagtcccgatgcttcccaaagtaccgagacaagcgccatatttgctggtaccggcagtgatgtgcagactccaaagtgtcacctgaaaaggagaattcagcccgccttcggagctgatcatgacgtccccaaaaggaagaagttccctgcttctaatatttccgttaatgacgctaccagttccgaggagaaatcagaggccaaaggagctgaggtcaacgctgtgactagcaatagatccgacccactgaaggacgaccctcacatgagcagtaacgtgacttcgaacgataggctgggcgaggagaccaacgccgtgtccggcccagaagagttgtctgtgatttccgggaacggtgagtgcagcaatagtagtggtaccggaaaaaccagcatgccctcaggtgacgaaagcatcgatgagaaactcggcctcagttacaaacgcgaacggccatcccaggcccagacagaagcattttgggagaataaacagatggaaaataatttctacaagcataaatctaagaccaaacaccattctgttgcagaagaggagactttggagaaacacctgcgacctaaacagaaacccaagaactcaaagcattgccgtgatgcaaagtttgaggggaccaggattccccatttggttaagaaacggagataccagaaacaggatagtgaaaacaagagcgaggccaaagaacagtctaatgatgactacgtccttgaaaagttattcaaaaaaagcgtcggtgtgcatagcgtgatgaagcacgacgcgattatggacggcgccagtcccgactacgtactggtagaggctgaggccaaccgggtggcacaagacgcccttaaggcccttcgcctctccaggcagcgttgcttgggcgccgtttctggagtgccaacctggaccggccaccgcgggatttcaggggctcccgccgggaagaaaagtaggtttggaaaaaagcgtaattcaaattttagtgtgcagcacccttcatctaccagccccactgagaagtgccaggatggcatcatgaagaaagagggaaaagacaacgtccctgaacacttctcagggcgagccgaagacgccgactcctcaagtggaccattagcctcgagtagcttactcgctaaaatgagggcacggaaccatctgatccttccggaacgacttgagtccgagtcaggtcacttgcaagaagcctccgctctcctgcctaccacggagcatgacgatctcctggtggaaatgcggaattttattgccttccaggcccacactgacggtcaggcttctacccgcgagatcctgcaggagttcgagagtaagctgagcgcaagccagtcttgcgtattccgcgagcttcttcgcaacctgtgcacttttcaccggacatctggcggcgagggaatttggaagctcaaacctgagtactgttag

SEQ ID NO: 1934 - DNA, 8008 bp, Artificial Sequence
  derived and/or modified sequence
tgggttccaaggcggctggcggcggtagcgtctctgtttccttgtgggcgctcgcgcggccctgggtagtctgtagagaatgccaaatgagggaatcccccactcaagtcaaactcaggagcaagactgtttacagagtcaacctgtcagtaataatgaagaaatggcaatcaagcaagaaagtggtggtgatggggaggtggaggagtacctctcctttcgttctgtgggtgacgggctgtccacctctgctgtggggtgcgcatcagcagctccgaggagagggccagccctgctgcacatcgaccgacatcagatccaggcagtagagcctagcgcccaggcccttgagctgcagggtttgggtgtggacgtctatgaccaggacgtgctggaacagggagtgcttcagcaggtggacaatgccatccatgaggccagccgtgcctcccagctcgttgacgtggagaaggagtatcggtcggtcctggatgacctcacgtcatgtacgacatccctaaggcaaatcaataaaattattgaacagcttagccctcaagctgccaccagcagagacatcaacaggaaactagattctgtaaaacgacagaagtataataaggaacaacagctaaaaaagatcactgcaaaacaaaagcatctccaggccatccttggaggagcagaggtgaaaattgaactagatcacgccagtctggaggaggatgcagagccggggccatccagtcttggcagcatgctcatgcctgtccaggagactgcctgggaagagctcatccgcactggccagatgacaccttttggtacccagatccctcagaaacaggagaaaaagcccagaaaaatcatgcttaatgaagcatcaggcttcgaaaagtatttggcagatcaagcaaaactgtcttttgaaaggaagaagcaaggttgtaataaaagagcagctagaaaagctccagccccagtcacgcctccagccccagtgcaaaataaaaacaaaccaaacaagaaagccagagttctgtccaaaaaagaggagcgtttgaaaaagcacatcaagaaactccagaagagggctttgcagttccaggggaaagtgggattgccaaaggcaaggagaccttgggagtcagacatgaggccagaggcagagggagactctgagggtgaagagtctgagtatttccccacagaggaggaggaagaggaggaagatgacgaggtggagggggcagaggcggacctgtctggagatggtactgactatgagctgaagcctctgcccaagggcgggaaacggcagaagaaagtgccagtgcaggagattgatgatgactttttcccaagttctggggaagaagctgaagctgcttctgtaggagaaggaggaggaggaggtcggaaagtgggaagataccgagatgatggagatgaagattattataagcagcggttaaggagatggaataaactgagactgcaggacaaagagaaacgtctgaagctggaggacgattctgaggaaagtgatgctgaatttgacgaaggttttaaagtgccaggttttctgttcaaaaagctttttaagtaccagcagacaggtgttaggtggctgtgggaattgcactgccagcaggcaggaggaattctgggagatgaaatgggattgggcaagaccatccagataattgccttcttggcaggtctgagctacagcaagatcaggactcgtggttcaaattacaggtttgaggggttgggtccaactgtaattgtctgtccaacaacagtgatgcatcagtgggtgaaggaatttcacacgtggtggcctccgttcagagtggcaattctacatgaaaccggttcctatacccacaaaaaggagaaactaattcgagatgttgctcattgtcatggaattttgatcacatcttactcctacattcgattgatgcaggatgacattagcaggtatgactggcactatgtgatcttggacgaaggacacaaaattcgaaatccaaatgctgctgtcacccttgcttgcaaacagtttcgcacccctcatcggatcattctgtctggctcaccgatgcaaaataacctccgagagctgtggtcgctctttgacttcatcttcccgggaaagttaggcacgttgcctgtgtttatggagcagttctccgtccccatcaccatggggggatattcaaatgcttccccagtacaggtcaaaactgcttacaagtgtgcatgtgtcttacgagataccataaatccatacctactgcggagaatgaagtcagatgtcaagatgagcctttctttgccagataaaaatgaacaggtcttattttgccgtcttacagatgagcagcataaagtctaccaaaatttcgttgattccaaagaagtttacaggattctcaatggagagatgcagattttctccggacttatagccctaagaaaaatttgcaaccaccctgatctcttttctggaggtcccaagaatctcaaaggtcttcctgatgatgaactagaagaagatcagtttgggtactggaaacgttctgggaaaatgattgttgttgagtctttgttgaaaatatggcacaagcagggtcagcgagtattgctgttttctcagtcaaggcagatgctggacatacttgaagtattccttagagcccaaaagtatacctatctcaagatggatggtaccactacaatagcttcaagacagccactgattacgagatacaatgaggacacatccatatttgtgtttcttctgaccacgcgggtgggcggcttaggtgtcaacctgacgggggcaaacagagttgtcatctatgacccagactggaacccaagcacggacacgcaggcccgggagcgagcatggagaataggccagaagaagcaagtgactgtgtacaggctcctgactgcgggcaccattgaagaaaagatctaccaccgacaaatcttcaagcagtttttgacaaatagagtgctaaaagacccaaaacaaaggcggtttttcaaatccaatgatctctatgagctatttactctgactagtcctgatgcatcccagagcactgaaacaagtgcaatttttgcaggaactggatcagatgttcagacacccaaatgccatctaaaaagaaggattcaaccagcctttggagcagaccatgatgttccaaaacgcaagaagttccctgcttctaacatatctgtaaatgatgccacatcatctgaagagaaatctgaggctaaaggagctgaagtaaatgcagtaacttctaatcgaagtgatcctttgaaagatgaccctcacatgagtagtaatgtaactagcaatgataggcttggagaagagacaaatgcagtatctggaccagaagagttgtcagtgattagtggaaatggggaatgttcaaattcttcaggaacaggcaaaacttctatgccatctggtgatgaaagcattgatgaaaagttaggtctttcttacaaaagagaaagacccagccaggctcaaacagaagctttttgggagaataaacaaatggaaaataatttttataagcacaagtcaaaaacaaaacatcatagtgtggcagaagaagagaccctggagaaacatctgagaccaaagcaaaagcctaagaactctaagcattgcagagacgccaagtttgaaggaactcgaattccacacctggtgaagaaaaggcgttaccagaagcaagacagtgaaaacaagagtgaggccaaggaacagagcaatgacgattatgttttggaaaagcttttcaaaaaatcagttggcgtgcacagtgtcatgaagcacgatgccatcatggatggagccagcccagattatgtactggtggaggcagaagccaaccgagtggcccaggatgccctgaaagcactgaggctctctcgtcagcggtgtctgggagcagtgtctggtgttcccacctggactggccacagggggatttctggtgcaccagcaggaaaaaagagtagatttggtaagaaaaggaattctaacttctctgtgcagcatccttcatcaacatctccaacagagaagtgccaggatggcatcatgaaaaaggagggaaaagataatgtccctgagcattttagtggaagagcagaagatgcagactcttcatccgggcccctcgcttcctcctcactcttggctaaaatgagagctagaaaccacctgattctgccagagcgtttagaaagtgaaagcgggcacctgcaggaagcttctgccctgctgcccaccacagaacacgatgaccttctggtggagatgagaaacttcatcgctttccaggcccacactgatggccaggccagcaccagggagatactgcaggagtttgaatccaagttatctgcatcacagtcttgtgtcttccgagaactattgagaaatctgtgcactttccatagaacttctggtggtgaaggaatttggaaactcaagccagaatactgctaaacaacattgcttcctaaactttcaagtccctttttctaacgggcatttctgattattaatttattattaataatcatgtttgtcaatggaagttggctgcacttgatgtttgtttgcatgatgtctacctcagaattaaaactttaaggaagaagaaactcttctctgaaagttaaaagttttaataatgctagctaaaggagaaaatacttggattgatttttttttttttggcaatctaattatattgtaaatcaggtacctaacagttactccttggagcacatttgttcctttacccaaaagatgctgtcagggagcacagttagaagtttgcagaacagaaatctcaatatttttttttattggtgctaaaaacaggtcttacattcagtcagacctgttcaataagttcatcaatatctgataacagcattattttgatgcttaaactttaaacatttatatttaccatttgccacccacaaaggtcaggtttgttatttgttgtttgataattatattaattttcttggaaagatcctcttttcaaggtactggtaaattggtgagtatttttattagtaaagcatgaaatagtatggtaataaatgataagacatgtatttgtggaaagctgtagggtattcagtttaccctggctttcctttaagcagagggcatctttttctctcctacagtcacaaaatgtgttatcattaaaaaaaatcaaattaaagccaaaagtaggtacataaaaaccacacacatgcatgcacacaaacatcactgcagcccacagcagacccagccgttgttaccatgaagtgacaccactccaggcctctcttgtctgcaggctggcaggctgtcttctctccagttgccttcgtcttgcgcctgcctttgcattccttgcgacgggctttcttgtttctgcggtttggattccagccaaggctgtttgtatctcactactgtttatgtgtttgtggttctgtgatggtgttgctttgatcctcagtttattttcttacccatgtttttcttgtttccttctcaggatgattttatcatctcatctttgaagtgttgttttccgaaattcatcgtattcctgaaatttcttcttagctgtcttagtgcagtttgtttcttggatttgtattctctggcatgctcttttcctctctctcatttttctgtagtatgcctgccctcctaccctgctatttctttacatctctctcatgcttaacatggatagctgtgtccagatcttctgtctgctcatccatgtgactcagagaggagggttctgggcaggggggccttgccggactgcatgagaggacatgagttttgctttctctgctctaatattttgcttaagccaagaatccttttcttagagatgttctatatgattcctgtcaggattttctagttttttttggattatagcttgttcatttcttttgtttttagtttggtttatatataatgagggaagaagatgattacattatttttgtcactttgccatcattgtttagaagtcatagaaagaatttttaaataggccaataagtcttaaacttgagtacttggcttagaagaaagtcaaaactccttcctttttgactaagtggtttgtttctggggagctcttaatttctatttttataatcattagcctataaggaaattgtgtcttccttgttctcagggtgatctgctgaccttgttcactcatgaagcatttgggtatcatacttatagtgtctgaaacataaactgtattgagctagacaaggtatagcctcctcttcaagtagcaaatactatcaaaagctataatgcagtaggagcaaggtggtccttgttccagtttttgtctcagttctgctgctgatgtaccatgatcttgggaaggtggtgtctcagtgtggagatctgacacattgttaccgtgcctcctggctggagggacttggagaacaatgcagttaagtagaatggttttaacaatacagagaaatttattcatttagataaaaatctgatttttagaactttaaaagctttgtacagtgtaaatagatttaatgtatttaacatgctttatcagcacaaataaaggattttaaaattttgtcaaaaaattaaatgttaatactatcaccattaaaaatgttcaagcaatagtctgcctccccacccccacaccatcttgcacctgttccacagctaagtacagccctaggtttggtgtgtattctccatgcatttagagaatcacatgacacagactgctgctataatgtcattttcccattcttcctttactaataaaatttttgagttttacctggacgtctggctgctcagcttaagactacttctcagcctctcttatagttaattgtggccatatgactaagttttaaacttcccaattggccctttaaagaagcagggtatgcactctccttgacattcccctttcttgctggctgggaggccaatgggagcttcagtagtgacctggcatctcaagagatggaagtgatgtgttgaggaaggagaagttggcctgccagtcttgaactgctctcctttgacctgttatttaagagtaaaataaaatactgacttgcttaagctactgtcttttgaagtctattatagcaattagtttgctttaaatatgtaatttatattaatggccttataccatccttattttgcaactaacttttcatttaatattatatgcaagacatttctattcctgtaagtatagctctgcctgcacagaattgttggattaatgatgtagattttaaatgtcagtggatgtagcagaattgcttgcatcaattcaccctccataaaaggacccatttctccaaacccttgccaacagtaagtggtatcaatatcgataggttgttttgttttgttttaaccagtctcgtgattgaaagtaccttgttttcacttgaatttccctgattacgtacaaaatcaaacatttccatgtttattggccatttgtagatctctaccgtacattgcctattagtgttatgttggcctagttttcctgtgggttgtttatcttttaggattgctcccctaaacaaaaacaaaaaggcagttattccaatgatcaacaaatattcttttctccaccagtttaaaatgtcagctttcaactcatcacatgctaagttgtctatttctgtcctgtggatccaggtgttggttctaccaaccacactcctcacgctgtcatttggtgctttgcattgtgttttgccattcatgggcaagttccttttcctttctccccctcttcagtgtcttatacttgggtgttttctgttccagctgaatcaagaattagtttattaaattccagtaaaattgtggtgttctttt

SEQ ID NO: 1935 - DNA, 4983 bp, Artificial Sequence
  derived and/or modified sequence
cagcagccctttcacagacatcttctaatgacaacagcactgcattcagagaaactaattcgagatgttgctcattgtcatggaattttgatcacatcttactcctacattcgattgatgcaggatgacattagcaggtatgactggcactatgtgatcttggacgaaggacacaaaattcgaaatccaaatgctgctgtcacccttgcttgcaaacagtttcgcacccctcatcggatcattctgtctggctcaccgatgcaaaataacctccgagagctgtggtcgctctttgacttcatcttcccgggaaagttaggcacgttgcctgtgtttatggagcagttctccgtccccatcaccatggggggatattcaaatgcttccccagtacaggtcaaaactgcttacaagtgtgcatgtgtcttacgagataccataaatccatacctactgcggagaatgaagtcagatgtcaagatgagcctttctttgccagataaaaatgaacagattttctccggacttatagccctaagaaaaatttgcaaccaccctgatctcttttctggaggtcccaagaatctcaaaggtcttcctgatgatgaactagaagaagatcagtttgggtactggaaacgttctgggaaaatgattgttgttgagtctttgttgaaaatatggcacaagcagggtcagcgagtattgctgttttctcagtcaaggcagatgctggacatacttgaagtattccttagagcccaaaagtatacctatctcaagatggatggtaccactacaatagcttcaagacagccactgattacgagatacaatgaggacacatccatatttgtgtttcttctgaccacgcgggtgggcggcttaggtgtcaacctgacgggggcaaacagagttgtcatctatgacccagactggaacccaagcacggacacgcaggcccgggagcgagcatggagaataggccagaagaagcaagtgactgtgtacaggctcctgactgcgggcaccattgaagaaaagatctaccaccgacaaatcttcaagcagtttttgacaaatagagtgctaaaagacccaaaacaaaggcggtttttcaaatccaatgatctctatgagctatttactctgactagtcctgatgcatcccagagcactgaaacaagtgcaatttttgcaggaactggatcagatgttcagacacccaaatgccatctaaaaagaaggattcaaccagcctttggagcagaccatgatgttccaaaacgcaagaagttccctgcttctaacatatctgtaaatgatgccacatcatctgaagagaaatctgaggctaaaggagctgaagtaaatgcagtaacttctaatcgaagtgatcctttgaaagatgaccctcacatgagtagtaatgtaactagcaatgataggcttggagaagagacaaatgcagtatctggaccagaagagttgtcagtgattagtggaaatggggaatgttcaaattcttcaggaacaggcaaaacttctatgccatctggtgatgaaagcattgatgaaaagttaggtctttcttacaaaagagaaagacccagccaggctcaaacagaagctttttgggagaataaacaaatggaaaataatttttataagcacaagtcaaaaacaaaacatcatagtgtggcagaagaagagaccctggagaaacatctgagaccaaagcaaaagcctaagaactctaagcattgcagagacgccaagtttgaaggaactcgaattccacacctggtgaagaaaaggcgttaccagaagcaagacagtgaaaacaagagtgaggccaaggaacagagcaatgacgattatgttttggaaaagcttttcaaaaaatcagttggcgtgcacagtgtcatgaagcacgatgccatcatggatggagccagcccagattatgtactggtggaggcagaagccaaccgagtggcccaggatgccctgaaagcactgaggctctctcgtcagcggtgtctgggagcagtgtctggtgttcccacctggactggccacagggggatttctggtgcaccagcaggaaaaaagagtagatttggtaagaaaaggaattctaacttctctgtgcagcatccttcatcaacatctccaacagagaagtgccaggatggcatcatgaaaaaggagggaaaagataatgtccctgagcattttagtggaagagcagaagatgcagactcttcatccgggcccctcgcttcctcctcactcttggctaaaatgagagctagaaaccacctgattctgccagagcgtttagaaagtgaaagcgggcacctgcaggaagcttctgccctgctgcccaccacagaacacgatgaccttctggtggagatgagaaacttcatcgctttccaggcccacactgatggccaggccagcaccagggagatactgcaggagtttgaatccaagttatctgcatcacagtcttgtgtcttccgagaactattgagaaatctgtgcactttccatagaacttctggtggtgaaggaatttggaaactcaagccagaatactgctaaacaacattgcttcctaaactttcaagtccctttttctaacgggcatttctgattattaatttattattaataatcatgtttgtcaatggaagttggctgcacttgatgtttgtttgcatgatgtctacctcagaattaaaactttaaggaagaagaaactcttctctgaaagttaaaagttttaataatgctagctaaaggagaaaatacttggattgatttttttttttttggcaatctaattatattgtaaatcaggtacctaacagttactccttggagcacatttgttcctttacccaaaagatgctgtcagggagcacagttagaagtttgcagaacagaaatctcaatatttttttttattggtgctaaaaacaggtcttacattcagtcagacctgttcaataagttcatcaatatctgataacagcattattttgatgcttaaactttaaacatttatatttaccatttgccacccacaaaggtcaggtttgttatttgttgtttgataattatattaattttcttggaaagatcctcttttcaaggtactggtaaattggtgagtatttttattagtaaagcatgaaatagtatggtaataaatgataagacatgtatttgtggaaagctgtagggtattcagtttaccctggctttcctttaagcagagggcatctttttctctcctacagtcacaaaatgtgttatcattaaaaaaaatcaaattaaagccaaaagtaggtacataaaaaccacacacatgcatgcacacaaacatcactgcagcccacagcagacccagccgttgttaccatgaagtgacaccactccaggcctctcttgtctgcaggctggcaggctgtcttctctccagttgccttcgtcttgcgcctgcctttgcattccttgcgacgggctttcttgtttctgcggtttggattccagccaaggctgtttgtatctcactactgtttatgtgtttgtggttctgtgatggtgttgctttgatcctcagtttattttcttacccatgtttttcttgtttccttctcaggatgattttatcatctcatctttgaagtgttgttttccgaaattcatcgtattcctgaaatttcttcttagctgtcttagtgcagtttgtttcttggatttgtattctctggcatgctcttttcctctctctcatttttctgtagtatgcctgccctcctaccctgctatttctttacatctctctcatgcttaacatggatagctgtgtccagatcttctgtctgctcatccatgtgactcagagaggagggttctgggcaggggggccttgccggactgcatgagaggacatgagttttgctttctctgctctaatattttgcttaagccaagaatccttttcttagagatgttctatatgattcctgtcaggattttctagttttttttggattatagcttgttcatttcttttgtttttagtttggtttatatataatgagggaagaagatgattacattatttttgtcactttgccatcattgtttagaagtcatagaaagaatttttaaataggccaataagtcttaaacttgagtacttggcttagaagaaagtcaaaactccttcctttttgactaagtggtttgtttctggggagctcttaatttctatttttataatcattagcctataaggaaattgtgtcttccttgttctcagggtgatctgctgaccttgttcactcatgaagcatttgggtatcatacttatagtgtctgaaacataaactgtattgagctagacaaggtatagcctcctcttcaagtagcaaatactatcaaaagctataatgcagtaggagcaaggtggtccttgttccagtttttgtctcagttctgctgctgatgtaccatgatcttgggaaggtggtgtctcagtgtggagatctgacacattgttaccgtgcctcctggctggagggacttggagaacaatgcagttaagtagaatggttttaacaatacagagaaatttattcatttagataaaaatctgatttttagaactttaaaagctttgtacagtgtaaatagatttaatgtatttaacatgctttatcagcacaaataaaggattttaaaattttgtcaaaaaattaaatgttaatactatcaccattaaaaatgttcaagcaatagtctgcctccccacccccacaccatcttgcacctgttccacagctaagtacagccctaggtttggtgtgtattctccatgcatttagagaatcacatgacacagactgctgctataatgtcattttcccattcttcctttactaataaaatttttgagtttta

SEQ ID NO: 1936 - DNA, 2256 bp, Artificial Sequence
  derived and/or modified sequence
aagtgatgctgaatttgacgaaggttttaaagtgccaggttttctgttcaaaaagctttttaagtaccagcagacaggtgttaggtggctgtgggaattgcactgccagcaggcaggaggaattctgggagatgaaatgggattgggcaagaccatccagataattgccttcttggcaggtctgagctacagcaagatcaggactcgtggttcaaattacaggtttgaggggttgggtccaactgtaattgtctgtccaacaacagtgatgcatcagtgggtgaaggaatttcacacgtggtggcctccgttcagagtggcaattctacatgaaaccggttcctatacccacaaaaaggagaaactaattcgagatgttgctcattgtcatggaattttgatcacatcttactcctacattcgattgatgcaggatgacattagcaggtatgactggcactatgtgatcttggacgaaggacacaaaattcgaaatccaaatgctgctgtcacccttgcttgcaaacagtttcgcacccctcatcggatcattctgtctggctcaccgatgcaaaataacctccgagagctgtggtcgctctttgacttcatcttcccgggaaagttaggcacgttgcctgtgtttatggagcagttctccgtccccatcaccatggggggatattcaaatgcttccccagtacaggtcaaaactgcttacaagtgtgcatgtgtcttacgagataccataaatccatacctactgcggagaatgaagtcagatgtcaagatgagcctttctttgccagataaaaatgaacaggtcttattttgccgtcttacagatgagcagcataaagtctaccaaaatttcgttgattccaaagaagtttacaggattctcaatggagagatgcaggaggttcttcagtcattcacatctattcatctccatgaatctccccttaacttcttcaggtctttccaagttagggggtctagatcacactatccaggaaagggaatgcaaactacacttggaattgtaaattttctagtagtcacattaaaaaggaaaaagagaaacagattttctccggacttatagccctaagaaaaatttgcaaccaccctgatctcttttctggaggtcccaagaatctcaaaggtcttcctgatgatgaactagaagaagatcagtttgggtactggaaacgttctgggaaaatgattgttgttgagtctttgttgaaaatatggcacaagcagggtcagcgagtattgctgttttctcagtcaaggcagatgctggacatacttgaagtattccttagagcccaaaagtatacctatctcaagatggatggtaccactacaatagcttcaagacagccactgattacgagatacaatgaggacacatccatatttgtgtttcttctgaccacgcgggtgggcggcttaggtgtcaacctgacgggggcaaacagagttgtcatctatgacccagactggaacccaagcacggacacgcaggcccgggagcgagcatggagaataggccagaagaagcaagtgactgtgtacaggctcctgactgcgggcaccattgaagaaaagatctaccaccgacaaatcttcaagcagtttttgacaaatagagtgctaaaagacccaaaacaaaggcggtttttcaaatccaatgatctctatgagctatttactctgactagtcctgatgcatcccagagcactgaaacaagtgcaatttttgcaggaactggatcagatgttcagacacccaaatgccatctaaaaagaaggattcaaccagcctttggagcagaccatgatgttccaaaacgcaagaagttccctgcttctaacatatctgtaaatgatgccacatcatctgaagagaaatctgaggctaaaggagctgaagtaaatgcagtaacttctaatcgaagtgatcctttgaaagatgaccctcacatgagtagtaatgtaactagcaatgataggcttggagatactgcaggagtttgaatccaagttatctgcatcacagtcttgtgtcttccgagaactattgagaaatctgtgcactttccatagaacttctggtggtgaaggaatttggaaactcaagccagaatactgctaaacaacattgcttcctaaactttcaagtccctttttctaacgggcatttctgattattaatttattattaataatcatgtttgtcaatgg

SEQ ID NO: 1937 - DNA, 2932 bp, Artificial Sequence
  derived and/or modified sequence
aaaatgagattttaggtagacatacctataggtaccagatagtaagtatttggacagcaaaacaacaaaactatcttcttttaaggtaccagcagacaggtgttaggtggctgtgggaattgcactgccagcaggcaggaggaattctgggagatgaaatgggattgggcaagaccatccagataattgccttcttggcaggtctgagctacagcaagatcaggactcgtggttcaaattacaggagaaactaattcgagatgttgctcattgtcatggaattttgatcacatcttactcctacattcgattgatgcaggatgacattagcaggtatgactggcactatgtgatcttggacgaaggacacaaaattcgaaatccaaatgctgctgtcacccttgcttgcaaacagtttcgcacccctcatcggatcattctgtctggctcaccgatgcaaaataacctccgagagctgtggtcgctctttgacttcatcttcccgggaaagttaggcacgttgcctgtgtttatggagcagttctccgtccccatcaccatggggggatattcaaatgcttccccagtacaggtcaaaactgcttacaagtgtgcatgtgtcttacgagataccataaatccatacctactgcggagaatgaagtcagatgtcaagatgagcctttctttgccagataaaaatgaacaggtcttattttgccgtcttacagatgagcagcataaagtctaccaaaatttcgttgattccaaagaagtttacaggattctcaatggagagatgcagattttctccggacttatagccctaagaaaaatttgcaaccaccctgatctcttttctggaggtcccaagaatctcaaaggtcttcctgatgatgaactagaagaagatcagtttgggtactggaaacgttctgggaaaatgattgttgttgagtctttgttgaaaatatggcacaagcagggtcagcgagtattgctgttttctcagtcaaggcagatgctggacatacttgaagtattccttagagcccaaaagtatacctatctcaagatggatggtaccactacaatagcttcaagacagccactgattacgagatacaatgaggacacatccatatttgtgtttcttctgaccacgcgggtgggcggcttaggtgtcaacctgacgggggcaaacagagttgtcatctatgacccagactggaacccaagcacggacacgcaggcccgggagcgagcatggagaataggccagaagaagcaagtgactgtgtacaggctcctgactgcgggcaccattgaagaaaagatctaccaccgacaaatcttcaagcagtttttgacaaatagagtgctaaaagacccaaaacaaaggcggtttttcaaatccaatgatctctatgagctatttactctgactagtcctgatgcatcccagagcactgaaacaagtgcaatttttgcaggaactggatcagatgttcagacacccaaatgccatctaaaaagaaggattcaaccagcctttggagcagaccatgatgttccaaaacgcaagaagttccctgcttctaacatatctgtaaatgatgccacatcatctgaagagaaatctgaggctaaaggagctgaagtaaatgcagtaacttctaatcgaagtgatcctttgaaagatgaccctcacatgagtagtaatgtaactagcaatgataggcttggagaagagacaaatgcagtatctggaccagaagagttgtcagtgattagtggaaatggggaatgttcaaattcttcaggaacaggcaaaacttctatgccatctggtgatgaaagcattgatgaaaagttaggtctttcttacaaaagagaaagacccagccaggctcaaacagaagctttttgggagaataaacaaatggaaaataatttttataagcacaagtcaaaaacaaaacatcatagtgtggcagaagaagagaccctggagaaacatctgagaccaaagcaaaagcctaagaactctaagcattgcagagacgccaagtttgaaggaactcgaattccacacctggtgaagaaaaggcgttaccagaagcaagacagtgaaaacaagagtgaggccaaggaacagagcaatgacgattatgttttggaaaagcttttcaaaaaatcagttggcgtgcacagtgtcatgaagcacgatgccatcatggatggagccagcccagattatgtactggtggaggcagaagccaaccgagtggcccaggatgccctgaaagcactgaggctctctcgtcagcggtgtctgggagcagtgtctggtgttcccacctggactggccacagggggatttctggtgcaccagcaggaaaaaagagtagatttggtaagaaaaggaattctaacttctctgtgcagcatccttcatcaacatctccaacagagaagtgccaggatggcatcatgaaaaaggagggaaaagataatgtccctgagcattttagtggaagagcagaagatgcagactcttcatccgggcccctcgcttcctcctcactcttggctaaaatgagagctagaaaccacctgattctgccagagcgtttagaaagtgaaagcgggcacctgcaggaagcttctgccctgctgcccaccacagaacacgatgaccttctggtggagatgagaaacttcatcgctttccaggcccacactgatggccaggccagcaccagggagatactgcaggagtttgaatccaagttatctgcatcacagtcttgtgtcttccgagaactattgagaaatctgtgcactttccatagaacttctggtggtgaaggaatttggaaactcaagccagaatactgctaaacaacattgcttcctaaactttcaagt

SEQ ID NO: 1938 - DNA, 4482 bp, Artificial Sequence
  derived and/or modified sequence
atgcccaatgaaggcatcccccacagcagccagacccaggagcaggactgcctgcagagccagcctgtgagcaacaatgaggagatggccatcaagcaggagagcggaggagatggagaggtggaggagtacctgtccttccgctctgtgggagatggcctgagcaccagcgctgtgggctgtgccagcgctgccccccggcggggccctgccctgctgcacatcgacagacaccagatccaggccgtggagcccagcgcccaggccctggagctgcagggcctgggcgtggatgtgtatgaccaggatgtgctggagcagggcgtgctgcagcaggtggacaatgccatccacgaggccagccgggccagccagctggtggatgtggagaaggagtacagatctgtgctggatgacctgaccagctgcaccaccagcctgcggcagatcaacaagatcatcgagcagctgagcccccaggccgccaccagccgggacatcaacaggaagctggacagcgtgaagaggcagaagtacaacaaggagcagcagctgaagaagatcacagccaagcagaagcacctgcaggccatcctgggcggcgctgaggtgaagattgagctggaccacgccagcctggaggaggatgctgagcccggccccagcagcctgggctccatgctgatgcctgtgcaggagacagcctgggaggagctgatcagaacaggccagatgacccccttcggcacccagatcccccagaagcaggagaagaagcccaggaagatcatgctgaatgaggccagcggctttgagaagtacctggccgaccaggccaagctgagctttgagaggaagaagcagggctgcaacaagagagctgccaggaaggccccagcccctgtgaccccaccagcccctgtgcagaacaagaacaagcccaacaagaaggcccgggtgctgagcaagaaggaggagcggctgaagaagcacatcaagaagctgcagaagagggccctgcagttccagggcaaggtgggcctgcccaaggcccggcggccctgggagagtgacatgaggcctgaggccgagggggacagcgagggggaggagagcgagtacttccccacagaggaggaggaggaggaggaggatgatgaggtggagggcgctgaggccgacctgtctggagatggaacagattatgagctgaagcccctgcccaagggcggcaagaggcagaagaaggtgcctgtgcaggagattgatgatgacttcttccccagcagcggggaggaggccgaggccgcctctgtgggggagggcggcggcggcggcaggaaggtgggccgctacagagatgatggagatgaggactactacaagcagaggctgcggcgctggaacaagctgcggctgcaggacaaggagaagaggctgaagctggaggatgacagcgaggagagtgatgctgagtttgatgagggcttcaaggtgcccggcttcctgttcaagaagctgttcaagtaccagcagacaggagtgcgctggctgtgggagctgcactgccagcaggccggcggcatcctgggagatgagatgggcctgggcaagaccatccagatcatcgccttcctggccggcctgagctacagcaagatccgcacccggggcagcaactacagatttgagggcctgggccccaccgtgattgtgtgccccaccaccgtgatgcaccagtgggtgaaggagttccacacctggtggccacccttccgggtggccatcctgcacgagaccggcagctacacccacaagaaggagaagctgatcagagatgtggcccactgccacggcatcctgatcaccagctacagctacatccggctgatgcaggatgacatcagccgctatgactggcactacgtgatcctggatgagggccacaagatccggaaccccaatgctgctgtgaccctggcctgcaagcagttccgcaccccccaccgcatcatcctgagcggcagccccatgcagaacaacctgcgggagctgtggagcctgtttgacttcatcttccctgggaagctgggcaccctgcctgtgttcatggagcagttctctgtgcccatcaccatgggcggctacagcaatgccagccctgtgcaggtgaagacagcctacaagtgtgcctgtgtgctgcgggacaccatcaacccctacctgctgcggaggatgaagagtgatgtgaagatgagcctgagcctgcctgacaagaatgagcaggtgctcttctgccgcctgacagatgagcagcacaaggtgtaccagaactttgtggacagcaaggaggtgtaccgcatcctgaatggagagatgcagatcttcagcggcctcatcgccctgaggaagatctgcaaccacccagacctcttcagcggcggccccaagaacctgaagggcctgcctgatgatgagctggaggaggaccagtttggctactggaagaggtctgggaagatgattgtggtggagagcctgctgaagatctggcacaagcagggccagagggtgctgctcttcagccagagccggcagatgctggacatcctggaggtgttcctgcgggcccagaagtacacctacctgaagatggatggcaccaccaccatcgccagccggcagcccctcatcacccgctacaatgaagacaccagcatctttgtgttcctgctgaccaccagggtgggcggcctgggcgtgaacctgaccggggccaacagagtggtgatctatgaccctgactggaaccccagcacagacacccaggcccgggagcgggcctggagaattggccagaagaagcaggtgacagtgtaccgcctgctgacagctggcaccatcgaggagaagatctaccaccggcagatcttcaagcagttcctgaccaacagagtgctgaaggaccccaagcagaggcgcttcttcaagagcaatgacctgtatgagctgttcaccctgaccagcccagatgccagccagagcacagagaccagcgccatctttgctggcactggaagtgatgtgcagacccccaagtgccacctgaagaggcgcatccagcctgccttcggggctgaccatgatgtgcccaagaggaagaagtttcctgccagcaacatctctgtgaatgatgccaccagcagcgaggagaagtctgaggccaagggagctgaggtgaatgctgtgaccagcaacagaagtgaccccctgaaggatgacccccacatgagcagcaatgtgaccagcaatgaccggctgggggaggagaccaatgctgtgtctggccctgaggagctgagcgtcatctctggaaatggagagtgcagcaacagcagcggcaccgggaagacctccatgcccagcggagatgagagcattgatgagaagctgggcctgagctacaagcgggagcggcccagccaggcccagacagaggccttctgggagaacaagcagatggagaacaacttctacaagcacaagagcaagaccaagcaccacagcgtggccgaggaggagaccctggagaagcacctgcggcccaagcagaagcccaagaacagcaagcactgcagagatgccaagtttgagggcacccgcatcccccacctggtgaagaagaggcgctaccagaagcaggacagcgagaacaagtctgaggccaaggagcagagcaatgatgattatgtgctggagaagctgttcaagaagtctgtgggcgtgcacagcgtgatgaagcatgatgccatcatggatggagccagcccagactatgtgctggtggaggccgaggccaacagagtggcccaggatgccctgaaggccctgcggctgagccggcagcgctgcctgggcgctgtgtctggagtgcccacctggacaggccaccggggcatcagcggggccccagctgggaagaagagcagatttgggaagaagaggaacagcaacttctctgtgcagcaccccagcagcaccagccccacagagaagtgccaggacggcatcatgaagaaggagggcaaggacaacgtgcctgagcacttcagcggccgggcagaagatgctgacagcagcagcggccccctggccagcagcagcctgctggccaagatgagggccaggaaccacctgatcctgcctgagcggctggagagcgagagcggccacctgcaggaggccagcgccctgctgcccaccacagaacatgatgacctgctggtggagatgaggaacttcatcgccttccaggcccacacagatggccaggccagcacccgggagatcctgcaggagtttgagagcaagctgagcgccagccagagctgtgtgttccgggagctgctgaggaacctgtgcaccttccacaggaccagcggcggggagggcatctggaagctgaagccagagtactgctag

SEQ ID NO: 1939 - DNA, 2613 bp, Artificial Sequence
  derived and/or modified sequence
cagcagcccttccaccgccacctgctgatgaccacagccctgcacagcgagaagctgatcagagatgtggcccactgccacggcatcctgatcaccagctacagctacatccggctgatgcaggatgacatcagccgctatgactggcactacgtgatcctggatgagggccacaagatccggaaccccaatgctgctgtgaccctggcctgcaagcagttccgcaccccccaccgcatcatcctgagcggcagccccatgcagaacaacctgcgggagctgtggagcctgtttgacttcatcttccctgggaagctgggcaccctgcccgtcttcatggagcagttctctgtgcccatcaccatgggcggctacagcaatgccagccctgtgcaggtgaagacagcctacaagtgtgcctgtgtgctgcgggacaccatcaacccctacctgctgcggaggatgaagagtgatgtgaagatgagcctgagcctgcctgacaagaatgagcagatcttcagcggcctgattgccctgaggaagatctgcaaccacccagacctcttcagcggcggccccaagaacctgaagggcctgcctgatgatgagctggaggaggaccagtttggctactggaagaggtctgggaagatgattgtggtggagagcctgctgaagatctggcacaagcagggccagagggtgctgctcttcagccagagccggcagatgctggacatcctggaggtgttcctgcgggcccagaagtacacctacctgaagatggatggcaccaccaccatcgccagccggcagcccctcatcacccgctacaatgaagacaccagcatctttgtgttcctgctgaccaccagggtgggcggcctgggcgtgaacctgactggagccaacagagtggtgatctatgaccctgactggaaccccagcacagacacccaggcccgggagcgggcctggagaattggccagaagaagcaggtgacagtgtaccgcctgctgacagctggcaccatcgaggagaagatctaccaccggcagatcttcaagcagttcctgaccaacagagtgctgaaggaccccaagcagaggcgcttcttcaagagcaatgacctgtatgagctgttcaccctgaccagcccagatgccagccagagcacagagaccagcgccatctttgctggcaccggcagtgatgtgcagacccccaagtgccacctgaagaggcgcatccagcctgcctttggagctgaccatgatgtgcccaagaggaagaagtttcctgccagcaacatctctgtgaatgatgccaccagcagcgaggagaagtctgaggccaagggagctgaggtgaatgctgtgaccagcaacagaagtgaccccctgaaggatgacccccacatgagcagcaatgtgaccagcaatgaccggctgggggaggagaccaatgctgtgtctggccctgaggagctgagcgtcatctctggaaatggagaatgtagcaacagcagcggcaccgggaagacctccatgcccagcggagatgagagcattgatgagaagctgggcctgagctacaagcgggagcggcccagccaggcccagacagaggccttctgggagaacaagcagatggagaacaacttctacaagcacaagagcaagaccaagcaccacagcgtggccgaggaggagaccctggagaagcacctgcggcccaagcagaagcccaagaacagcaagcactgcagagatgccaagtttgagggcacccgcatcccccacctggtgaagaagaggcgctaccagaagcaggacagcgagaacaagtctgaggccaaggagcagagcaatgatgattatgtgctggagaagctgttcaagaagtctgtgggcgtgcacagcgtgatgaagcatgatgccatcatggatggagccagcccagactatgtgctggtggaggccgaggccaacagagtggcccaggatgccctgaaggccctgcggctgagccggcagcgctgcctgggcgctgtgtctggagtgcccacctggacaggccaccggggcatcagcggggccccagctgggaagaagagcagatttgggaagaagaggaacagcaacttctctgtgcagcaccccagcagcaccagccccacagagaagtgccaggacggcatcatgaagaaggagggcaaggacaacgtgcctgagcacttcagcggccgggcagaagatgctgacagcagcagcggccccctggccagcagcagcctgctggccaagatgagggccaggaaccacctgatcctgcctgagcggctggagagcgagagcggccacctgcaggaggccagcgccctgctgcccaccacagaacatgatgacctgctggtggagatgaggaacttcatcgccttccaggcccacacagatggccaggccagcacccgggagatcctgcaggagtttgagagcaagctgagcgccagccagagctgtgtgttccgggagctgctgaggaacctgtgcaccttccacaggaccagcggcggggagggcatctggaagctgaagccagagtactgctag

SEQ ID NO: 1940 - DNA, 318 bp, Artificial Sequence
  derived and/or modified sequence
atgagcctgagcctgcctgacaagaatgagcaggtgctcttctgccgcctgacagatgagcagcacaaggtgtaccagaactttgtggacagcaaggaggtgtaccgcatcctgaatggagagatgcaggaggtgctgcagagcttcaccagcatccacctgcacgagagccccctgaacttcttccgctccttccaggtgcggggcagccgcagccactacccaggcaagggcatgcagaccaccctgggcatcgtgaacttcctggtggtgaccctgaagaggaagaagaggaaccgcttctccccagacctgtag

SEQ ID NO: 1941 - DNA, 2592 bp, Artificial Sequence
  derived and/or modified sequence
atgcaggatgacatcagccgctatgactggcactacgtgatcctggatgagggccacaagatccggaaccccaatgctgctgtgaccctggcctgcaagcagttccgcaccccccaccgcatcatcctgagcggcagccccatgcagaacaacctgcgggagctgtggagcctgtttgacttcatcttccctgggaagctgggcaccctgcctgtgttcatggagcagttctctgtgcccatcaccatgggcggctacagcaatgccagccctgtgcaggtgaagacagcctacaagtgtgcctgtgtgctgcgggacaccatcaacccctacctgctgcggaggatgaagagtgatgtgaagatgagcctgagcctgcctgacaagaatgagcaggtgctcttctgccgcctgacagatgagcagcacaaggtgtaccagaactttgtggacagcaaggaggtgtaccgcatcctgaatggagagatgcagatcttcagcggcctcatcgccctgaggaagatctgcaaccacccagacctcttcagcggcggccccaagaacctgaagggcctgcctgatgatgagctggaggaggaccagtttggctactggaagaggtctgggaagatgattgtggtggagagcctgctgaagatctggcacaagcagggccagagggtgctgctcttcagccagagccggcagatgctggacatcctggaggtgttcctgcgggcccagaagtacacctacctgaagatggatggcaccaccaccatcgccagccggcagcccctcatcacccgctacaatgaagacaccagcatctttgtgttcctgctgaccaccagggtgggcggcctgggcgtgaacctgaccggggccaacagagtggtgatctatgaccctgactggaaccccagcacagacacccaggcccgggagcgggcctggagaattggccagaagaagcaggtgacagtgtaccgcctgctgacagctggcaccatcgaggagaagatctaccaccggcagatcttcaagcagttcctgaccaacagagtgctgaaggaccccaagcagaggcgcttcttcaagagcaatgacctgtatgagctgttcaccctgaccagcccagatgccagccagagcacagagaccagcgccatctttgctggcactggaagtgatgtgcagacccccaagtgccacctgaagaggcgcatccagcctgccttcggggctgaccatgatgtgcccaagaggaagaagtttcctgccagcaacatctctgtgaatgatgccaccagcagcgaggagaagtctgaggccaagggagctgaggtgaatgctgtgaccagcaacagaagtgaccccctgaaggatgacccccacatgagcagcaatgtgaccagcaatgaccggctgggggaggagaccaatgctgtgtctggccctgaggagctgagcgtcatctctggaaatggagagtgcagcaacagcagcggcaccgggaagacctccatgcccagcggagatgagagcattgatgagaagctgggcctgagctacaagcgggagcggcccagccaggcccagacagaggccttctgggagaacaagcagatggagaacaacttctacaagcacaagagcaagaccaagcaccacagcgtggccgaggaggagaccctggagaagcacctgcggcccaagcagaagcccaagaacagcaagcactgcagagatgccaagtttgagggcacccgcatcccccacctggtgaagaagaggcgctaccagaagcaggacagcgagaacaagtctgaggccaaggagcagagcaatgatgattatgtgctggagaagctgttcaagaagtctgtgggcgtgcacagcgtgatgaagcatgatgccatcatggatggagccagcccagactatgtgctggtggaggccgaggccaacagagtggcccaggatgccctgaaggccctgcggctgagccggcagcgctgcctgggcgctgtgtctggagtgcccacctggacaggccaccggggcatcagcggggccccagctgggaagaagagcagatttgggaagaagaggaacagcaacttctctgtgcagcaccccagcagcaccagccccacagagaagtgccaggacggcatcatgaagaaggagggcaaggacaacgtgcctgagcacttcagcggccgggcagaagatgctgacagcagcagcggccccctggccagcagcagcctgctggccaagatgagggccaggaaccacctgatcctgcctgagcggctggagagcgagagcggccacctgcaggaggccagcgccctgctgcccaccacagaacatgatgacctgctggtggagatgaggaacttcatcgccttccaggcccacacagatggccaggccagcacccgggagatcctgcaggagtttgagagcaagctgagcgccagccagagctgtgtgttccgggagctgctgaggaacctgtgcaccttccacaggaccagcggcggggagggcatctggaagctgaagccagagtactgctag

SEQ ID NO: 1942 - DNA, 4482 bp, Artificial Sequence
  derived and/or modified sequence
atgcccaacgagggcatcccccacagcagccagacccaggagcaggactgtctgcagagccagccggtcagcaataacgaggaaatggccataaagcaggaaagtggcggagatggtgaggtggaagaatatctgtcattccgatctgttggggatggactctccacaagtgcagttggatgcgcgtctgcggccccaaggaggggtcctgccctgctccacattgaccgccaccagattcaggctgtcgaaccaagcgcccaggccctggaactccagggactgggtgttgatgtttacgatcaagatgtcctggaacagggcgtcctacagcaggtcgacaacgccatccacgaagcctccagggctagccagcttgttgacgtggagaaggagtaccgcagcgttctggacgacctcactagctgtacaacctccctaaggcagatcaacaagatcatcgaacagctgtctccccaggcagcaaccagccgcgatataaatcgaaaactggattctgtcaaacggcaaaaatacaataaagagcagcaactcaaaaagattaccgccaagcagaaacatctgcaagctatcctaggcggggcggaagtcaaaatcgaactcgaccacgcgtcccttgaagaggatgccgagcctggccccagctccctcgggagcatgctgatgccagtgcaagagacagcctgggaggagctgattcgcactggccagatgacaccattcggcactcagatccctcagaagcaggagaagaagcctcgcaaaatcatgctcaacgaagctagtgggtttgaaaagtacctcgccgaccaggctaagttaagctttgagcggaagaagcagggatgcaataaacgtgcagctagaaaagcccctgcgccagtaacaccacccgcccccgtccaaaacaagaataagccaaataaaaaggcccgcgtgctgtccaagaaggaggagcggctaaaaaagcacatcaagaaactccagaagagggcgttacaattccaaggaaaagtagggctaccaaaggctcgacgcccctgggaatccgacatgaggccagaggccgagggagacagtgagggagaggaaagcgagtacttccccactgaagaggaagaagaagaagaggacgacgaggtagaaggtgcagaggccgatctgtcaggcgacgggaccgactacgagttgaagccattgccgaagggcggcaaacgccagaagaaagtgccagttcaggaaatcgatgatgattttttcccatcctctggggaggaggcagaagcggcttcggtaggggagggtggcggtgggggccgcaaagtggggcgctatagagatgatggcgacgaagactactacaagcagagactccgcaggtggaataaattacggttgcaagataaagagaagcgcctcaagctcgaagacgattccgaagagtctgacgcagagtttgatgaagggtttaaagtcccaggattcctgtttaaaaaactatttaagtatcagcagacaggcgtgcgatggctgtgggaactacactgccagcaagccggtggcatcctcggagatgaaatgggtctaggtaaaaccatccagataatcgcattcctggccggcctctcttattcaaaaattcgcacaaggggttccaactaccggtttgagggactggggcccacggtgatcgtgtgccccaccacagtgatgcaccagtgggtcaaggagttccatacatggtggcccccatttcgcgtagccatactgcatgaaaccggatcctacacacataaaaaggaaaagctgatcagagacgtagcccattgtcacggaattctcattacctcttattcttacatcaggctcatgcaagatgacatctcacgctatgattggcactacgtgattttggacgaaggccacaaaattaggaatcctaacgcagcagtgaccctggcctgcaaacagttccggacgcctcacaggattatactctccgggtctccaatgcagaataatctgcgcgaactctggtcactcttcgatttcatattccctggcaagcttggcacactgccggtgtttatggaacagtttagtgtcccaatcacaatgggcggctatagtaatgcttctcccgtgcaggtgaagacagcatataaatgtgcatgtgtcctgagggacaccattaacccatacctcctgcgccgcatgaaaagcgacgtgaagatgtccctctccctcccggataaaaacgaacaggtgctattttgtcgattgactgatgagcagcacaaggtctatcaaaactttgtggactccaaagaggtgtatagaattctcaacggcgagatgcagatcttttctgggttaatagctctacgcaaaatttgtaaccacccagatctgtttagcggaggtcccaagaacctgaagggcctgcccgatgacgaactggaggaggatcagtttggttactggaaacgcagcggaaagatgatcgtggtggagagtctgcttaaaatttggcacaagcaaggccaacgggtgttgttgttcagtcagtccaggcaaatgctagacatacttgaggtgtttttaagggcccagaaatacacctacctaaagatggacggcactactaccatagcctcccgccagcctcttatcacccggtataacgaagacacctccatcttcgtattcctgcttaccacgagggtgggaggactgggcgtgaatttaacaggtgccaaccgggtcgtgatctatgaccctgactggaatccatccacagatacgcaagcacgagagcgcgcttggagaatcggccagaagaagcaagttacagtatatcgcctcttgaccgccggaaccattgaggagaagatttaccaccgccagatctttaagcagtttctgacgaaccgggtactcaaagatccaaagcagagaaggttttttaagtccaatgacctctacgagctatttacactgacctcccctgacgcttcccagtcgactgaaacttcagccatttttgcagggactggatctgacgtgcagaccccgaaatgccacctcaagaggcgtatacagcctgccttcggtgccgaccacgatgtacccaaaaggaaaaaatttcccgctagcaacatttccgtgaatgacgccacttcctccgaagaaaaatcggaagcgaaaggtgctgaggtgaacgccgtgacgtctaataggagtgacccgctgaaggacgatcctcacatgagctctaatgttacgagtaatgacagactgggtgaagaaacaaatgccgtgtctggtccggaagaactctcagtgatcagcggtaacggcgagtgctcaaactcctccggaacgggtaaaaccagcatgccatcaggtgatgagtctatagatgaaaagctgggcctttcctacaagcgagaaaggccctcacaggcacagactgaagcgttttgggaaaacaagcaaatggaaaacaatttttataagcacaagtccaagaccaagcaccactctgtggcagaggaagaaacgctcgagaaacatttgcgaccaaagcagaagcccaagaattctaagcattgccgggacgccaaattcgagggcacacgcatccctcatctggtgaagaaaaggagatatcaaaagcaggacagcgagaacaagagtgaggccaaagaacagtccaatgatgattatgtgctagagaagcttttcaaaaaatccgtgggagtccacagtgtcatgaaacacgacgccataatggatggagccagtcctgactacgttctcgttgaagctgaagcaaacagagtcgcccaggatgctctgaaggctctccggctgtctagacagaggtgtctgggagctgtgagtggcgtgccaacttggaccggccaccgcggtattagtggcgctcccgcagggaaaaagtcccgatttggaaagaaacgtaacagtaattttagcgtccaacaccccagcagtacaagtccaacggaaaaatgccaggatgggattatgaaaaaggagggaaaggataacgtccctgagcacttctctgggagggccgaagatgctgacagctcttcaggccccctggctagtagcagcctgctggctaagatgagagcccgtaatcacctgattctgcctgagagactggaaagcgagtcaggccatctgcaagaggcatctgctttgctcccaaccactgaacacgacgatctcttggtggaaatgcgaaatttcatagccttccaagctcatacggatggtcaggcttccactcgcgagattttgcaggaatttgagtccaaactttctgcttcccagagttgcgtgttccgagagctgctgcgcaacctgtgtacatttcataggacctccggtggggaggggatttggaagctgaagccagagtactgctag

SEQ ID NO: 1943 - DNA, 2613 bp, Artificial Sequence
  derived and/or modified sequence
cagcagcccttccaccggcacctgctgatgaccaccgccctgcactccgagaagctcatacgggacgttgcgcattgccatggaatcctgataaccagctattcttacattcgactcatgcaagatgatatcagcaggtatgattggcattatgtcattctggacgaagggcataagatcaggaaccccaacgccgctgtgacccttgcctgcaaacaattccggacgccgcatcgcattatactctccggctccccaatgcagaataatctcagagaactatggtccctgtttgattttatttttccaggcaagttagggaccttgccggttttcatggaacagttttctgtgccaataacgatgggcggatacagtaatgcgtctcctgtccaggtcaagaccgcctataagtgcgcctgcgtcctccgcgatactatcaacccttacctcctgcgcagaatgaaaagcgatgttaagatgagcttgagcttaccggataaaaatgagcagatcttctctggacttatcgcgctgcgaaaaatctgcaatcatcctgatctgtttagcggaggtccaaaaaacctcaaggggcttccagacgacgaactggaggaggaccagtttggctattggaagcgctccggtaagatgatagttgttgaaagtctcttaaagatttggcacaagcagggccaacgggtattgctgttcagtcagtcaaggcagatgctggacatactggaggtgttcctcagggcccagaaatacacgtacttgaagatggatgggaccaccacaatcgcgtccaggcagcccttaataactcgatacaacgaagatacttcaattttcgtttttctgttaactacccgggttggcggtctgggagtgaacctgactggcgctaaccgcgttgtcatttacgacccggattggaacccgtctactgacacccaggcccgcgagcgagcgtggcgaatcggacaaaaaaagcaggtgacagtgtaccgcctcttgactgcgggaaccatagaagagaagatctaccatcggcagatctttaaacaatttctgacaaaccgagtattaaaggatcctaaacagcgacgatttttcaaatctaacgatctgtacgaactgtttaccctcacctcacccgacgcaagtcagtccactgaaacatctgctattttcgctggaaccggatcagatgttcagacgccgaagtgtcacctgaagcgaaggatccagccagcctttggtgcagaccatgatgtgccaaagcgcaagaagttcccagcatcaaacatatctgtgaacgatgccaccagtagtgaggagaagagtgaggccaaaggtgctgaggtcaatgccgtcacgagtaatagatccgatcccctgaaagacgatccacacatgtcttcgaacgtgacatccaacgaccgactgggcgaagaaaccaatgccgtgtccggacccgaggaactgtcagttatctcaggtaacggggagtgcagcaatagctccggcaccgggaagacgtccatgccctctggggatgaaagcattgatgagaagttaggactgtcctataagcgcgagagacccagccaggcacagaccgaggccttctgggaaaataagcagatggagaacaacttctacaagcacaaatccaagacgaagcatcactcggtggcagaggaggaaacccttgaaaagcaccttagacctaagcagaagcccaagaactccaagcattgccgcgatgctaaattcgaaggcactcgcatccctcacctggtgaagaagcggaggtatcagaagcaggattcggagaataagagcgaggcaaaggagcagagcaacgatgattacgtactcgagaagttgttcaaaaagtccgtaggagttcactccgtgatgaagcacgatgccatcatggatggggcttcaccagactacgtcctggtagaggcagaggcaaatcgagtagctcaggatgcactgaaggcattgcgactgtccaggcagcggtgccttggagcagtcagcggcgtccccacctggacaggccaccgcggcattagcggagctcccgcaggaaagaaaagcagatttgggaaaaagagaaatagcaacttttctgtccaacatccaagctccacttctcctaccgagaaatgccaggacggcattatgaagaaagagggaaaggataatgtgcctgaacactttagtgggagggctgaagatgctgacagtagctctgggcccctggccagtagctccctccttgctaagatgagagccagaaatcatttgatactgccagaacggctcgagtcggaatcgggccatctccaagaggcttcagctctcctgcccacaaccgaacatgacgatttactggtggagatgcgtaactttatcgccttccaagcccacaccgacgggcaggcctctaccagagagattcttcaagagtttgagtccaaactgagtgctagtcagagttgtgtttttcgggagctcctgagaaatttatgcacttttcacagaacatccggaggagaagggatctggaaactgaagcctgagtactgctag

SEQ ID NO: 1944 - DNA, 318 bp, Artificial Sequence
  derived and/or modified sequence
atgagcctgagcctgcccgacaagaacgagcaggtgctgttctgccgtttaacagacgagcaacataaagtctaccagaattttgtggacagcaaggaggtgtaccgtattttaaacggcgagatgcaggaggtcctgcagtccttcacatcaatccacctgcacgaatctcctctaaatttcttcaggagtttccaggtaagagggtcccggtcccattaccccggaaagggcatgcaaactacactaggcatcgttaacttcttggtggtaactcttaaaagaaaaaagcgtaaccgcttctcacctgatctgtag

SEQ ID NO: 1945 - DNA, 2592 bp, Artificial Sequence
  derived and/or modified sequence
atgcaggacgacatcagccggtacgactggcactacgtgatcctggatgagggccacaagatccgtaaccccaacgccgccgtgactctggcatgtaaacagttccggacaccacatcgaatcatcttatctgggtctcctatgcagaacaacctaagagagctgtggagcctctttgattttatcttccccggaaagttgggtacactccctgtgtttatggagcagttcagcgtcccaattacgatggggggctattccaacgctagccccgttcaggtcaagacagcctacaaatgcgcttgcgtgctgcgtgacaccattaacccctatctgttgcgacgcatgaaaagtgatgtcaaaatgagcctgagcctgcctgacaaaaacgaacaggtactgttctgtagactgacagatgaacagcataaggtgtaccagaacttcgtggactccaaggaagtctaccgtatactaaatggtgagatgcagatcttcagcggacttatagcgctccgtaagatctgtaaccaccctgacctctttagcgggggccccaaaaacttgaaagggttgccagacgatgaactggaagaggatcagttcggttattggaagcgatctggcaagatgatcgtggtggaatctctgcttaaaatctggcataagcagggccagagggtgcttttgtttagtcagtcccggcagatgctggatattctggaggtcttcctgagagctcagaagtatacctacctgaagatggatgggactacaaccatcgccagtaggcaaccgctaatcacacgctacaacgaagacacctccatctttgtgtttctgttaacaacccgcgtgggaggtttgggtgtgaacctcacaggggcaaatagagtggttatttatgatccagactggaacccttccaccgacactcaggcaagggagcgtgcatggagaattggccagaagaagcaggtgaccgtctacaggcttctgactgctgggaccattgaagagaagatctaccaccggcagatctttaagcaatttctgaccaatagagtgttgaaggacccgaaacagcggcgcttcttcaaatctaacgatctgtacgaactttttaccctaacaagccctgatgcaagccaatccacagaaacgtcagccattttcgccggtacagggtccgatgtgcagactcccaaatgtcatttgaaacgcagaatccagccggcatttggagcggaccatgatgttcctaagaggaaaaagttccctgccagcaatatttcagttaacgatgctacctcatccgaggagaagtctgaggctaagggagcagaggtcaacgctgtaaccagcaatcgttccgaccctctgaaggatgatcctcacatgagcagcaacgtgacctcgaatgataggctcggtgaggagaccaatgctgtgtctggaccagaggagctctccgtcatctccggtaacggagagtgctctaactcttcaggaacagggaagactagcatgcccagtggcgacgagagcattgacgagaaattgggcttgtcctacaaacgagagaggcctagtcaggcccagaccgaggcattttgggaaaataagcagatggagaacaatttttacaagcacaaaagcaaaacaaagcaccacagcgttgctgaggaggagactctggaaaagcacttaaggccaaagcagaagcccaagaacagcaagcattgccgggatgctaaattcgagggtacaaggattccccatctggtcaaaaagagacgttaccagaagcaggatagtgaaaataagagcgaggcgaaggagcaaagtaatgacgattatgtgcttgagaaacttttcaaaaagtcggtgggcgttcactcagtaatgaagcacgatgccatcatggatggggcttcaccggattatgtactagtcgaagctgaggcaaatcgggtggctcaggacgctctcaaggctctgcggctgagtaggcaacgctgccttggagctgtgtccggtgtgcccacatggaccggccacaggggcatctcaggggctccagctgggaaaaagagccggttcggtaagaagcgtaattccaattttagtgtccaacatccctctagtacttcccccacagaaaagtgtcaggacggaatcatgaagaaggaaggaaaggacaatgtacccgagcactttagcggcagagcagaagatgcagatagttccagcggccccttggcatctagttctcttttagctaagatgcgcgccaggaatcatctgatactgcctgagaggcttgagtcagagagtggacatttgcaggaggcgagtgccctcctccccacaactgagcacgacgacctcctggtggaaatgcggaacttcatcgcctttcaggctcacactgacggacaggcctcaactcgtgaaatcctacaggagtttgaatccaagctctccgcctcacagtcatgtgtgtttagggaacttctgaggaacctgtgcacctttcatagaacatccggcggagaaggtatatggaaacttaagcccgagtactgttag

SEQ ID NO: 1946 - DNA, 4482 bp, Artificial Sequence
  derived and/or modified sequence
atgccaaacgaaggcatcccccattcttcgcaaactcaggaacaggattgcctccagagccaacccgtgagcaataacgaagagatggctattaagcaggaatctggaggggatggagaggtggaggaatacctctcattccgatctgtgggtgatgggcttagcacttcagcagtgggatgcgcgtcagctgcaccgcgaaggggccctgcgctcttacatatagatagacaccaaattcaggcggttgagcccagtgctcaagcgcttgagctgcagggattgggagtggacgtgtatgaccaggatgtgctcgaacaaggggtcctgcagcaggtggataacgctatacatgaggcgtctcgggcatcccagctggtggacgtggagaaagagtatcgttcagtcctggatgatctgacgagctgcaccacctcactgcgtcagattaataaaataatcgaacagctgtcgcctcaagccgctacaagccgcgacatcaaccggaagttagactcagttaagaggcagaagtataacaaagaacaacagttgaagaaaattacagcgaaacaaaagcatctgcaagccattctcgggggagcagaagtgaagatcgagctggaccacgcctccctggaagaagatgcagagccaggacccagtagtctggggagtatgctcatgcccgtgcaggagacagcatgggaagagctcatccgcactggccagatgacaccattcggcactcaaattcctcagaaacaggagaagaaaccacgcaagatcatgctgaatgaggcttctggctttgaaaagtacctcgctgatcaggctaaactctcctttgaacggaagaagcagggatgcaataagcgagcagctcggaaggcacccgctcccgtgactccacctgccccagttcagaataaaaacaagcccaataaaaaagctagagtcctcagcaagaaggaggagaggttaaaaaaacacatcaaaaaactgcaaaaacgtgcactgcaatttcaaggaaaagttgggctccccaaggcacgccgtccgtgggagtctgatatgcggcctgaagctgagggcgattctgaaggggaggaaagtgagtatttcccaacagaggaggaggaggaggaggaggacgacgaggttgagggcgcagaagcagatctgtctggggacggtacggattacgagcttaagcctttgcctaaaggcggtaagagacagaaaaaggtgccagtgcaagaaatcgatgatgatttctttcctagctctggcgaggaggctgaggctgcaagcgtgggcgaaggtggtggcggagggaggaaagtgggacgctacagagacgacggcgacgaagattactataagcaacgcctgaggagatggaacaagcttcggcttcaggataaggagaagcggctgaaattggaggatgacagcgaagaatctgatgccgaatttgatgagggatttaaggtgccaggattcctgttcaagaaattattcaagtaccagcagacaggcgtgaggtggctgtgggagcttcactgtcagcaggccggtggtatcctaggcgatgagatgggtttggggaaaacaattcaaatcatcgctttcctagctggcctgtcctacagcaagataaggacccgcggatcgaattatagatttgaggggcttggacccactgtcatcgtttgtccaactactgtcatgcatcagtgggtgaaggaattccacacgtggtggccgcctttcagggttgccattctgcatgagactggcagctacacccacaaaaaggaaaagctgatccgcgacgtggcgcactgtcatggaatcttaatcacttcatacagctatattcgcttaatgcaggacgacatatcgcgctacgactggcactatgtgatccttgacgaggggcacaaaatccgcaacccaaatgccgcagtgacactggcctgtaaacaattccggaccccacaccggatcattctctctgggtccccaatgcagaataatctgcgagaattgtggtctctcttcgacttcatctttcctggaaagctcgggacactgcctgtcttcatggagcaatttagcgtgccgatcactatgggtggttactctaatgcttcacctgtacaggtgaaaacagcgtataagtgcgcatgcgtgctgcgggatacaattaacccctacctcttgagaaggatgaaatccgatgtgaagatgtcattatcacttcccgataaaaatgagcaggtgttgttttgtcgacttacggacgaacagcataaagtgtatcagaatttcgtggatagtaaggaagtttatagaattttaaatggagagatgcagattttttcaggcctaattgctctgcggaaaatctgcaaccatcctgacctgttcagtgggggacccaaaaacctcaaaggccttcctgatgacgaactcgaagaggatcaattcgggtattggaagagaagtggtaagatgatcgttgtggagtctttgttaaaaatttggcacaaacagggccagagagtattgcttttttcacaaagtaggcagatgctcgatatcctcgaagtgttcctcagggcccaaaagtacacctacctcaaaatggacggcacgacgactattgccagtcggcagcctctcatcacccgctacaacgaagacaccagtatcttcgtctttctgttaacgactagagtaggcggattgggggtgaacctgactggggcaaacagagtggtgatttatgatcctgattggaatcccagtaccgatacccaagcccgtgagcgggcttggaggatcggtcagaagaagcaagtgaccgtttataggctgttaaccgctggcaccatcgaagaaaaaatataccatcggcaaatcttcaagcaatttctcactaacagagtgcttaaagacccaaaacaaagaaggtttttcaaatctaacgatctgtatgagctctttacactaacctcccctgatgcctcacagtcgactgagacctccgccatcttcgccggtaccggctcagacgtacagactcccaagtgccatcttaaacggcgtattcagccagctttcggcgcagatcacgacgtgccaaagaggaagaaatttcctgcatctaatatcagcgtgaacgatgcaacaagctctgaagagaagagtgaagccaagggggctgaagtgaacgccgtgacttccaaccgatctgaccctttgaaggacgacccgcacatgagctccaacgttacttcaaatgatagactgggggaagagactaacgctgtgtccggaccagaagagctctcagtcatctctggcaacggtgaatgctctaactcgtcgggcaccggcaaaaccagtatgccatcgggcgatgaatctattgatgaaaagctcggtctctcctacaagagggaacgcccatcccaggcccagaccgaggccttttgggagaacaaacagatggagaacaatttttataagcataagtccaagacaaagcaccacagcgttgccgaagaggaaaccttagagaaacacctgcgccctaaacagaaaccaaagaattctaaacactgtcgagatgccaagtttgaagggacacggattcctcatctggtgaagaagcgcagatatcagaagcaggactccgaaaataaatcagaagctaaagaacagtccaacgacgactacgtactagagaaactcttcaagaagtctgtgggggttcacagtgtaatgaaacatgatgcgatcatggacggggcatcccccgattacgtcctggtggaggcggaagctaatcgcgtggcccaagacgcgctcaaggctctgaggctgagtcgccagaggtgtctcggggctgtgtccggtgttcctacctggactggccaccggggtatttccggagccccagcaggaaaaaagagtcgattcgggaagaagaggaatagcaatttttcggtgcagcacccaagctctacctccccaacggaaaagtgccaggatgggatcatgaaaaaggaggggaaggacaatgtgccagagcacttcagtggacgcgctgaagatgcagatagctccagcggcccactagcaagctcttccttgttggctaagatgcgcgctcgaaatcacttgatccttccggagagactcgaatctgagagcggtcaccttcaggaggccagtgctctgctgcctactactgaacatgatgatttactggtcgaaatgagaaacttcatcgcctttcaagctcacactgatggtcaggcctccacgcgtgagatcttgcaagaatttgagtctaagcttagtgctagccaaagctgtgtctttcgagaactcctgcggaacctatgcaccttccatcgcaccagcggcggagaaggtatctggaagttgaagcctgagtactgctag

SEQ ID NO: 1947 - DNA, 2613 bp, Artificial Sequence
  derived and/or modified sequence
cagcagcccttccacagacacctgctgatgacgacagctttacactcggaaaagctgatccgggatgtggcccactgccatggcatacttatcacctcatactcctatatcaggctcatgcaggacgatatcagtcggtacgactggcactatgtcatcctggacgaaggacacaagatacggaaccccaatgcggctgtcactttggcttgtaaacaatttagaacacctcatcggatcatcctgagtggtagtccaatgcaaaataatcttcgcgagttatggagccttttcgacttcatcttccccggtaaactgggcaccctacccgtgtttatggagcagttcagcgttccgattaccatgggaggctactccaacgcttcccctgtgcaggtcaaaacagcttacaagtgcgcctgtgtgctgcgagataccatcaacccttacctcctgagacgaatgaaatccgatgtcaagatgagtctgtccctgcccgacaaaaatgaacaaatttttagcggactgatcgccctgcggaagatttgtaaccatcccgacctcttctcaggtggcccaaagaacctgaaaggactccccgatgatgaactcgaagaggaccagtttggctactggaagagatccgggaagatgatcgtggtcgaaagcctgttgaagatctggcataagcaggggcagcgcgtcctcttgttttctcagagcaggcagatgttggacatcctggaggtcttcctgagagcccagaaatatacttacttgaaaatggatggcacgactactatagcaagtaggcagccactaatcacaagatataatgaggataccagcattttcgtcttccttctgaccacacgtgtcggcggtctgggcgtgaacttgacgggggctaacagggtcgtaatatacgaccctgactggaacccatcaacagatacccaggcacgcgaaagagcatggcgaattgggcaaaaaaaacaagtgaccgtgtataggctccttaccgcaggtaccatcgaggaaaagatctaccatcgacaaatcttcaaacagtttctaacgaaccgggtgctaaaggaccccaagcagagacgattcttcaagtctaatgatctctatgagctgtttacattaaccagtccggacgcatcccagtccacagaaacatcagctatcttcgctggaacggggagcgatgttcagacaccgaaatgtcacttaaagaggaggatccagcctgcattcggggcagatcacgatgtgcctaagagaaaaaagttccccgctagtaacatctccgtcaatgatgccacaagctccgaagagaaatccgaagccaaaggcgctgaagtgaatgctgtaacttctaacagaagcgatcccttgaaggatgacccacatatgtcttcaaatgtcacctctaacgacagactgggagaggagaccaatgctgtctccggcccagaagagctgtcagttatttcaggcaacggggagtgctccaacagcagcgggactggaaaaacaagtatgccaagtggggacgaaagcattgacgagaagctgggcctgagttacaaaagagaacgcccatctcaggcccagaccgaggcattctgggagaataaacaaatggagaataatttctacaagcataagtctaagactaagcatcacagtgtggccgaagaagaaactttggaaaagcatcttcgcccaaagcagaaaccgaagaattccaagcactgtcgggacgccaaatttgagggaacaagaatcccccacctagtgaaaaagcgtcgataccagaagcaggattccgagaacaaatcagaagcaaaggagcaatcaaacgacgattacgttctggaaaaacttttcaagaaatctgtgggagtgcattctgtcatgaaacatgacgccatcatggacggggcttcaccagactacgtgttagtggaagccgaagcgaacagggtggcgcaagacgccctgaaggcgctccgattaagtaggcagaggtgcctgggcgcagtttccggggttcctacctggacagggcatcggggtatttcaggggctccagccggaaagaaatctcggttcggaaaaaagagaaactctaattttagcgtccagcatcccagctccaccagcccaaccgaaaagtgtcaggacgggatcatgaaaaaggaaggtaaagataatgtcccagaacacttttccggtcgcgctgaggacgcagattcatcaagcgggccattggccagttcttccctgctggccaaaatgagagctagaaaccacttgatccttcccgaacggttggagagtgaatcaggtcatcttcaggaggcatcagcacttttgcccacaacggaacacgacgacctgctggtcgagatgcgaaactttattgctttccaggcgcatacagatgggcaagccagcaccagggaaatactccaagagtttgaatctaagctgagtgctagccaatcttgcgtgttcagggagttactgcggaacctgtgtacgttccaccgcacaagcggcggagaagggatttggaaactgaagccagaatactgttag

SEQ ID NO: 1948 - DNA, 318 bp, Artificial Sequence
  derived and/or modified sequence
atgtccctttcccttcccgacaaaaacgaacaggtgctgttctgcaggcttaccgacgaacagcacaaggtgtaccagaactttgtagattcaaaagaagtgtacagaattcttaacggtgaaatgcaagaggtcttgcagagcttcacgagcattcacctgcacgagagccccctaaatttctttcggtcctttcaggtacgcggatcccggagccattaccccggaaaaggcatgcagacaacactaggtatcgtgaattttttagtggtaacattgaaaagaaaaaagaggaatagattttccccagacctgtag

SEQ ID NO: 1949 - DNA, 2592 bp, Artificial Sequence
  derived and/or modified sequence
atgcaggatgacatctcccgctacgattggcactacgtaattctggacgagggccacaaaatacggaaccctaatgccgcagtgacactagcctgtaagcagtttcggaccccacaccggattatactctcaggtagccccatgcaaaataatcttcgggaactttggtcactcttcgatttcatctttccaggcaagctgggaaccctgccagtgttcatggagcagttttcggtgcctatcactatggggggttatagtaatgccagccctgtgcaagtgaaaaccgcctacaagtgtgcgtgcgtgctacgagatactattaacccatacctactgagaaggatgaagagcgatgttaagatgtctctgagtctgcctgataagaacgagcaggtactcttctgtcgcttgactgacgagcagcacaaagtgtatcagaatttcgtcgactcaaaggaggtgtacagaatactaaacggcgagatgcaaatatttagtggactgattgcgctccggaagatctgcaaccatcctgacttattcagtggagggcctaaaaatctcaagggtctgcccgacgacgaactcgaagaagaccagttcggatattggaagagatcgggcaaaatgatcgtggtggagagtctgctgaagatttggcataagcagggccagcgagtgctgctcttttcccaaagccggcaaatgttagatatcttggaggtcttcctgagggcccagaagtatacctatcttaaaatggatgggaccactacaatcgcctctaggcagcccttgatcactcgctacaacgaggacactagtatcttcgtgtttttactgaccacaagggtcggcggactgggtgtgaacctgaccggtgctaaccgagttgtaatttacgatcctgattggaaccctagcacagacacgcaagcgcgtgagcgagcctggcggatcggacagaaaaaacaagtaacggtttaccggctgctcacagccggaaccattgaggaaaagatctaccacaggcaaatcttcaagcagttcttgacaaatagagtgctcaaggacccaaaacaacgcagattctttaagagcaacgacctgtacgaattgttcactctgacatcaccagatgcgtctcagtctaccgaaacgagtgccatttttgccggtactggctctgacgtgcagaccccaaagtgccacctcaaacgacgcatacagccagccttcggggctgatcacgatgtgcctaaacggaagaagtttccagccagcaacatctctgttaatgacgccacctcctcggaggagaagtctgaggctaagggcgctgaagttaatgccgtgacctctaaccgaagtgaccctctgaaagacgatcctcacatgagtagtaacgttacatcaaacgataggttgggggaggaaactaacgccgtatccggacccgaagagctatcagtcatttccgggaacggagagtgcagcaattccagcggcactgggaaaacaagtatgcccagcggggatgagtccatcgacgaaaaactgggcctgagttataagcgcgagaggccatcacaggcccaaactgaggcattttgggagaacaaacaaatggaaaataatttttacaagcataagagcaagacaaagcatcattcggtggcagaggaggagacattagagaaacatctgagaccaaagcagaagccaaagaactccaaacactgccgggacgctaagttcgagggaacacgaattccccacctcgtaaaaaaaaggcggtatcagaagcaggattcagaaaacaaaagcgaagctaaggagcagagcaatgacgactacgtccttgagaagctgtttaaaaaatctgtgggggttcactctgttatgaagcacgacgcgatcatggatggagcctctcccgactacgtgctcgtagaagctgaagctaatagggtagcacaggatgcacttaaggctctgaggctctctcgacagagatgtctgggggcagtgagcggcgtccctacctggaccgggcaccggggaatttcaggagctcctgccggtaaaaagagcaggtttggaaagaaacgtaactctaacttcagcgtacaacatccatcatccacaagccccactgaaaagtgccaagacggcattatgaaaaaggaaggtaaggacaatgtccccgaacacttctcaggaagggccgaggacgccgactccagttctgggcctctcgcctcttccagccttctcgccaaaatgcgcgctaggaatcatttaattttacctgaacgtctggaatcagaaagtgggcatctgcaggaagcttccgcgctccttcccaccacagagcatgatgatctactggtcgagatgaggaattttatcgcatttcaggcacacacagacgggcaagcgtctaccagagaaatcctgcaagaatttgagagtaaattgtccgccagccagtcctgtgtgtttagggagctgcttcgcaacctgtgcaccttccatagaacatcagggggtgaaggcatttggaagctgaagcccgagtattgctag

SEQ ID NO: 1950 - DNA, 282 bp, Artificial Sequence
  derived and/or modified sequence
atggacacccagaagcagatccacaagacccacaacagcaagaaccagttcttcaccatcttcttcttcctgagcgtggagttcggcaaggagggcaccagaaagaacttctacctgctgctgagcatcggccactacggcagaaagagcagaagagccgacctgggcaccgccgacaccgccgacaagaccgagcccgagtgcttcgccgccagctggaccttcgaccccaaccccagcgtgaccgtgagcggcgcccacagcaccgccgtgcaccagtag

SEQ ID NO: 1951 - protein, 333 aa, Artificial Sequence
  derived and/or modified sequence
MFRAAAPGQLRRAASLLRFQSTLVIAEHANDSLAPITLNTITAATRLGGEVSCLVAGTKCDKVAQDLCKVAGIAKVLVAQHDVYKGLLPEELTPLILATQKQFNYTHICAGASAFGKNLLPRVAAKLEVAPISDIIAIKSPDTFVRTIYAGNALCTVKCDEKVKVFSVRGTSFDAAATSGGSASSEKASSTSPVEISEWLDQKLTKSDRPELTGAKVVVSGGRGLKSGENFKLLYDLADQLHAAVGASRAAVDAGFVPNDMQVGQTGKIVAPELYIAVGISGAIQHLAGMKDSKTIVAINKDPEAPIFQVADYGIVADLFKVVPEMTEILKKK

SEQ ID NO: 1952 - DNA, 1002 bp, Artificial Sequence
  derived and/or modified sequence
atgttccgcgcagcggcaccaggccagcttcgcagagccgccagcttgctgcgttttcagtctactttagtgatcgcagagcatgctaacgattccctggcccctattacactgaacacaataacggcggccactcgacttgggggtgaagttagctgtcttgtcgcgggcaccaaatgtgacaaggtcgcccaagatctgtgtaaagtggccggaatcgctaaagtgctagtggcccaacatgatgtgtacaagggacttctcccagaagagctgacacccttaatccttgcaacccagaaacagtttaactatactcatatttgtgcaggagctagcgctttcggcaaaaacctgctccctagggtagcagctaagctggaggtggcaccaatttccgatatcatcgcaatcaaatctcccgacacattcgtcagaaccatctatgctggaaatgcgctgtgcactgtgaaatgcgatgaaaaagtcaaagtgttcagcgtccgcgggacaagctttgacgccgctgccacaagtgggggcagtgcaagttctgaaaaagcttcctccacctctccagttgaaatctccgaatggttggatcaaaagctaaccaaaagcgacaggcccgagctgactggggcaaaagttgtggtgagcgggggccggggactcaaatcaggagagaatttcaagctactgtatgatctagcggaccagcttcacgcagctgtgggggcctcaagagccgcagtggatgccgggttcgtgccgaacgatatgcaagtgggtcagaccggcaagattgtggcccccgaactttatatagcagtgggtatcagcggcgctatacagcacctcgctggcatgaaggacagcaagaccatcgtggctatcaataaagacccagaggcaccgattttccaggtggcagactacggcatcgtggctgacctgttcaaggtggtgccggagatgaccgaaatcttgaaaaagaaatag

SEQ ID NO: 1953 - DNA, 1002 bp, Artificial Sequence
  derived and/or modified sequence
atgttccgggctgctgcccctggccagctgcggcgggccgccagcctgctgcgcttccagagcaccctggtgattgctgagcacgccaatgacagcctggcccccatcaccctgaacaccatcacagctgccacccggctgggcggggaggtgtcctgcctggtggccggcaccaagtgtgacaaggtggcccaggacctgtgcaaggtggccggcatcgccaaggtgctggtggcccagcatgatgtgtacaagggcctgctgcctgaggagctgacccccctcatcctggccacccagaagcagttcaactacacccacatctgtgccggggccagcgccttcggcaagaacctgctgccccgggtggccgccaagctggaggtggcccccatcagtgacatcatcgccatcaagagcccagacacctttgtgaggaccatctatgctggaaatgccctgtgcaccgtgaagtgtgatgagaaggtgaaggtgttttctgtgcggggcaccagctttgatgctgctgccaccagcggcggcagcgccagcagcgagaaggccagcagcaccagccctgtggagatcagcgagtggctggaccagaagctgaccaagagtgacaggcctgagctgactggagccaaggtggtggtgtctgggggccggggcctgaagtctggagagaacttcaagctgctgtatgacctggccgaccagctgcatgctgctgtgggcgccagcagagctgctgtggatgctggctttgtgcccaatgacatgcaggtgggccagacaggcaagatcgtggcccctgagctgtacatcgctgtgggcatcagcggggccatccagcacctggccggcatgaaggacagcaagaccatcgtggccatcaacaaggaccctgaggcccccatcttccaggtggccgactatggaattgtggccgacctcttcaaggtggtgcctgagatgacagagatcctgaagaagaagtag

SEQ ID NO: 1954 - DNA, 1002 bp, Artificial Sequence
  derived and/or modified sequence
atgttccgggccgccgcccccggccagctgcggcgggccgccagcctcctccgcttccagtcaactctggtgatcgccgaacatgcaaatgacagcctcgccccgattacccttaatactatcacagccgccacccggctcggtggtgaggtaagctgcttagttgctggcactaaatgcgacaaggtggcccaggacctctgtaaagtggctggtattgctaaggtgcttgtggcccagcacgacgtctacaagggccttttgccagaagaactgacccccctcatcctcgctacccaaaagcagttcaattatacccacatttgcgccggtgcttccgcctttggcaaaaacctcctgcctcgggtggccgccaagttggaggttgctccaataagtgacatcatcgccatcaagagccctgacaccttcgtcagaactatttatgctggcaatgccttgtgcacagtgaaatgtgatgaaaaagtgaaggtgtttagcgtccgtggcacctcctttgatgccgcagccacctccggaggaagtgcatcctctgaaaaggctagcagcacaagccccgtggagatatctgaatggcttgatcagaaactgaccaaaagcgacagacccgagcttaccggagccaaggtcgtggtctccggaggcagaggcttaaaaagtggggaaaattttaagctgctgtacgatctggcagaccagctccacgcagccgtcggtgccagcagagcagcagtggatgcaggctttgtccctaatgacatgcaggtgggccaaaccggaaaaatcgttgctccagaactttatattgccgtcggcataagcggagccatacagcacctggcaggcatgaaggattccaaaaccatcgtggcgatcaacaaggatcccgaagctcccatattccaagttgcggactacggtattgttgcagacctcttcaaggtcgtcccagaaatgaccgaaatcttaaaaaagaagtag

SEQ ID NO: 1955 - DNA, 1002 bp, Artificial Sequence
  derived and/or modified sequence
atgtttagagcggctgccccaggccaactccggagagcggcttccctactacggtttcagtcaacactggtcattgccgagcacgccaacgatagcctggcacccatcacactgaacaccattactgcagccacaagactgggaggcgaagtgagctgcctggtggcaggaacaaagtgcgacaaggtggcccaggacctgtgtaaagtggcaggcatagcaaaggtactggtggcccaacacgacgtgtacaaaggactcctgccagaggagttgactccactcattctggccacacaaaagcaattcaactatacgcatatctgtgcaggtgcttctgccttcggaaaaaacctgctgcctcgcgtggctgctaaactggaggtagccccaatctctgatatcattgccattaaatctccagatacgtttgtccgcaccatctatgcgggaaatgctctgtgcaccgtgaagtgtgatgaaaaggtaaaagtttttagcgtgcggggtacctcgttcgatgctgctgcaactagtgggggttccgccagctcggaaaaggcctcttctactagccccgtagagatcagcgaatggcttgaccagaagctaaccaagtccgacaggccagaactcaccggcgcaaaagttgtggtctcaggcggacgcggactgaaatccggcgagaattttaaactgctgtatgatcttgccgatcagctccacgcggctgtcggggcatctagagcagccgtcgatgccggattcgtacctaatgatatgcaggttggacaaactggcaaaatcgtggcccctgaactgtacattgcagttggtattagcggtgccattcagcatttggcagggatgaaggacagtaagaccattgtggcgattaacaaggaccccgaggcaccaatcttccaagtagctgattacgggatcgtggccgacctttttaaagttgtacctgaaatgactgaaatcttaaaaaagaagtag

SEQ ID NO: 1956 - DNA, 1002 bp, Artificial Sequence
  derived and/or modified sequence
atgttcagagccgccgcccccggccagctgagaagagccgccagcctgctgagattccagagcaccctggtgatcgccgagcacgccaacgacagcctggcccccatcaccctgaacaccatcaccgccgccaccagactgggcggcgaggtgagctgcctggtggccggcaccaagtgcgacaaggtggcccaggacctgtgcaaggtggccggcatcgccaaggtgctggtggcccagcacgacgtgtacaagggcctgctgcccgaggagctgacccccctgatcctggccacccagaagcagttcaactacacccacatctgcgccggcgccagcgccttcggcaagaacctgctgcccagagtggccgccaagctggaggtggcccccatcagcgacatcatcgccatcaagagccccgacaccttcgtgagaaccatctacgccggcaacgccctgtgcaccgtgaagtgcgacgagaaggtgaaggtgttcagcgtgagaggcaccagcttcgacgccgccgccaccagcggcggcagcgccagcagcgagaaggccagcagcaccagccccgtggagatcagcgagtggctggaccagaagctgaccaagagcgacagacccgagctgaccggcgccaaggtggtggtgagcggcggcagaggcctgaagagcggcgagaacttcaagctgctgtacgacctggccgaccagctgcacgccgccgtgggcgccagcagagccgccgtggacgccggcttcgtgcccaacgacatgcaggtgggccagaccggcaagatcgtggcccccgagctgtacatcgccgtgggcatcagcggcgccatccagcacctggccggcatgaaggacagcaagaccatcgtggccatcaacaaggaccccgaggcccccatcttccaggtggccgactacggcatcgtggccgacctgttcaaggtggtgcccgagatgaccgagatcctgaagaagaagtag

SEQ ID NO: 1957 - DNA, 2287 bp, Artificial Sequence
  derived and/or modified sequence
attaggtgactggctgaggcggcgccagttggccgggcacggggctgctgtaaggccgaggttgcggcggaagcggagaccatgttccgagcggcggctccggggcagctccggcgggcggcctcattgctacgatttcagagtaccctggtaatagctgagcatgcaaatgattccctagcacccattactttaaataccattactgcagccacacgccttggaggtgaagtgtcctgcttagtagctggaaccaaatgtgacaaggtggcacaagatctctgtaaagtagcaggcatagcaaaagttctggtggctcagcatgatgtgtacaaaggcctacttccagaggaactgacaccattgattttggcaactcagaagcagttcaattacacacacatctgtgctggagcatctgccttcggaaagaaccttttgcccagagtagcagccaaacttgaggttgccccgatttctgacatcattgcaatcaagtcacctgacacatttgtgagaactatttatgcaggaaatgctctatgtacagtgaagtgtgatgagaaagtgaaagtgttttctgtccgtggaacatcctttgatgctgcagcaacaagtggcggtagtgccagttcagaaaaggcatcaagtacttcaccagtggaaatatcagagtggcttgaccagaaattaacaaaaagtgatcgaccagagctaacaggtgccaaagtggtggtatctggtggtcgaggcttgaagagtggagagaactttaagttgttatatgacttggcagatcaactacatgctgcagttggtgcttcccgtgctgctgttgatgctggctttgttcccaatgacatgcaagttggacagacgggaaaaatagtagcaccagaactttatattgctgttggaatatctggagccatccaacatttagctgggatgaaagacagcaagacaattgtggcaattaataaagacccagaagctccaattttccaagtggcagattatggaatagttgcagatttatttaaggtagttcctgaaatgactgagatattgaagaaaaaatgaatcaggatcatgccttaaaaagaaaacttttgttaaagtattccactgaaatcacagatatttgtgggtattataacaatcattggaaagcatggagagctacatttcataatttgagggaaaatttctaacagatgccagaatgcttgtttatgggattgctgtgtttccttttaattatttgtggttccaaacaattattgtttgaactttttaaattctgtactaaaatctataataaagcttttccacagctttaaaactatcagaaatatgcctagcctctagagaaaattgaagaaaaggagtaaaaattttgtttatttatttatttttttgcctttcttgttcatggagagctctatgttttaggaagattgtaaacatgattgtctccaccagcctaatcaacctactaatctcattgttgaagggcaaacttcataggagaaggtaactgaattggcaagtgcagagttaaaaaagcacggctataaagcatgaatattatcttaaacatactccagtcttcagaagaccatagctaatgtgacaaaagcagacctgacttaaacctgacccagctccatgtatttagttggcttaaggtaaatttcattttccgtttaattttaaggttttgtcagtttataggacttttgtctgtaaaggagggagagtggaggaggggctgctttgagacagcatggcctctgatgcaagcagatagtttgatgttattataaacattcaaaatcctgtgcagagaatgctctagcctttcttttgccttctgttggcttcttttgggctctcttaggaagcacccaggcctgtgtagtcacctctggcactctcattctgctgcccagggcacagctgaggtccaagagtgtcaccagggctgcagctggtgtggatgcaggcccaagagcagaggctggtgaggctttgaacaggcctgcaggaaggcgtgggtaggtaggtgagtagaacaaagagggctgccctcctgaatcagatctgcagaagtaggagtagtgacctggatcaagcagacagtagggaagagaagggaagtgataagtgatggaggtggctagagtgcctttgtgtgaccagcctggggcccttccccagctgactagtgaaccctttctgatttgtgtcacaatcagttgctataaaacacttttaaaagttg

SEQ ID NO: 1958 - protein, 746 aa, Artificial Sequence
  derived and/or modified sequence
MQAKKRYFILLSAGSCLALLFYFGGLQFRASRSHSRREEHSGRNGLHHPSPDHFWPRFPDALRPFVPWDQLENEDSSVHISPRQKRDANSSIYKGKKCRMESCFDFTLCKKNGFKVYVYPQQKGEKIAESYQNILAAIEGSRFYTSDPSQACLFVLSLDTLDRDQLSPQYVHNLRSKVQSLHLWNNGRNHLIFNLYSGTWPDYTEDVGFDIGQAMLAKASISTENFRPNFDVSIPLFSKDHPRTGGERGFLKFNTIPPLRKYMLVFKGKRYLTGIGSDTRNALYHVHNGEDVVLLTTCKHGKDWQKHKDSRCDRDNTEYEKYDYREMLHNATFCLVPRGRRLGSFRFLEALQAACVPVMLSNGWELPFSEVINWNQAAVIGDERLLLQIPSTIRSIHQDKILALRQQTQFLWEAYFSSVEKIVLTTLEIIQDRIFKHISRNSLIWNKHPGGLFVLPQYSSYLGDFPYYYANLGLKPPSKFTAVIHAVTPLVSQSQPVLKLLVAAAKSQYCAQIIVLWNCDKPLPAKHRWPATAVPVVVIEGESKVMSSRFLPYDNIITDAVLSLDEDTVLSTTEVDFAFTVWQSFPERIVGYPARSHFWDNSKERWGYTSKWTNDYSMVLTGAAIYHKYYHYLYSHYLPASLKNMVDQLANCEDILMNFLVSAVTKLPPIKVTQKKQYKETMMGQTSRASRWADPDHFAQRQSCMNTFASWFGYMPLIHSQMRLDPVLFKDQVSILRKKYRDIERL

SEQ ID NO: 1959 - DNA, 2241 bp, Artificial Sequence
  derived and/or modified sequence
atgcaggccaagaagagatacttcatcctgctgagcgccggcagctgcctggccctgctgttctacttcggcggcctgcagttcagagccagcagaagccacagcagaagagaggagcacagcggcagaaacggcctgcaccaccccagccccgaccacttctggcccagattccccgacgccctgagacccttcgtgccctgggaccagctggagaacgaggacagcagcgtgcacatcagccccagacagaagagagacgccaacagcagcatctacaagggcaagaagtgcagaatggagagctgcttcgacttcaccctgtgcaagaagaacggcttcaaggtgtacgtgtacccccagcagaagggcgagaagatcgccgagagctaccagaacatcctggccgccatcgagggcagcagattctacaccagcgaccccagccaggcctgcctgttcgtgctgagcctggacaccctggacagagaccagctgagcccccagtacgtgcacaacctgagaagcaaggtgcagagcctgcacctgtggaacaacggcagaaaccacctgatcttcaacctgtacagcggcacctggcccgactacaccgaggacgtgggcttcgacatcggccaggccatgctggccaaggccagcatcagcaccgagaacttcagacccaacttcgacgtgagcatccccctgttcagcaaggaccaccccagaaccggcggcgagagaggcttcctgaagttcaacaccatcccccccctgagaaagtacatgctggtgttcaagggcaagagatacctgaccggcatcggcagcgacaccagaaacgccctgtaccacgtgcacaacggcgaggacgtggtgctgctgaccacctgcaagcacggcaaggactggcagaagcacaaggacagcagatgcgacagagacaacaccgagtacgagaagtacgactacagagagatgctgcacaacgccaccttctgcctggtgcccagaggcagaagactgggcagcttcagattcctggaggccctgcaggccgcctgcgtgcccgtgatgctgagcaacggctgggagctgcccttcagcgaggtgatcaactggaaccaggccgccgtgatcggcgacgagagactgctgctgcagatccccagcaccatcagaagcatccaccaggacaagatcctggccctgagacagcagacccagttcctgtgggaggcctacttcagcagcgtggagaagatcgtgctgaccaccctggagatcatccaggacagaatcttcaagcacatcagcagaaacagcctgatctggaacaagcaccccggcggcctgttcgtgctgccccagtacagcagctacctgggcgacttcccctactactacgccaacctgggcctgaagccccccagcaagttcaccgccgtgatccacgccgtgacccccctggtgagccagagccagcccgtgctgaagctgctggtggccgccgccaagagccagtactgcgcccagatcatcgtgctgtggaactgcgacaagcccctgcccgccaagcacagatggcccgccaccgccgtgcccgtggtggtgatcgagggcgagagcaaggtgatgagcagcagattcctgccctacgacaacatcatcaccgacgccgtgctgagcctggacgaggacaccgtgctgagcaccaccgaggtggacttcgccttcaccgtgtggcagagcttccccgagagaatcgtgggctaccccgccagaagccacttctgggacaacagcaaggagagatggggctacaccagcaagtggaccaacgactacagcatggtgctgaccggcgccgccatctaccacaagtactaccactacctgtacagccactacctgcccgccagcctgaagaacatggtggaccagctggccaactgcgaggacatcctgatgaacttcctggtgagcgccgtgaccaagctgccccccatcaaggtgacccagaagaagcagtacaaggagaccatgatgggccagaccagcagagccagcagatgggccgaccccgaccacttcgcccagagacagagctgcatgaacaccttcgccagctggttcggctacatgcccctgatccacagccagatgagactggaccccgtgctgttcaaggaccaggtgagcatcctgagaaagaagtacagagacatcgagagactgtag

SEQ ID NO: 1960 - DNA, 2241 bp, Artificial Sequence
  derived and/or modified sequence
atgcaggccaagaagcgctactttatactcctctctgccgggagctgtctggctctgttgttttatttcggtggattacagttcagggcttccagatcccattcccgtcgggaagagcatagtggacggaacgggctgcatcacccatctccagaccacttctggccccgttttcccgacgcgctacgcccatttgtgccttgggaccagctagaaaatgaggattcttctgtacacattagcccacgccagaaaagagacgccaatagctctatttataaagggaagaagtgccggatggaatcttgttttgacttcaccctatgtaagaagaatggattcaaggtctatgtgtaccctcagcagaaaggagaaaaaattgcagagagttatcagaatattctcgcagctattgaaggcagccggttctacacctctgacccaagccaggcttgcctattcgtgttgagcttggatacactcgaccgggaccagctttctccccaatatgtgcataacttaagatccaaggtgcagtccctccatctctggaataacggacggaatcatctaatttttaatctgtactcaggcacctggccagactataccgaagacgtggggtttgacattggccaggcaatgctggcaaaggcctctattagtacagaaaactttaggccaaatttcgatgtgagtattccactcttctctaaagaccacccacgaacggggggtgaacgcggcttcctcaagttcaacaccatccccccactacgtaaatacatgcttgtatttaagggtaagcgatacttgacaggaataggtagcgacacccgaaatgcattgtaccacgtacacaacggagaagacgtggtgcttttaacaacctgcaagcacggaaaggactggcagaaacacaaagacagcaggtgtgacagggacaataccgagtacgaaaaatatgattatagagagatgcttcacaatgccacgttctgtctggtgccgcgcgggcgccggctaggctcgttcagattcttagaggccctgcaagcagcttgcgtccccgtgatgctgagcaatgggtgggagttaccttttagcgaagtaatcaactggaatcaggctgctgtcataggcgatgaacggttgttgcttcagattccctccactattcgcagtatccatcaggacaaaatcttggccttaaggcaacagactcagtttctttgggaagcctacttttcttccgtcgagaagatcgtgttgaccactctagaaatcatccaggatcgtatattcaaacacattagtagaaatagtctgatttggaacaagcatcctggggggctgtttgttttaccacagtattcttcctacttaggggatttcccatactattatgccaaccttggattaaagccaccttcaaagttcaccgccgtcatacacgcagtgacccctctggtgtcccagtctcagcccgtcttgaaactgctcgtggctgctgcaaagagccagtattgcgcccagatcattgtcttatggaactgcgacaagccattacctgccaagcacaggtggcccgctaccgctgtcccggttgtcgtgatcgagggcgagtctaaagtaatgagctccaggtttctcccatacgataatattatcactgatgcggttctgagcctggacgaagataccgttctgagcacgaccgaagtggacttcgctttcaccgtgtggcagtcttttccagaacgcattgtaggatacccagcccgatctcacttttgggataactcaaaggaaagatggggctatacctcaaagtggacaaacgactactctatggtcctcactggcgctgctatctatcacaagtactaccactacctatacagccattacctccccgcaagcctgaagaatatggtggaccagctggctaactgtgaagatatcctaatgaacttcctggtgagcgccgtgaccaaactcccacctatcaaggtaactcaaaagaaacaatataaagaaactatgatggggcagaccagtagagcatcacgctgggcagaccctgaccacttcgcgcagcggcagagctgtatgaacacttttgcctcctggtttggttacatgccgttgatccattctcagatgagactggatccagttttatttaaggatcaggttagcatcctgcggaaaaagtaccgcgatatcgaaagactgtag

SEQ ID NO: 1961 - DNA, 8270 bp, Artificial Sequence
  derived and/or modified sequence
gtgtaagtgtaacattcagaaccgggtaacattcggcgaccgaacgcggcggtcggcagcgttcgcgcgggggcctgcgaagcgctgctcggggccggcactgcccgcggggaggacgcgccgccgccgccacccagcgccgccgccgccgccgcctccagccgggccgccgcgcgtcccgggggccggccccgcgagcgcaggagtaaacaccgccggagtcttggagccgctgcagaagggaataaagagagatgcagggatttgtgaggttacggcgccccagctgcaagatgcactagccggctgaacccgggatcggctgacttgttggaaccggagtgctctgcacggagagtggtggatgagttgaagttgccttcccggggctcattttccacgctgccgagaggaatccgagaggcaaggcaatcacttcgtcttgccattgattgggtatcgggagctttttttttctcccctctctctttcttttcctccgtcttgttgcatgcaagaaaattacagtccgctgctcgcccgccctgggtgcgagatattcagccccgctctctcccgtgcattgtgcaacccaaagatgaaagaccgaaggggagaaagttaaagaaatcgcccacatgcgctggatcagtccacggcttggggaaaggcatccagagaaggtgggagcggagagtttgaagtctttacaggcgggaagatggcggactggagctgaaagtgttgattgggaaacttgggtgattcttgtgtttatttacaatcctcttgacccaggcaggacacatgcaggccaaaaaacgctatttcatcctgctctcagctggctcttgtctcgcccttttgttttatttcggaggcttgcagtttagggcatcgaggagccacagccggagagaagaacacagcggtaggaatggcttgcaccaccccagtccggatcatttctggccccgcttcccggacgctctgcgccccttcgttccttgggatcaattggaaaacgaggattccagcgtgcacatttccccccggcagaagcgagatgccaactccagcatctacaaaggcaagaagtgccgcatggagtcctgcttcgatttcaccctttgcaagaaaaacggcttcaaagtctacgtatacccacagcaaaaaggggagaaaatcgccgaaagttaccaaaacattctagcggccatcgagggctccaggttctacacctcggaccccagccaggcgtgcctctttgtcctgagtctggatactttagacagagaccagttgtcacctcagtatgtgcacaatttgagatccaaagtgcagagtctccacttgtggaacaatggtaggaatcatttaatttttaatttatattccggcacttggcctgactacaccgaggacgtggggtttgacatcggccaggcgatgctggccaaagccagcatcagtactgaaaacttccgacccaactttgatgtttctattcccctcttttctaaggatcatcccaggacaggaggggagagggggtttttgaagttcaacaccatccctcctctcaggaagtacatgctggtattcaaggggaagaggtacctgacagggataggatcagacaccaggaatgccttatatcacgtccataacggggaggacgttgtgctcctcaccacctgcaagcatggcaaagactggcaaaagcacaaggattctcgctgtgacagagacaacaccgagtatgagaagtatgattatcgggaaatgctgcacaatgccactttctgtctggttcctcgtggtcgcaggcttgggtccttcagattcctggaggctttgcaggctgcctgcgtccctgtgatgctcagcaatggatgggagttgccattctctgaagtgattaattggaaccaagctgccgtcataggcgatgagagattgttattacagattccttctacaatcaggtctattcatcaggataaaatcctagcacttagacagcagacacaattcttgtgggaggcttatttttcttcagttgagaagattgtattaactacactagagattattcaggacagaatattcaagcacatatcacgtaacagtttaatatggaacaaacatcctggaggattgttcgtactaccacagtattcatcttatctgggagattttccttactactatgctaatttaggtttaaagcccccctccaaattcactgcagtcatccatgcggtgacccccctggtctctcagtcccagccagtgttgaagcttctcgtggctgcagccaagtcccagtactgtgcccagatcatagttctatggaattgtgacaagcccctaccagccaaacaccgctggcctgccactgctgtgcctgtcgtcgtcattgaaggagagagcaaggttatgagcagccgttttctgccctacgacaacatcatcacagacgccgtgctcagccttgacgaggacacggtgctttcaacaacagaggtggatttcgccttcacagtgtggcagagcttccctgagaggattgtggggtaccccgcgcgcagccacttctgggataactctaaggagcggtggggatacacatcaaagtggacgaacgactactccatggtgttgacaggagctgctatttaccacaaatattatcactacctatactcccattacctgccagccagcctgaagaacatggtggaccaattggccaattgtgaggacattctcatgaacttcctggtgtctgctgtgacaaaattgcctccaatcaaagtgacccagaagaagcagtataaggagacaatgatgggacagacttctcgggcttcccgttgggctgaccctgaccactttgcccagcgacagagctgcatgaatacgtttgccagctggtttggctacatgccgctgatccactctcagatgaggctcgaccccgtcctctttaaagaccaggtctctattttgaggaagaaataccgagacattgagcgactttgaggaatccggctgagtgggggaggggaagcaagaagggatgggggtcaagctgctctctcttcccagtgcagatccactcatcagcagagccagattgtgccaactatccaaaaacttagatgagcagaatgacaaaaaaaaaaaggccaatgagaactcaactcctggctcctgggactgcaccagactgctccaaactcacctcactggcttctgtgtcccaagactaggttgtgtacagtttaattatggaacattaaataattatttttgaaatgattgctatgcaggtttaaacttttttaatgatcaaaactattaaaaaccagagttctttgtttaatcaaaattgtgttggttgtgaatatttcaaagctgctattccttttcccacagacatcattgtcatggccatgtagggtgccctgcagtttcaaaagctcaaacttcgtggaaaacacaataagtcactctacccattatcaagaaataactgagcataagttgtaacttcattattcaactttgccagtgcaaattgttttccacttcgaatcttcaaatccacttgaacttttatctctaaaatgtcgctgcatgaaagaaagtattacgacttccaggtaggcagttctaactgaaatctctatgtttgagatagatatatatgataatcgtttttcattgggggggtggggggaattagtaccaagaaaacactagtataattaagaaatgttcagtttgcacaaagaactatccagataacccaccagcatgttagtgagatggaaatacagacccacaacagtaacccaatacttgcaggggttgggggcacggttatagattcaaccattgacctaagtctgcgtagcactgggaagaggctttggtttagaagccaaggaataatgagtatattggggagaacagattatttacaagatgaactctttaatgtttgtgagaatctcaagtttcagagtttctcttttgagaaagaaaaaggggtaataaggtagaaattcacaccaatgaacaagaggattgctgcaaagtaactgaggagatgtctcgccattgggaccctaatgccatttttggtcaaacattgttttgagcaagaatctggcaaacaaaataatcaacaacaaatgtgaatatagtttcatttacttttaatttttaaatctgtggaaaagtttagttgtgcttcttgttaaaaagaacatttctatccctgaaaatgctatcttgggcttatgattattgttaaactccaagtataaactgaaaaaaaaaacatatccctaactctgttatgaaaaatggagacttctgatattaaatgctttcttctacttggaagaggccagagaaaacagggaagagaaagacattattgagtttgaccatgtattatgctgaataaacaataagcactttagagtccctccctcaaactctcatacatttcatatttcttttccatttattttcagttttgttttagaagaaaagttcatcagagaattttgttctgataatttcaagtggccatcttaggtcagtggaaaccgtaagtccattggactttacctcatcctttctttgtagacatctgggagaggaagaggagcttgtaatgatagcacggggatggtgctgtaaacaggagtgaaagtgtttgtggaagtccagagaagtgactcaacaggctacctagctgcagaacaaggagtagagcccacatatccagatggtgttttgagaggtgcgtagacagtgaaattcaattaaagagaggattttctcctcagcctcatgactcagaacagctccctaaatacctctctcatctaattggacccatccatagtccattctcaaacatgtgacattttcccctaagtagatgtgattatctcttaggcatttgttgaaaaataattcttaggtccatggtgcttgcacttgtgtcttttctataaaatgtttggtcttacaggtttcatgtcatttaagctgcacttctcagcaagttaaaagattagcagttaatctttattcatttggcctttgtgaatttgtatttaaattatttttttcaggattggcaaattattcttgtttctcctttaccaaaaaataaatgcgatattttgttcaatgaccccaaaaccaacttgaaacttaggtggtcatattggcttgcaaagcaatgtccctaattgtaccagtcagtcacacaagtggattcaaggacctgctttgccagattgacctgtcaccaagctcacaacacatatcctccacaaacaacatgtgttatgtgaagaaaaatggtaattataaataagaacaggatataacacacctttcatccactttaaatctccacagtttcattttatgtcattctctgagcaaatctctttgggatgtgagctagcgtgttcttctcccatttggaatataaggctgggaatagaacaatgcttaacaaatcagtgaagctcgacagtaatatgtaattttaattcagttaggaaagagttgtattgcattgcaacaagttgacaaatcatagccatctctgtagggtgtcaggaattatctcctggtcaactttaatgataactaggggtccctaagtgggctaacatgtgctgcattggagagaagccaagggctgagagtacagtgccaaccacgtaatgaattgcttgcagaaattccaaagaggactcagccacttatggatttccacacagcatcttttcccagctccacattaagacacaggatcttaaaagtaattttttaaaagctggctgtgtatttatttatatgaaagtgttataaatatcaaagcttacaaatacattaatacatatcacctttgttgaagctagcaaaatggctcaaaattgagactgtagagaaaaatccatgaaataatcacgatagtcataccacaaaagatagcatagctaggtgggcctacctggtcgtatcaacacactttcagatagatgcttcaaaaaaaaagggaaagcttgttactggaatcttatgtgcattacagtttaatttcttcttgtgacaaatggtgctcaaagaaggatcaatccggttgcatccttcaatttcccttttagaatgacttttggttttcattacagtaggctatgttagcctttattttggtggttctcaaatacctggtgacttgaaagagtattatgctggtggcctttcataaaggttactgaactttaatcaggggtgagatgaatgaatgtgaataggcctatatactattttttttaattaaaaaaaaaaaaaacagggcacttgatttaagaacaaacctgtttaaagggcaggatcagggggaagacagccttactaggttggaatctgaatgagattcttgctggacaaggctgaattatggatgcaaaagccaagcaaacttcccagacctggaagtgtcttgtgttcccttgggtctcttgagatctccagtatttaaaagtagcagttattgccatgaactctcaaataaaaatgctcctgcctcttacttgtgaatataatcaacatgcagccagtacatcaggaccgcagttgctgaattcatttacctagttcccctttacagcgactatggacaagaacctttcagttggttttgtcattcttggccagatttaaccaagaaatttctttcactatcagcctcattttctcaggcatgcttacagggacaaagttgttttgagttgagttctcagcaaataagcattaatatcaaactgtgctaaacttgtctcacttggtataagaacttcagcataaagagattagtttatcctttgacaccaagtcttttttttttctttgagacagagtcttgccctgtcacccaggctggaatgcattggtgtgatctcagctcagtcactgcaacctccgcctccccggttcaagcaattctcctgcctcaccctgcttagtagttgggattacaggcatgtgctaccacactgggctaatttttgtatatttattagagacagggttttgctatgttggccaggctggtctcaaactcctgacctcaggtgatccacctgcctctgcctcccaaagtgctgagattacaggtgtaagccactgcgcctggccccccttttttttttctttaaaaaaaaaaaaaagcttgggggattaagtaccctaagatagtggtctctcccatcagttcaataatgctgtacagaacctctggataaaaaagctgttatttacaccataattgtgatgatggatttgactcctcaaaaccatctctcccctttttgccctttccaaaaatcaaaggcttttgtctccatgagttttacctagtagggattgtagttgtcactggtctagagttccaatacattttatatcaggaacctcagtgagctacccagaattggaacttaacatggcccagcaactaggagaagaaggcaaaccttgagaaagctgagccctcaggatagcacagtctcacccttgtttaaaatcaagtcaggctagcctttcagtcactctggttttgtaatgatttgccttttaggcctcaggccatttgatttctgcaatagttttctgttcttctcctacaggaatacatccctgtcctttcggttgtaactattactaaaactagggctatgcaaatgacctggttaccatgtaatgaaccttgtgtacttattttgagagaacaatatgtataggatatgttgaggggcagaaagaaagacatcaaaaactggaactattttaggtggcaaattgtaacgcaaaaaacaaaagtataccttattttgtatacgatgtacacttgggacagagttttctaatatgttgccaatgtttttgtagtgtcaccacaggtcttttctgaagtgtttttcccatttgttatagagtattaatgacttagcgtaattaagccctcaagtatgtgtgagagagcgcgtgtgagaaaatacaaagccatagatattgatttacttcactgacctgtgtaactttatgtctgggtttcgccatccaagatagattgttttatagagagtgtcaccaaagactttttccttccaatttatagaagaaaaaaaaaagaaattattaataaatgacatgacttttca

SEQ ID NO: 1962 - DNA, 2241 bp, Artificial Sequence
  derived and/or modified sequence
atgcaggccaagaagcgctacttcatcctgctgtctgctggcagctgcctggccctgctcttctactttggaggcctgcagttccgggccagccgcagccacagccggcgggaggagcacagcggcagaaatggcctgcaccaccccagcccagaccacttctggccccgcttcccagatgccctgcggccctttgtgccctgggaccagctggagaatgaagacagctctgtgcacatcagcccccggcagaagagagatgccaacagcagcatctacaagggcaagaagtgcaggatggagagctgctttgacttcaccctgtgcaagaagaatggcttcaaggtgtatgtgtacccccagcagaagggggagaagattgctgagagctaccagaacatcctggccgccatcgagggcagccgcttctacaccagtgaccccagccaggcctgcctgtttgtgctgagcctggacaccctggaccgggaccagctgagcccccagtatgtgcacaacctgcggagcaaggtgcagagcctgcacctgtggaacaacggcaggaaccacctgatcttcaacctgtacagcggcacctggccagactacacagaagatgtgggctttgatattggccaggccatgctggccaaggccagcatcagcacagagaacttccggcccaactttgatgtgtccatccccctcttcagcaaggaccaccccaggactggaggagagcggggcttcctgaagttcaacaccatcccccccctgaggaagtacatgctggtgttcaagggcaagcgctacctgactggaattggaagtgacaccagaaatgccctgtaccacgtgcacaacggggaggatgtggtgctgctgaccacctgcaagcacggcaaggactggcagaagcacaaggacagccgctgtgaccgggacaacacagaatatgagaagtatgactaccgggagatgctgcacaatgccaccttctgcctggtgccccggggccggcggctgggcagcttccgcttcctggaggccctgcaggccgcctgtgtgcctgtgatgctgagcaatggctgggagctgcccttcagcgaggtgatcaactggaaccaggccgctgtgattggagatgagcggctgctgctgcagatccccagcaccatccgcagcatccaccaggacaagatcctggccctgcggcagcagacccagttcctgtgggaggcctacttcagctctgtggagaagatcgtgctgaccaccctggagatcatccaggaccgcatcttcaagcacatcagcaggaacagcctcatctggaacaagcaccctgggggcctgtttgtgctgccccagtacagcagctacctgggggacttcccctactactatgccaacctgggcctgaagccacccagcaagttcaccgctgtgattcatgctgtgacccccctggtgtcccagagccagcctgtgctgaagctgctggtggccgccgccaagagccagtactgtgcccagatcatcgtgctgtggaactgtgacaagcccctgcctgccaagcaccgctggccagccacagctgtgcctgtggtggtgattgaaggagagagcaaggtgatgagcagccgcttcctgccctatgacaacatcatcacagatgctgtgctgagcctggatgaggacacagtgctgagcaccacagaggtggactttgccttcaccgtgtggcagagcttccctgagagaattgtgggctacccagcccggagccacttctgggacaacagcaaggagcgctggggctacaccagcaagtggaccaatgactacagcatggtgctgactggagctgccatctaccacaagtactaccactacctgtacagccactacctgcctgccagcctgaagaacatggtggaccagctggccaactgtgaggacatcctgatgaacttcctggtgtctgctgtgaccaagctgccccccatcaaggtgacccagaagaagcagtacaaggagaccatgatgggccagaccagccgggccagccgctgggccgaccctgaccactttgcccagaggcagagctgcatgaacacctttgcctcctggtttggctacatgcccctcatccacagccagatgaggctggaccctgtgctcttcaaggaccaggtgtccatcctgaggaagaagtacagagacatcgagcggctgtag

SEQ ID NO: 1963 - DNA, 2241 bp, Artificial Sequence
  derived and/or modified sequence
atgcaggccaagaagcggtacttcatcctgctgagcgccggcagctgcctggccctgttattctactttggaggccttcagttcagagcatcccgctctcattccagacgggaggagcactccgggagaaacggcctgcatcatccttcccccgatcatttctggcccaggtttccggatgcgctgcgaccctttgtgccttgggaccagctggagaatgaggattccagcgtgcacatcagcccacgccaaaagcgagatgccaatagcagtatctacaaagggaagaagtgccgtatggaatcttgctttgatttcaccctgtgtaagaagaacggatttaaggtctatgtttacccccagcagaaaggggagaagatcgccgagagctatcagaacattctcgccgctatagaagggtctcgcttctatacctccgacccgagccaggcctgcttattcgtgctgagccttgacactctggatagagaccagttgtcaccccagtacgtacataacctgcggtccaaagtgcagtccctccatctgtggaataatgggcgcaatcatctaatatttaacttgtacagtggcacttggcccgactatactgaggacgtggggttcgatatcggacaagctatgctcgctaaagcctccatctctacagaaaactttcgccccaattttgacgtgtcaatcccactcttttccaaggaccaccccagaaccgggggcgagaggggcttccttaaattcaatacaattccccccctccggaaatatatgctggtgtttaagggcaaaagatacctgacaggtataggctcggatacaaggaacgcgctgtatcacgtgcacaacggagaagatgtcgtcctgttgaccacttgtaagcacggcaaggactggcaaaagcataaggactcccggtgcgaccgggataacaccgagtacgagaaatatgactatcgcgaaatgcttcacaacgctaccttctgcctggtgccgcggggccgcaggctcgggtcattcaggtttctggaagcactgcaggcggcttgtgtccccgtaatgctctctaatggatgggagctgccttttagtgaggtgataaattggaaccaggctgctgtgatcggagatgaacgtctgctgctacaaattccttccacaattcggtccatccatcaggacaagatattagccctcaggcaacagactcagttcctttgggaagcctattttagctctgttgaaaagattgtcctgactaccctcgagattatccaggaccgaatttttaagcacatctcgagaaattctctcatatggaataaacaccccggcgggctgtttgtgctaccacagtactcctcatatctgggggatttcccctactattacgcaaatcttggcctaaagcctccatcaaagttcaccgcagtgattcatgccgtgactccgctggtgtctcagtcgcagcccgtgttgaagttattggtagcggctgccaagtcccaatactgtgcacagatcatcgtgctgtggaattgcgacaaacccttgcctgccaaacatcggtggccggccacagctgtgccagtagtggtaattgagggagaaagcaaggtgatgtcttcaaggttccttccatacgacaatattataacagacgctgtgctgtctttagacgaagatacagtgctgtctacaaccgaggttgatttcgctttcacagtttggcagagcttcccagagcgtatagtgggttacccagctaggagccatttctgggacaacagcaaggagcggtggggatacacctccaaatggacaaacgattatagcatggttctgacgggagccgctatctatcataagtattaccattatctgtattcccactacctcccagcaagccttaaaaacatggtggatcaacttgccaactgcgaagacatcttgatgaactttctggtctcggctgtcaccaaacttcctcccatcaaagttacacagaagaaacaatacaaagaaacaatgatgggccagaccagtagggccagtagatgggcggacccagaccacttcgcccagcgccagtcttgcatgaatacgtttgcctcctggtttgggtacatgcccctcatccattctcaaatgagattagacccagtattattcaaagatcaagtctctattctgcgcaaaaagtaccgagatattgagcgactgtag

SEQ ID NO: 1964 - DNA, 2241 bp, Artificial Sequence
  derived and/or modified sequence
atgcaggccaaaaaacgatacttcatcctactatccgcgggatcttgcctcgcactgctcttctattttgggggtcttcaatttagggccagtagatcgcacagccggagagaggaacactccggtcggaacggcctccatcacccatctccagaccacttctggcctagatttccagatgccctgcgtccattcgtcccttgggatcagctcgagaacgaggacagctctgtgcatatttctccgagacagaaacgtgacgcaaattccagcatttataaaggtaagaaatgtcggatggaatcctgctttgattttacactgtgtaagaagaatggcttcaaggtctacgtgtatccacaacagaagggagagaagatcgctgagtcttatcagaatatcctggccgctatcgaagggagcagattctacacaagcgatccttcccaggcctgtttgtttgtgttgagtttggatacactggacagggaccagctcagtcctcaatacgttcataatctgaggtcaaaagtacagtcccttcacctctggaacaatgggaggaatcaccttattttcaatctttacagcggaacttggccggattataccgaggatgtggggtttgatatcggccaggccatgctcgctaaggccagcataagtacagagaactttaggcccaactttgacgtgagcatccctttattttctaaggaccaccccaggaccggcggagaacgagggtttctgaagttcaatacaattccacccctgcggaaatatatgcttgttttcaagggcaaaagatatctgactggcatcggcagcgatacgcgaaacgctttgtaccacgtgcataatggggaggacgtagtgttgctcacgacttgcaagcatggcaaggactggcagaaacacaaagattccagatgcgacagggacaacacagagtatgagaagtatgactacagagagatgctgcacaatgcaacgttttgcctcgtacctagaggacggcgtcttggatcttttcggtttcttgaagccttacaagctgcttgtgtgccagtgatgctgagtaacggatgggagctgccgtttagcgaggtcatcaattggaatcaggctgctgtcataggagacgagaggcttctgctgcagatcccctcgacgatccgttccattcatcaggacaagattctggctctcagacaacagactcaattcttatgggaggcttacttttcaagtgtagagaaaatcgttcttacaactctggagataatccaggatcgaattttcaaacacatcagtcgcaactctctcatctggaataaacatccgggagggttgttcgttctacctcaatattctagctacttgggtgatttcccttattactacgccaatctgggcttaaagccacctagtaaattcactgccgtgattcacgcggtgactccccttgtctcacagagccagcccgtgttgaaactcttagtggcagccgcaaagtcccaatactgtgcccagattattgttctttggaactgcgataagccactgccggctaaacaccgctggccggctacagcggtccccgtagtcgtaattgagggcgaatccaaagtgatgtcaagccgcttcctgccctatgataacataatcaccgacgccgttctgtccctcgacgaggacactgtcctgtccaccactgaagtagacttcgccttcacagtgtggcagagtttcccagaaaggattgtcgggtaccctgcccgaagccatttttgggacaattctaaggaacggtggggctacacgtcaaaatggactaacgactactctatggtgttgacaggagctgccatataccataagtactaccactacctttacagtcattatttgcccgcatctctgaaaaatatggtggaccagctggccaactgtgaggatatactcatgaattttctcgtgagcgctgtcactaagctccctcccatcaaggtcacccagaaaaaacagtacaaggaaaccatgatggggcagacctccagagcatcaagatgggctgatccggatcattttgcccagcggcaatcttgcatgaatactttcgccagctggttcggctatatgccattgattcactcccaaatgagactggatcccgtgctcttcaaagaccaagtaagcatccttaggaaaaagtatcgagacatcgagagactttag

SEQ ID NO: 1965 - protein, 573 aa, Artificial Sequence
  derived and/or modified sequence
MIFLYQVVHFILFTSVSGECVTQLLKDTCFEGGDITTVFTPSAKYCQVVCTYHPRCLLFTFTAESPSEDPTRWFTCVLKDSVTETLPRVNRTAAISGYSFKQCSHQISVNNICLLKHTQTGTPTRITKLDKVVSGFSLKSCALSNLACIRDIFPNTVFADSNIDSVMAPDAFVCGRICTHHPGCLFFTFFSQEWPKESQRNLCLLKTSESGLPSTRIKKSKALSGFSLQSCRHSIPVFCHSSFYHDTDFLGEELDIVAAKSHEACQKLCTNAVRCQFFTYTPAQASCNEGKGKCYLKLSSNGSPTKILHGRGGISGYTLRLCKMDNECTTKIKPRIVGGTASVRGEWPWQVTLHTTSPTQRHLCGGSIIGNQWILTAAHCFYGVESPKILRVYSGILNQSEIKEDTSFFGVQEIIIHDQYKMAESGYDIALLKLETTVNYTDSQRPICLPSKGDRNVIYTDCWVTGWGYRKLRDKIQNTLQKAKIPLVTNEECQKRYRGHKITHKMICAGYREGGKDACKGDSGGPLSCKHNEVWHLVGITSWGEGCAQRERPGVYTNVVEYVDWILEKTQAV

SEQ ID NO: 1966 - protein, 625 aa, Artificial Sequence
  derived and/or modified sequence
MIFLYQVVHFILFTSVSGECVTQLLKDTCFEGGDITTVFTPSAKYCQVVCTYHPRCLLFTFTAESPSEDPTRWFTCVLKDSVTETLPRVNRTAAISGYSFKQCSHQISACNKDIYVDLDMKGINYNSSVAKSAQECQERCTDDVHCHFFTYATRQFPSLEHRNICLLKHTQTGTPTRITKLDKVVSGFSLKSCALSNLACIRDIFPNTVFADSNIDSVMAPDAFVCGRICTHHPGCLFFTFFSQEWPKESQRNLCLLKTSESGLPSTRIKKSKALSGFSLQSCRHSIPVFCHSSFYHDTDFLGEELDIVAAKSHEACQKLCTNAVRCQFFTYTPAQASCNEGKGKCYLKLSSNGSPTKILHGRGGISGYTLRLCKMDNECTTKIKPRIVGGTASVRGEWPWQVTLHTTSPTQRHLCGGSIIGNQWILTAAHCFYGVESPKILRVYSGILNQSEIKEDTSFFGVQEIIIHDQYKMAESGYDIALLKLETTVNYTDSQRPICLPSKGDRNVIYTDCWVTGWGYRKLRDKIQNTLQKAKIPLVTNEECQKRYRGHKITHKMICAGYREGGKDACKGDSGGPLSCKHNEVWHLVGITSWGEGCAQRERPGVYTNVVEYVDWILEKTQAV

SEQ ID NO: 1967 - protein, 210 aa, Artificial Sequence
  derived and/or modified sequence
  misc_feature (1)..(1): Xaa can be any naturally occurring amino acid
XSGFSLKSCALSNLACIRDIFPNTVFADSNIDSVMAPDAFVCGRICTHHPGCLFFTFFSQEWPKESQRNLCLLKTSESGLPSTRIKKSKALSGFSLQSCRHSIPVFCHSSFYHDTDFLGEELDIVAAKSHEACQKLCTNAVRCQFFTYTPAQASCNEGKGKCYLKLSSNGSPTKILHGRGGISGYTLRLCKMDNELRGAPMKISGWLKTS

SEQ ID NO: 1968 - DNA, 1719 bp, Artificial Sequence
  derived and/or modified sequence
atgatcttcctgtaccaggtggtgcacttcatcctgttcaccagcgtgagcggcgagtgcgtgacccagctgctgaaggacacctgcttcgagggcggcgacatcaccaccgtgttcacccccagcgccaagtactgccaggtggtgtgcacctaccacccccgctgcctgctgttcaccttcaccgccgagagccccagcgaggaccccacccgctggttcacctgcgtgctgaaggacagcgtgaccgagaccctgccccgcgtgaaccgcaccgccgccatcagcggctacagcttcaagcagtgcagccaccagatcagcgtgaacaacatctgcctgctgaagcacacccagaccggcacccccacccgcatcaccaagctggacaaggtggtgagcggcttcagcctgaagagctgcgccctgagcaacctggcctgcatccgcgacatcttccccaacaccgtgttcgccgacagcaacatcgacagcgtgatggcccccgacgccttcgtgtgcggccgcatctgcacccaccaccccggctgcctgttcttcaccttcttcagccaggagtggcccaaggagagccagcgcaacctgtgcctgctgaagaccagcgagagcggcctgcccagcacccgcatcaagaagagcaaggccctgagcggcttcagcctgcagagctgccgccacagcatccccgtgttctgccacagcagcttctaccacgacaccgacttcctgggcgaggagctggacatcgtggccgccaagagccacgaggcctgccagaagctgtgcaccaacgccgtgcgctgccagttcttcacctacacccccgcccaggccagctgcaacgagggcaagggcaagtgctacctgaagctgagcagcaacggcagccccaccaagatcctgcacggccgcggcggcatcagcggctacaccctgcgcctgtgcaagatggacaacgagtgcaccaccaagatcaagccccgcatcgtgggcggcaccgccagcgtgcgcggcgagtggccctggcaggtgaccctgcacaccaccagccccacccagcgccacctgtgcggcggcagcatcatcggcaaccagtggatcctgaccgccgcccactgcttctacggcgtggagagccccaagatcctgcgcgtgtacagcggcatcctgaaccagagcgagatcaaggaggacaccagcttcttcggcgtgcaggagatcatcatccacgaccagtacaagatggccgagagcggctacgacatcgccctgctgaagctggagaccaccgtgaactacaccgacagccagcgccccatctgcctgcccagcaagggcgaccgcaacgtgatctacaccgactgctgggtgaccggctggggctaccgcaagctgcgcgacaagatccagaacaccctgcagaaggccaagatccccctggtgaccaacgaggagtgccagaagcgctaccgcggccacaagatcacccacaagatgatctgcgccggctaccgcgagggcggcaaggacgcctgcaagggcgacagcggcggccccctgagctgcaagcacaacgaggtgtggcacctggtgggcatcaccagctggggcgagggctgcgcccagcgcgagcgccccggcgtgtacaccaacgtggtggagtacgtggactggatcctggagaagacccaggccgtg

SEQ ID NO: 1969 - DNA, 1875 bp, Artificial Sequence
  derived and/or modified sequence
atgatcttcctgtaccaggtggtgcacttcatcctgttcaccagcgtgagcggcgagtgcgtgacccagctgctgaaggacacctgcttcgagggcggcgacatcaccaccgtgttcacccccagcgccaagtactgccaggtggtgtgcacctaccacccccgctgcctgctgttcaccttcaccgccgagagccccagcgaggaccccacccgctggttcacctgcgtgctgaaggacagcgtgaccgagaccctgccccgcgtgaaccgcaccgccgccatcagcggctacagcttcaagcagtgcagccaccagatcagcgcctgcaacaaggacatctacgtggacctggacatgaagggcatcaactacaacagcagcgtggccaagagcgcccaggagtgccaggagcgctgcaccgacgacgtgcactgccacttcttcacctacgccacccgccagttccccagcctggagcaccgcaacatctgcctgctgaagcacacccagaccggcacccccacccgcatcaccaagctggacaaggtggtgagcggcttcagcctgaagagctgcgccctgagcaacctggcctgcatccgcgacatcttccccaacaccgtgttcgccgacagcaacatcgacagcgtgatggcccccgacgccttcgtgtgcggccgcatctgcacccaccaccccggctgcctgttcttcaccttcttcagccaggagtggcccaaggagagccagcgcaacctgtgcctgctgaagaccagcgagagcggcctgcccagcacccgcatcaagaagagcaaggccctgagcggcttcagcctgcagagctgccgccacagcatccccgtgttctgccacagcagcttctaccacgacaccgacttcctgggcgaggagctggacatcgtggccgccaagagccacgaggcctgccagaagctgtgcaccaacgccgtgcgctgccagttcttcacctacacccccgcccaggccagctgcaacgagggcaagggcaagtgctacctgaagctgagcagcaacggcagccccaccaagatcctgcacggccgcggcggcatcagcggctacaccctgcgcctgtgcaagatggacaacgagtgcaccaccaagatcaagccccgcatcgtgggcggcaccgccagcgtgcgcggcgagtggccctggcaggtgaccctgcacaccaccagccccacccagcgccacctgtgcggcggcagcatcatcggcaaccagtggatcctgaccgccgcccactgcttctacggcgtggagagccccaagatcctgcgcgtgtacagcggcatcctgaaccagagcgagatcaaggaggacaccagcttcttcggcgtgcaggagatcatcatccacgaccagtacaagatggccgagagcggctacgacatcgccctgctgaagctggagaccaccgtgaactacaccgacagccagcgccccatctgcctgcccagcaagggcgaccgcaacgtgatctacaccgactgctgggtgaccggctggggctaccgcaagctgcgcgacaagatccagaacaccctgcagaaggccaagatccccctggtgaccaacgaggagtgccagaagcgctaccgcggccacaagatcacccacaagatgatctgcgccggctaccgcgagggcggcaaggacgcctgcaagggcgacagcggcggccccctgagctgcaagcacaacgaggtgtggcacctggtgggcatcaccagctggggcgagggctgcgcccagcgcgagcgccccggcgtgtacaccaacgtggtggagtacgtggactggatcctggagaagacccaggccgtg

SEQ ID NO: 1970 - DNA, 627 bp, Artificial Sequence
  derived and/or modified sequence
agcggcttcagcctgaagagctgcgccctgagcaacctggcctgcatccgcgacatcttccccaacaccgtgttcgccgacagcaacatcgacagcgtgatggcccccgacgccttcgtgtgcggccgcatctgcacccaccaccccggctgcctgttcttcaccttcttcagccaggagtggcccaaggagagccagcgcaacctgtgcctgctgaagaccagcgagagcggcctgcccagcacccgcatcaagaagagcaaggccctgagcggcttcagcctgcagagctgccgccacagcatccccgtgttctgccacagcagcttctaccacgacaccgacttcctgggcgaggagctggacatcgtggccgccaagagccacgaggcctgccagaagctgtgcaccaacgccgtgcgctgccagttcttcacctacacccccgcccaggccagctgcaacgagggcaagggcaagtgctacctgaagctgagcagcaacggcagccccaccaagatcctgcacggccgcggcggcatcagcggctacaccctgcgcctgtgcaagatggacaacgagctgcgcggcgcccccatgaagatcagcggctggctgaagaccagc

SEQ ID NO: 1971 - DNA, 2021 bp, Artificial Sequence
  derived and/or modified sequence
gggaaataagagagaaaagaagagtaagaagaaatataagagccaccatgatcttcctctatcaggtcgtccatttcatcttgttcacgtcggtgtccggcgaatgcgtcacgcagttgttgaaggacacgtgctttgaaggaggagacattacaacggtgtttacgccatccgcgaaatactgtcaggtggtctgtacctaccatccccggtgtctgctgtttacattcactgccgaatcccctagcgaggaccccactcggtggttcacgtgtgtgcttaaggattccgtcaccgaaacacttcctcgggtcaatcggacagcggcgatctcggggtactcgttcaagcaatgctcacaccagatttccgcctgcaacaaagacatctacgtcgatctcgatatgaaaggcatcaactacaactcctcggtggcaaagagcgcacaagagtgtcaagagcgatgcacagacgacgtgcactgccacttcttcacatacgcgaccaggcagttcccatcgctggaacacagaaacatctgcctcctcaagcatactcagacgggaactcccaccaggattacgaagctggataaggtggtatcgggattttcccttaagtcatgcgcccttagcaacctggcgtgtatcagggacatctttcccaatacagtatttgccgattccaatattgactcagtgatggcccctgacgccttcgtgtgtggccgcatctgcacacatcaccccggatgtctcttcttcaccttctttagccaggagtggcccaaggagagccagaggaacctctgccttctcaaaacgtcggagtcaggattgccctcgacgcggatcaagaaatcaaaggcgctttcggggttctcgttgcagagctgtcgccatagcattccagtcttttgtcactcatcgttttatcacgacactgattttctcggggaagagttggacatcgtggcagcaaagtcgcatgaagcgtgccagaagttgtgtaccaacgccgtccgctgccagtttttcacatacactccggcccaggcttcgtgcaacgaggggaagggaaagtgctatttgaagctcagctccaatggctcgcctaccaaaattcttcacggacgaggcggaatctcagggtacaccttgagattgtgtaagatggacaacgaatgtactacaaagatcaaaccgcgaattgtaggcggaacggcgtcggtccggggagaatggccgtggcaggtaacattgcatacgacctcccccacccagagacacttgtgcggtgggtcaattatcgggaatcagtggatcttgaccgcagcccactgcttttatggagtggagtccccgaaaatcttgagggtgtactcagggatcttgaaccagtcggaaatcaaggaggacacatcattcttcggggtccaagagatcatcattcacgatcagtacaagatggcggagtcggggtacgatattgcgcttctgaaattggaaaccaccgtcaactacactgattcgcagcggccgatctgcctgcctagcaaaggggaccggaatgtcatctacacagattgttgggtaacgggttggggttatcgcaagctgcgagacaaaatccagaatacactgcaaaaagcgaaaattccgttggtgactaacgaggagtgtcagaagagatatagaggtcacaaaatcacccacaagatgatctgcgccggataccgggaagggggtaaagacgcatgtaaaggagatagcggtggcccgttgagctgcaagcataacgaggtatggcacctcgtgggtattacttcatggggagaaggctgtgcgcagcgcgagaggccgggtgtctatactaatgtagtagagtatgtggactggatcttggagaaaactcaagcagtctgaagcgctgccttctgcggggcttgccttctggccatgcccttcttctctcccttgcacctgtacctcttggtctttgaataaagcctgagtaggaag

SEQ ID NO: 1972 - DNA, 1722 bp, Artificial Sequence
  derived and/or modified sequence
atgatcttcctgtaccaggtggtgcacttcatcctgttcaccagcgtgagcggcgagtgcgtgacccagctgctgaaggacacctgcttcgagggcggcgacatcaccaccgtgttcacccccagcgccaagtactgccaggtggtgtgcacctaccaccccagatgcctgctgttcaccttcaccgccgagagccccagcgaggaccccaccagatggttcacctgcgtgctgaaggacagcgtgaccgagaccctgcccagagtgaacagaaccgccgccatcagcggctacagcttcaagcagtgcagccaccagatcagcgtgaacaacatctgcctgctgaagcacacccagaccggcacccccaccagaatcaccaagctggacaaggtggtgagcggcttcagcctgaagagctgcgccctgagcaacctggcctgcatcagagacatcttccccaacaccgtgttcgccgacagcaacatcgacagcgtgatggcccccgacgccttcgtgtgcggcagaatctgcacccaccaccccggctgcctgttcttcaccttcttcagccaggagtggcccaaggagagccagagaaacctgtgcctgctgaagaccagcgagagcggcctgcccagcaccagaatcaagaagagcaaggccctgagcggcttcagcctgcagagctgcagacacagcatccccgtgttctgccacagcagcttctaccacgacaccgacttcctgggcgaggagctggacatcgtggccgccaagagccacgaggcctgccagaagctgtgcaccaacgccgtgagatgccagttcttcacctacacccccgcccaggccagctgcaacgagggcaagggcaagtgctacctgaagctgagcagcaacggcagccccaccaagatcctgcacggcagaggcggcatcagcggctacaccctgagactgtgcaagatggacaacgagtgcaccaccaagatcaagcccagaatcgtgggcggcaccgccagcgtgagaggcgagtggccctggcaggtgaccctgcacaccaccagccccacccagagacacctgtgcggcggcagcatcatcggcaaccagtggatcctgaccgccgcccactgcttctacggcgtggagagccccaagatcctgagagtgtacagcggcatcctgaaccagagcgagatcaaggaggacaccagcttcttcggcgtgcaggagatcatcatccacgaccagtacaagatggccgagagcggctacgacatcgccctgctgaagctggagaccaccgtgaactacaccgacagccagagacccatctgcctgcccagcaagggcgacagaaacgtgatctacaccgactgctgggtgaccggctggggctacagaaagctgagagacaagatccagaacaccctgcagaaggccaagatccccctggtgaccaacgaggagtgccagaagagatacagaggccacaagatcacccacaagatgatctgcgccggctacagagagggcggcaaggacgcctgcaagggcgacagcggcggccccctgagctgcaagcacaacgaggtgtggcacctggtgggcatcaccagctggggcgagggctgcgcccagagagagagacccggcgtgtacaccaacgtggtggagtacgtggactggatcctggagaagacccaggccgtgtag

SEQ ID NO: 1973 - DNA, 1878 bp, Artificial Sequence
  derived and/or modified sequence
atgatcttcctgtaccaggtggtgcacttcatcctgttcaccagcgtgagcggcgagtgcgtgacccagctgctgaaggacacctgcttcgagggcggcgacatcaccaccgtgttcacccccagcgccaagtactgccaggtggtgtgcacctaccaccccagatgcctgctgttcaccttcaccgccgagagccccagcgaggaccccaccagatggttcacctgcgtgctgaaggacagcgtgaccgagaccctgcccagagtgaacagaaccgccgccatcagcggctacagcttcaagcagtgcagccaccagatcagcgcctgcaacaaggacatctacgtggacctggacatgaagggcatcaactacaacagcagcgtggccaagagcgcccaggagtgccaggagagatgcaccgacgacgtgcactgccacttcttcacctacgccaccagacagttccccagcctggagcacagaaacatctgcctgctgaagcacacccagaccggcacccccaccagaatcaccaagctggacaaggtggtgagcggcttcagcctgaagagctgcgccctgagcaacctggcctgcatcagagacatcttccccaacaccgtgttcgccgacagcaacatcgacagcgtgatggcccccgacgccttcgtgtgcggcagaatctgcacccaccaccccggctgcctgttcttcaccttcttcagccaggagtggcccaaggagagccagagaaacctgtgcctgctgaagaccagcgagagcggcctgcccagcaccagaatcaagaagagcaaggccctgagcggcttcagcctgcagagctgcagacacagcatccccgtgttctgccacagcagcttctaccacgacaccgacttcctgggcgaggagctggacatcgtggccgccaagagccacgaggcctgccagaagctgtgcaccaacgccgtgagatgccagttcttcacctacacccccgcccaggccagctgcaacgagggcaagggcaagtgctacctgaagctgagcagcaacggcagccccaccaagatcctgcacggcagaggcggcatcagcggctacaccctgagactgtgcaagatggacaacgagtgcaccaccaagatcaagcccagaatcgtgggcggcaccgccagcgtgagaggcgagtggccctggcaggtgaccctgcacaccaccagccccacccagagacacctgtgcggcggcagcatcatcggcaaccagtggatcctgaccgccgcccactgcttctacggcgtggagagccccaagatcctgagagtgtacagcggcatcctgaaccagagcgagatcaaggaggacaccagcttcttcggcgtgcaggagatcatcatccacgaccagtacaagatggccgagagcggctacgacatcgccctgctgaagctggagaccaccgtgaactacaccgacagccagagacccatctgcctgcccagcaagggcgacagaaacgtgatctacaccgactgctgggtgaccggctggggctacagaaagctgagagacaagatccagaacaccctgcagaaggccaagatccccctggtgaccaacgaggagtgccagaagagatacagaggccacaagatcacccacaagatgatctgcgccggctacagagagggcggcaaggacgcctgcaagggcgacagcggcggccccctgagctgcaagcacaacgaggtgtggcacctggtgggcatcaccagctggggcgagggctgcgcccagagagagagacccggcgtgtacaccaacgtggtggagtacgtggactggatcctggagaagacccaggccgtgtag

SEQ ID NO: 1974 - DNA, 633 bp, Artificial Sequence
  derived and/or modified sequence
tgaagcggcttcagcctgaagagctgcgccctgagcaacctggcctgcatcagagacatcttccccaacaccgtgttcgccgacagcaacatcgacagcgtgatggcccccgacgccttcgtgtgcggcagaatctgcacccaccaccccggctgcctgttcttcaccttcttcagccaggagtggcccaaggagagccagagaaacctgtgcctgctgaagaccagcgagagcggcctgcccagcaccagaatcaagaagagcaaggccctgagcggcttcagcctgcagagctgcagacacagcatccccgtgttctgccacagcagcttctaccacgacaccgacttcctgggcgaggagctggacatcgtggccgccaagagccacgaggcctgccagaagctgtgcaccaacgccgtgagatgccagttcttcacctacacccccgcccaggccagctgcaacgagggcaagggcaagtgctacctgaagctgagcagcaacggcagccccaccaagatcctgcacggcagaggcggcatcagcggctacaccctgagactgtgcaagatggacaacgagctgagaggcgcccccatgaagatcagcggctggctgaagaccagctag

SEQ ID NO: 1975 - DNA, 1722 bp, Artificial Sequence
  derived and/or modified sequence
atgatcttcctgtaccaggtggttcattttattctgttcacttccgtgtccggggagtgcgtgacacagctccttaaggatacatgctttgaaggaggagatataacgactgtgttcacaccttccgcaaagtattgccaggttgtgtgtacttatcacccgcggtgcctgctgttcacgtttacggccgagtccccaagtgaggacccaacacgatggttcacctgcgttctgaaagactctgtgacagagactctcccaagggtcaataggacagcagccatcagcggttatagtttcaagcagtgtagtcaccaaatttccgtgaacaacatctgtttactgaagcatacccagactggaaccccaacccggatcactaagttggataaagtagttagtggattttctctaaagagctgtgcgctaagtaatttagcctgcattagggatattttccctaacaccgtttttgctgactcaaatatcgatagcgtgatggcacctgatgccttcgtctgcggccgtatatgtactcatcaccctggttgtctgttcttcacatttttctcacaagagtggccaaaggagagccagcggaatttgtgtttattgaagacaagtgagtcaggcttgcctagtacaagaattaagaagtccaaggccctgagcggcttttcgctgcagagttgccgccattccattcctgtgttctgccatagcagcttttaccatgacacagatttcctgggcgaagaactcgacatcgtggcagcaaagtctcacgaggcttgtcagaagctgtgtactaacgccgtgcgctgccagttcttcacatacactccggctcaagcttcgtgcaacgagggcaaagggaagtgttatctgaagctcagctcgaacgggtctcctacaaaaattctgcatggcaggggtggaatttctggctacacattgaggctgtgcaaaatggataacgagtgcactacaaagattaagccccgaattgtgggaggaaccgcctcagtaagaggcgaatggccctggcaggtcaccttgcatactacctcacccacccagcggcatctttgtggggggtcgattattggcaaccagtggattctaacagccgcccactgtttctacggcgtcgagagcccgaagatcctcagggtatacagcggcattctaaaccagtcagaaatcaaagaagatacctcatttttcggtgtccaggaaattattattcacgaccagtacaaaatggccgaatctggctatgacattgccctgcttaaactggagaccacggtcaactacaccgatagccaaagaccaatctgtctgcccagcaagggcgaccgaaatgtgatctataccgactgctgggtcaccggttgggggtatagaaagctgagggacaagatccaaaacactctccagaaggctaagatccctctggtaaccaatgaagagtgtcagaaaagataccgaggccataagatcactcataagatgatctgcgcaggctatagggagggcgggaaagatgcttgcaagggagattcaggcggtccgttgtcatgtaaacacaacgaagtgtggcatctcgttggaattacttcttggggagaaggttgtgctcaaagggaacggcccggagtatacacgaacgtcgtggaatacgttgattggatcctcgaaaaaacgcaggccgtatag

SEQ ID NO: 1976 - DNA, 1878 bp, Artificial Sequence
  derived and/or modified sequence
atgatcttcctctaccaggtggttcatttcatcctctttacttctgtatcaggagagtgtgttacccaacttctgaaggacacatgctttgaagggggagatatcaccactgtattcacaccttctgccaagtattgccaggtcgtttgcacctatcatccccgatgtctactgttcacctttacagctgagtcaccgagcgaggatcctacacgttggtttacttgtgtgctgaaagactcagtgacagagaccctaccaagagtgaatagaactgcagcgatctccggatactccttcaagcagtgctcccatcagatatctgcttgcaacaaggacatctacgttgacctagatatgaagggtattaactataactcttctgtcgccaagtctgcccaggaatgtcaggaacgctgcacagatgatgtgcattgtcattttttcacatacgcaaccagacagtttcccagtctggaacaccggaatatttgtctattaaagcatacccagaccggcacccctacgcggatcacaaaacttgacaaggtggtcagtgggtttagtctcaaatcttgcgcactgagcaacctggcgtgcatccgtgacatcttccctaataccgtttttgcagacagcaatatcgatagcgtgatggcacctgatgccttcgtttgcggcagaatttgcactcatcatcctggttgcttattcttcacctttttctcacaggaatggcccaaagaatcccaaaggaacctgtgtctcctcaagacctctgagagcgggttgccttccactcgaatcaaaaaatccaaagcactctctggtttcagcctgcaaagttgtcggcacagtatccccgtgttctgccatagctccttttatcacgacaccgacttcctcggggaggagctggatattgttgccgctaagtcacacgaggcttgtcagaaactgtgcacaaatgccgtccggtgtcagttcttcacctacacacctgctcaggcctcgtgcaacgaaggtaaaggtaagtgctatctgaagctgagctccaacggtagccccaccaagatcttgcatggaagaggggggatttcaggctataccttgcgtctgtgtaagatggacaacgaatgcaccaccaagatcaaaccaaggatagtgggtggcaccgcatccgttcgtggcgaatggccctggcaggtaaccctccacaccacatctcctacccaaagacatctatgcgggggtagcatcatcggcaaccagtggatcctcacagctgcccactgtttctatggcgtagaatcacccaaaattctgagggtgtacagtggcatcctcaatcagagcgaaatcaaggaggatacaagcttcttcggggttcaggagataatcatccatgatcagtacaaaatggccgagtcaggctacgatattgccctgctgaagttggagacaaccgttaactataccgatagccagcggccaatctgcctccctagtaaaggcgataggaatgtgatctacaccgattgttgggtcactggatggggataccgcaagctgagggataagatccagaacaccttgcaaaaggctaaaatcccattagtaaccaacgaggagtgtcagaagaggtaccggggccacaaaatcacccacaaaatgatctgcgcaggttatagggaggggggaaaagatgcatgcaaaggcgatagcggcgggccactcagttgtaagcacaatgaggtctggcacctcgtaggcattaccagttggggtgaaggctgcgctcagcgcgagaggcccggggtgtacaccaatgtggtggaatacgtggattggatcctggaaaagactcaggccgtctag

SEQ ID NO: 1977 - DNA, 633 bp, Artificial Sequence
  derived and/or modified sequence
tgatccggcttttccctgaaatcatgtgccctttccaatctggcttgtatccgagatatattccccaataccgtcttcgccgactctaacatagattcagtgatggcgcctgatgctttcgtttgtggccgaatctgcactcatcatcccggctgcctgttcttcacctttttctcgcaggagtggcccaaggaatctcagagaaacttatgtctcctgaagacatctgagtcaggtttgccttcaacacgtatcaaaaagagcaaggccctgagtgggttttcgctccagtcatgtagacacagtatccctgtcttctgtcacagctcattctatcatgatacggacttcctgggcgaggagctggacattgtcgctgccaagtcccacgaggcttgccaaaagctgtgtacgaatgcagtccgctgtcaattcttcacttacacaccagcgcaggcgagctgcaacgaaggcaagggaaagtgttacctgaaactcagtagcaacggatcacccacaaagatcttgcacggaagaggcggcatatccggctatacacttaggttatgtaagatggataacgaactgcgtggcgcccccatgaaaatatctggctggctcaaaacaagctag

SEQ ID NO: 1978 - DNA, 3122 bp, Artificial Sequence
  derived and/or modified sequence
aggcacacaggcaaaatcaagttctacatctgtccctgtgtatgtcacttgtttgaatacgaaataaaattaaaaaaataaattcagtgtattgagaaagcaagcaattctctcaaggtatatttctgacatactaagattttaacgactttcacaaatatgctgtactgagagagaatgttacataacattgagaactagtacaagtaaatattaaagtgaagtgaccatttcctacacaagctcattcagaggaggatgaagaccattttggaggaagaaaagcacccttattaagaattgcagcaagtaagccaacaaggtcttttcaggatgattttcttatatcaagtggtacatttcattttatttacttcagtttctggtgaatgtgtgactcagttgttgaaggacacctgctttgaaggaggggacattactacggtcttcacaccaagcgccaagtactgccaggtagtctgcacttaccacccaagatgtttactcttcactttcacggcggaatcaccatctgaggatcccacccgatggtttacttgtgtcctgaaagacagtgttacagaaacactgccaagagtgaataggacagcagcgatttctgggtattctttcaagcaatgctcacaccaaataagcgttaataacatttgtctactgaagcacacccaaacagggacaccaaccagaataacgaagctcgataaagtggtgtctggattttcactgaaatcctgtgcactttctaatctggcttgtattagggacattttccctaatacggtgtttgcagacagcaacatcgacagtgtcatggctcccgatgcttttgtctgtggccgaatctgcactcatcatcccggttgcttgttttttaccttcttttcccaggaatggcccaaagaatctcaaagaaatctttgtctccttaaaacatctgagagtggattgcccagtacacgcattaaaaagagcaaagctctttctggtttcagtctacaaagctgcaggcacagcatcccagtgttctgccattcttcattttaccatgacactgatttcttgggagaagaactggatattgttgctgcaaaaagtcacgaggcctgccagaaactgtgcaccaatgccgtccgctgccagttttttacctataccccagcccaagcatcctgcaacgaagggaagggcaagtgttacttaaagctttcttcaaacggatctccaactaaaatacttcacgggagaggaggcatctctggatacacattaaggttgtgtaaaatggataatgagtgtaccaccaaaatcaagcccaggatcgttggaggaactgcgtctgttcgtggtgagtggccgtggcaggtgaccctgcacacaacctcacccactcagagacacctgtgtggaggctccatcattggaaaccagtggatattaacagccgctcactgtttctatggggtagagtcacctaagattttgcgtgtctacagtggcattttaaatcaatctgaaataaaagaggacacatctttctttggggttcaagaaataataatccatgatcagtataaaatggcagaaagcgggtatgatattgccttgttgaaactggaaaccacagtgaattacacagattctcaacgacccatatgcctgccttccaaaggagatagaaatgtaatatacactgattgctgggtgactggatgggggtacagaaaactaagagacaaaatacaaaatactctccagaaagccaagatacccttagtgaccaacgaagagtgccagaagagatacagaggacataaaataacccataagatgatctgtgccggctacagggaaggagggaaggacgcttgcaagggagattcgggaggccctctgtcctgcaaacacaatgaggtctggcatctggtaggcatcacgagctggggcgaaggctgtgctcaaagggagcggccaggtgtttacaccaacgtggtcgagtacgtggactggattctggagaaaactcaagcagtgtgaatgggttcccaggggccattggagtccctgaaggacccaggatttgctgggagagggtgttgagttcactgtgccagcatgcttcctccacagtaacacgctgaaggggcttggtgtttgtaagaaaatgctagaagaaaacaaactgtcacaagttgttatgtccaaaactcccgttctatgatcgttgtagtttgtttgagcattcagtctctttgtttttgatcacgcttctatggagtccaagaattaccataaggcaatatttctgaagattactatataggcagatatagcagaaaataaccaagtagtggcagtggggatcaggcagaagaactggtaaaagaagccaccataaatagatttgttcgatgaaagatgaaaactggaagaaaggagaacaaagacagtcttcaccattttgcaggaatctacactctgcctatgtgaacacatttcttttgtaaagaaagaaattgattgcatttaatggcagattttcagaatagtcaggaattcttgtcatttccattttaaaatatatattaaaaaaaatcagttcgagtagacacgagctaagagtgaatgtgaagataacagaatttctgtgtggaagaggattacaagcagcaatttacctggaagtgataccttaggggcaatcttgaagatacactttcctgaaaaatgatttgtgatggattgtatatttatttaaaatatcttgggaggggaggctgatggagatagggagcatgctcaaacctccctaagacaagctgctgctgtgactatgggctcccaaagagctagatcgtatatttatttgacaaaaatcaccatagactgcatccatactacagagaaaaaacaattagggcgcaaatggatagttacagtaaagtcttcagcaagcagctgcctgtattctaagcactgggattttctgtttcgtgcaaatatttatctcattattgttgtgatctagttcaataacctagaatttgaattgtcaccacatagctttcaatctgtgccaacaactatacaattcatcaagtgtg

SEQ ID NO: 1979 - DNA, 2396 bp, Artificial Sequence
  derived and/or modified sequence
aaatgcagctttggctagcaggcacacaggcaaaatcaagttctacatctgtccctgtgtatgtcacttgtttgaatacgaaataaaattaaaaaaataaattcagtgtattgagaaagcaagcaattctctcaaggtatatttctgacatactaagattttaacgactttcacaaatatgctgtactgagagagaatgttacataacattgagaactagtacaagtaaatattaaagtgaagtgaccatttcctacacaagctcattcagaggaggatgaagaccattttggaggaagaaaagcacccttattaagaattgcagcaagtaagccaacaaggtcttttcaggatgattttcttatatcaagtggtacatttcattttatttacttcagtttctggtgaatgtgtgactcagttgttgaaggacacctgctttgaaggaggggacattactacggtcttcacaccaagcgccaagtactgccaggtagtctgcacttaccacccaagatgtttactcttcactttcacggcggaatcaccatctgaggatcccacccgatggtttacttgtgtcctgaaagacagtgttacagaaacactgccaagagtgaataggacagcagcgatttctgggtattctttcaagcaatgctcacaccaaataagcgcttgcaacaaagacatttatgtggacctagacatgaagggcataaactataacagctcagttgccaagagtgctcaagaatgccaagaaagatgcacggatgacgtccactgccactttttcacgtacgccacaaggcagtttcccagcctggagcatcgtaacatttgtctactgaagcacacccaaacagggacaccaaccagaataacgaagctcgataaagtggtgtctggattttcactgaaatcctgtgcactttctaatctggcttgtattagggacattttccctaatacggtgtttgcagacagcaacatcgacagtgtcatggctcccgatgcttttgtctgtggccgaatctgcactcatcatcccggttgcttgttttttaccttcttttcccaggaatggcccaaagaatctcaaagaaatctttgtctccttaaaacatctgagagtggattgcccagtacacgcattaaaaagagcaaagctctttctggtttcagtctacaaagctgcaggcacagcatcccagtgttctgccattcttcattttaccatgacactgatttcttgggagaagaactggatattgttgctgcaaaaagtcacgaggcctgccagaaactgtgcaccaatgccgtccgctgccagttttttacctataccccagcccaagcatcctgcaacgaagggaagggcaagtgttacttaaagctttcttcaaacggatctccaactaaaatacttcacgggagaggaggcatctctggatacacattaaggttgtgtaaaatggataatgagtgtaccaccaaaatcaagcccaggatcgttggaggaactgcgtctgttcgtggtgagtggccgtggcaggtgaccctgcacacaacctcacccactcagagacacctgtgtggaggctccatcattggaaaccagtggatattaacagccgctcactgtttctatggggtagagtcacctaagattttgcgtgtctacagtggcattttaaatcaatctgaaataaaagaggacacatctttctttggggttcaagaaataataatccatgatcagtataaaatggcagaaagcgggtatgatattgccttgttgaaactggaaaccacagtgaattacacagattctcaacgacccatatgcctgccttccaaaggagatagaaatgtaatatacactgattgctgggtgactggatgggggtacagaaaactaagagacaaaatacaaaatactctccagaaagccaagatacccttagtgaccaacgaagagtgccagaagagatacagaggacataaaataacccataagatgatctgtgccggctacagggaaggagggaaggacgcttgcaagggagattcgggaggccctctgtcctgcaaacacaatgaggtctggcatctggtaggcatcacgagctggggcgaaggctgtgctcaaagggagcggccaggtgtttacaccaacgtggtcgagtacgtggactggattctggagaaaactcaagcagtgtgaatgggttcccaggggccattggagtccctgaaggacccaggatttgctgggagagggtgttgagttcactgtgccagcatgcttcctccacagtaacacgctgaaggggcttggtgtttgtaagaaaatgctagaagaaaacaaactgtcacaagttgttatgtcc

SEQ ID NO: 1980 - DNA, 717 bp, Artificial Sequence
  derived and/or modified sequence
tgtctggattttcactgaaatcctgtgcactttctaatctggcttgtattagggacattttccctaatacggtgtttgcagacagcaacatcgacagtgtcatggctcccgatgcttttgtctgtggccgaatctgcactcatcatcccggttgcttgttttttaccttcttttcccaggaatggcccaaagaatctcaaagaaatctttgtctccttaaaacatctgagagtggattgcccagtacacgcattaaaaagagcaaagctctttctggtttcagtctacaaagctgcaggcacagcatcccagtgttctgccattcttcattttaccatgacactgatttcttgggagaagaactggatattgttgctgcaaaaagtcacgaggcctgccagaaactgtgcaccaatgccgtccgctgccagttttttacctataccccagcccaagcatcctgcaacgaagggaagggcaagtgttacttaaagctttcttcaaacggatctccaactaaaatacttcacgggagaggaggcatctctggatacacattaaggttgtgtaaaatggataatgagcttagaggcgctccgatgaaaatctctggatggctcaagacttcttaaaaagcaagtcaattacgtcgtatctcatacattctgttttcctcacaataaatttccctaagacaagaaggagcattcggcacca

SEQ ID NO: 1981 - DNA, 1722 bp, Artificial Sequence
  derived and/or modified sequence
atgatcttcctgtaccaggtggtgcacttcatcctcttcacctctgtgtctggagaatgtgtgacccagctgctgaaggacacctgctttgagggcggggacatcaccaccgtcttcacccccagcgccaagtactgccaggtggtgtgcacctaccacccccgctgcctgctcttcaccttcaccgctgagagccccagcgaggaccccacccgctggttcacctgtgtgctgaaggacagcgtgacagagaccctgccccgggtgaacagaacagctgccatcagcggctacagcttcaagcagtgcagccaccagatctctgtgaacaacatctgcctgctgaagcacacccagacaggcacccccacccgcatcaccaagctggacaaggtggtgtctggcttcagcctgaagagctgtgccctgagcaacctggcctgcatccgggacatcttccccaacacagtgtttgctgacagcaacattgattctgtgatggccccagatgcctttgtgtgtggccgcatctgcacccaccaccctggctgcctcttcttcaccttcttcagccaggagtggcccaaggagagccagaggaacctgtgcctgctgaagaccagcgagagcggcctgcccagcacccgcatcaagaagagcaaggccctgagcggcttcagcctgcagagctgccgccacagcatccctgtgttctgccacagcagcttctaccatgacacagacttcctgggggaggagctggacatcgtggccgccaagagccatgaggcctgccagaagctgtgcaccaatgctgtgcgctgccagttcttcacctacaccccagcccaggccagctgcaatgaaggcaagggcaagtgctacctgaagctgagcagcaatggcagccccaccaagatcctgcacggccggggcggcatcagcggctacaccctgcggctgtgcaagatggacaatgaatgtaccaccaagatcaagccccgcatcgtgggcggcacagcctctgtgcggggggagtggccctggcaggtgaccctgcacaccaccagccccacccagaggcacctgtgtggcggcagcatcatcggcaaccagtggatcctgacagctgcccactgcttctacggcgtggagagccccaagatcctgcgggtgtacagcggcatcctgaaccagagcgagatcaaggaggacaccagcttctttggagtgcaggagatcatcatccatgaccagtacaagatggccgagagcggctatgacatcgccctgctgaagctggagaccaccgtgaactacacagacagccagaggcccatctgcctgcccagcaagggggacagaaatgtcatctacacagactgctgggtgacaggctggggctacaggaagctgcgggacaagatccagaacaccctgcagaaggccaagatccccctggtgaccaatgaggagtgccagaagcgctaccggggccacaagatcacccacaagatgatctgtgccggctaccgggagggcggcaaggatgcctgcaagggggacagcggcggccccctgagctgcaagcacaatgaggtgtggcacctggtgggcatcacctcctggggcgagggctgtgcccagcgggagaggcctggggtgtacaccaacgtggtggagtatgtggactggatcctggagaagacccaggccgtgtag

SEQ ID NO: 1982 - DNA, 1878 bp, Artificial Sequence
  derived and/or modified sequence
atgatcttcctgtaccaggtggtgcacttcatcctcttcacctctgtgtctggagaatgtgtgacccagctgctgaaggacacctgctttgagggcggggacatcaccaccgtcttcacccccagcgccaagtactgccaggtggtgtgcacctaccacccccgctgcctgctcttcaccttcaccgctgagagccccagcgaggaccccacccgctggttcacctgtgtgctgaaggacagcgtgacagagaccctgccccgggtgaacagaacagctgccatcagcggctacagcttcaagcagtgcagccaccagatcagcgcctgcaacaaggacatctacgtggacctggacatgaagggcatcaactacaacagctctgtggccaagagcgcccaggagtgccaggagcgctgcacagatgatgtgcactgccacttcttcacctacgccacccggcagttccccagcctggagcacaggaacatctgcctgctgaagcacacccagacaggcacccccacccgcatcaccaagctggacaaggtggtgtctggcttcagcctgaagagctgtgccctgagcaacctggcctgcatccgggacatcttccccaacacagtgtttgctgacagcaacattgattctgtgatggccccagatgcctttgtgtgtggccgcatctgcacccaccaccctggctgcctcttcttcaccttcttcagccaggagtggcccaaggagagccagaggaacctgtgcctgctgaagaccagcgagagcggcctgcccagcacccgcatcaagaagagcaaggccctgagcggcttcagcctgcagagctgccgccacagcatccctgtgttctgccacagcagcttctaccatgacacagacttcctgggggaggagctggacatcgtggccgccaagagccatgaggcctgccagaagctgtgcaccaatgctgtgcgctgccagttcttcacctacaccccagcccaggccagctgcaatgaaggcaagggcaagtgctacctgaagctgagcagcaatggcagccccaccaagatcctgcacggccggggcggcatcagcggctacaccctgcggctgtgcaagatggacaatgaatgtaccaccaagatcaagccccgcatcgtgggcggcacagcctctgtgcggggggagtggccctggcaggtgaccctgcacaccaccagccccacccagaggcacctgtgtggcggcagcatcatcggcaaccagtggatcctgacagctgcccactgcttctacggcgtggagagccccaagatcctgcgggtgtacagcggcatcctgaaccagagcgagatcaaggaggacaccagcttctttggagtgcaggagatcatcatccatgaccagtacaagatggccgagagcggctatgacatcgccctgctgaagctggagaccaccgtgaactacacagacagccagaggcccatctgcctgcccagcaagggggacagaaatgtcatctacacagactgctgggtgacaggctggggctacaggaagctgcgggacaagatccagaacaccctgcagaaggccaagatccccctggtgaccaatgaggagtgccagaagcgctaccggggccacaagatcacccacaagatgatctgtgccggctaccgggagggcggcaaggatgcctgcaagggggacagcggcggccccctgagctgcaagcacaatgaggtgtggcacctggtgggcatcacctcctggggcgagggctgtgcccagcgggagaggcctggggtgtacaccaacgtggtggagtatgtggactggatcctggagaagacccaggccgtgtag

SEQ ID NO: 1983 - DNA, 633 bp, Artificial Sequence
  derived and/or modified sequence
tgaagcggcttcagcctgaagagctgtgccctgagcaacctggcctgcatccgggacatcttccccaacacagtgtttgctgacagcaacattgattctgtgatggccccagatgcctttgtgtgtggccgcatctgcacccaccaccctggctgcctcttcttcaccttcttcagccaggagtggcccaaggagagccagaggaacctgtgcctgctgaagaccagcgagagcggcctgcccagcacccgcatcaagaagagcaaggccctgagcggcttcagcctgcagagctgccgccacagcatccctgtgttctgccacagcagcttctaccatgacacagacttcctgggggaggagctggacatcgtggccgccaagagccatgaggcctgccagaagctgtgcaccaatgctgtgcgctgccagttcttcacctacaccccagcccaggccagctgcaatgaaggcaagggcaagtgctacctgaagctgagcagcaatggcagccccaccaagatcctgcacggccggggcggcatcagcggctacaccctgcggctgtgcaagatggacaatgagctgcggggggcccccatgaagatcagcggctggctgaagaccagctag

SEQ ID NO: 1984 - DNA, 1722 bp, Artificial Sequence
  derived and/or modified sequence
atgatcttcctgtaccaggtggtgcacttcatcctgttcaccagcgtgtccggggagtgcgttacacagctgttaaaagacacatgcttcgagggaggcgacattactacggttttcacccccagcgctaaatactgccaggtcgtgtgcacataccatcctcgttgtttgctctttacgtttacagccgagtcaccatcagaggaccctaccaggtggttcacatgcgttttaaaggattccgtgacggagactctccctcgcgtgaaccgcaccgccgccatctcaggctactccttcaaacaatgttcacaccaaatctcggtgaacaatatttgtctgttgaaacacacacaaacagggaccccaacaagaatcaccaagctagacaaagtggtatcaggcttctctttgaaaagttgcgccctatcaaacctagcatgtattagggatatcttccctaataccgtgttcgctgacagcaatatagattctgttatggctccggacgctttcgtgtgtggacgaatctgcacacaccatcctggctgccttttctttacttttttctcacaagaatggcctaaagagagtcagaggaacctttgtctcctgaagacctcggaaagtggcttacccagcactcgtatcaagaaaagtaaagcactgtctgggttctcactgcagagttgccggcatagcattccagtgttctgtcatagttcattttatcacgataccgatttcctgggcgaggagctcgatatcgttgctgctaaatcacacgaggcatgccagaaactgtgcaccaatgcagtgagatgtcagttcttcacatacacacccgcccaggcatcatgtaacgagggaaagggcaaatgctatctgaaactctctagcaatggctctcctacaaagatcctccatggtagggggggcattagcggatacaccctgcgcctgtgcaaaatggataacgaatgtaccaccaagattaaaccacgcattgtgggcggtacagccagtgtaagaggcgagtggccctggcaggtcacccttcacactacaagccctacacagaggcatctgtgtggagggagtataattggcaaccaatggattctcaccgccgcacattgcttttacggcgtggaatcgcctaagatattgagagtatacagcggcatcttgaaccagtcagagataaaagaagacacgtcttttttcggcgtgcaggaaatcatcatccacgaccagtataagatggcagaatccgggtacgatatagctctgctcaaattggagacaactgtaaattacaccgattcacagagaccaatctgtctcccctccaagggagatcggaacgtcatctatacagactgttgggtgacaggatggggttaccgcaagctcagagacaaaattcagaatacccttcaaaaggcaaagatccccttagtcaccaacgaggaatgccagaaacgatatcgcggccacaaaatcacacacaagatgatctgcgccggctacagagaaggggggaaggacgcttgtaagggcgattccggaggcccattaagttgcaaacacaatgaggtgtggcaccttgtgggcatcaccagttggggtgagggctgtgcccagcgcgaaaggccaggcgtttatacaaacgtcgtcgagtacgtggattggatcctggaaaaaacccaggccgtctag

SEQ ID NO: 1985 - DNA, 1878 bp, Artificial Sequence
  derived and/or modified sequence
atgatcttcctgtaccaggtggtgcacttcatcctgttcaccagcgtatctggagagtgcgtgacacagctgctgaaagacacgtgctttgaaggcggtgatattactaccgtctttacccctagcgcgaagtactgccaggtcgtttgcacctaccacccgcgatgtctgctttttacatttacggccgaaagcccttctgaagaccctacacgctggtttacatgtgtcctcaaagacagcgtgacagagactctgccaagggtaaatcgtaccgcagccattagcggctattcatttaaacagtgctcccatcagatctcagcatgcaacaaggacatttacgttgacttggacatgaaggggattaattacaactctagcgtggccaaaagcgcacaggaatgccaggagcggtgcaccgacgatgtgcactgccactttttcacgtatgcaacccgtcagttcccaagtctggaacatcggaatatttgcttactgaagcacactcagacaggtactcctacaaggatcaccaagctagacaaggtggtatcgggcttcagtctaaagtcctgtgccttaagcaatctggcatgcatccgcgacatattcccgaatacagttttcgccgactccaatattgactcagttatggcgcctgacgctttcgtctgtgggcggatctgcactcaccacccgggctgcctgttcttcacattcttctctcaggagtggccgaaggaatcccagcgcaacctgtgccttctcaaaaccagtgagagcggtttgccctcaacgaggatcaaaaagtccaaagctttgtctggcttttccctccaatcttgcagacactcgatccccgtgttctgccatagctccttctaccatgatacagattttctcggcgaggaattggacatcgttgcggccaaatcacatgaggcatgtcagaaactgtgcacaaatgccgttcgctgtcagtttttcacctatactcctgctcaggcctcttgcaacgagggcaagggtaagtgttatttgaagctctcgagcaatgggagtccgaccaaaattttgcacggacgggggggcatctcagggtacactcttcggctctgtaaaatggataatgaatgcacgaccaaaattaagccacgcatcgtgggcgggacggcgagcgtgaggggggagtggccatggcaggtgactctgcacaccacttctccaactcagcgccacttgtgcgggggatccattataggcaatcagtggatactcactgctgcccactgtttttacggggtcgagagccccaagatcttacgcgtttatagtggtattcttaaccaaagcgagatcaaagaagacaccagtttctttggagttcaggaaatcatcattcacgaccaatataaaatggccgagtccggatacgacatagcactgctcaaactggaaaccactgtcaattacacagattcacagcggcctatttgtctccccagcaagggcgataggaatgtgatctacacggactgttgggtcactggttggggataccgaaagcttagagacaagatccaaaacacactgcagaaagcaaagatcccgctggtgactaatgaggagtgtcagaaaaggtaccgtgggcacaagattacgcataaaatgatatgcgccggataccgggaggggggaaaggacgcttgcaagggcgactcaggcggccccttgtcatgcaagcacaatgaggtttggcatctggtggggataacatcctggggcgagggatgcgcccagagagaaaggccaggcgtctacacaaacgtcgtggaatacgtggactggattctggagaagactcaggccgtgtag

SEQ ID NO: 1986 - DNA, 633 bp, Artificial Sequence
  derived and/or modified sequence
tgaagcggcttcagcctgaagagctgcgccctgagcaacctggcctgcattcgggacatttttccaaataccgtgtttgctgatagcaatatcgattccgtgatggctccggacgcctttgtctgtggccgcatttgtacccatcacccaggctgtctgttcttcactttcttttctcaagagtggcccaaagaaagccagaggaacctgtgtctgctaaaaacttcagaaagtggactcccttctaccagaataaagaagtcaaaagccctctctggtttcagcctccagtcctgtcggcactctataccagttttctgccactccagtttttatcatgacaccgattttctcggcgaggagttggatatcgtcgccgcgaagagccatgaggcatgtcagaagctgtgcacgaacgctgtgcggtgtcaattctttacatacacacccgcacaggccagttgcaacgaaggcaaaggaaaatgctacctcaagctgtcttcaaacggtagtcccactaagatcctgcatggtagaggagggatttcgggatataccttgcggctgtgcaaaatggacaatgagctgaggggtgccccaatgaagataagcggctggctgaagacttcctag

SEQ ID NO: 1987 - DNA, 1722 bp, Artificial Sequence
  derived and/or modified sequence
atgatctttctctatcaagtcgtccactttatcctgttcacatcagtctccggggagtgcgtaacccagctcctgaaggacacgtgtttcgaaggcggtgatatcacaactgtttttacaccgagcgcaaagtattgccaggtcgtgtgtacataccaccctagatgtctcctctttactttcacagccgaatccccatctgaggacccaacccgctggttcacatgcgtgctgaaggatagtgttaccgaaaccctgccaagggtgaacaggaccgctgccatcagtggctacagctttaaacaatgctcccaccagatttctgtgaacaacatctgccttctaaaacacacacagaccggtacgcctactaggattacgaagctggacaaggttgtctcaggttttagtctcaaaagctgtgcgctgtccaacctggcctgtattagggatatctttccaaacacagtgttcgccgactcaaacatagactctgtgatggctccggacgcgttcgtgtgtggtcggatttgcacacaccatccgggatgtctattcttcacgtttttctctcaggagtggcctaaggaaagtcagaggaacctctgcctgcttaagacgagtgagtcggggctgcccagcacccggatcaagaagagcaaagcactgtctggattctccctgcaatcttgtagacacagcatccctgtgttttgccactctagcttttaccacgacacagactttctgggtgaggaattagacattgtagcagcgaagagtcatgaggcttgtcagaaactctgtacaaacgcggttcggtgtcagtttttcacctatactccagcacaggcctcctgcaacgaagggaaaggcaagtgttacctgaaactgtcctctaatggcagtcccaccaagatcttgcatggtaggggagggatcagtggttataccctgcgcttatgtaaaatggacaatgaatgtaccactaaaatcaaacccaggattgtgggcggaaccgctagtgtcagaggagagtggccttggcaagtaaccctgcacactaccagtcctactcagcgccatctatgtggaggaagtatcattggaaatcaatggatcctcacagccgctcactgtttttatggtgttgaaagtccaaagatcctacgtgtctatagcggcatactgaatcagagtgagattaaagaggataccagtttctttggtgtgcaagaaattattatacacgatcaatataagatggcagaatccggctacgacatcgctctgttaaaattggagacaaccgtcaattacaccgacagccagagacctatctgtctaccgtccaaaggagacaggaacgtgatttacacagattgctgggtgaccgggtggggctaccggaaacttcgcgataagatacagaacacactgcagaaagctaagatccctctggtgaccaacgaagaatgccagaaacgctacaggggccacaagattactcataagatgatctgcgccggatacagagaaggaggtaaggacgcctgtaagggggatagcggaggtcctctgtcttgtaaacacaatgaggtgtggcacctggtgggcatcaccagctggggcgaaggctgtgcgcagagggagcgccctggagtgtacactaatgtcgtggagtatgtggactggattctggaaaagacccaggctgtctag

SEQ ID NO: 1988 - DNA, 1878 bp, Artificial Sequence
  derived and/or modified sequence
atgatcttcctgtaccaggtagtgcatttcatactgttcacctccgtatctggtgaatgcgtgacacaactcctcaaagatacctgctttgagggaggcgacattacgaccgtgttcacaccgagtgccaaatattgtcaagtggtgtgtacctaccatcctaggtgtctccttttcacttttaccgcagagagtcctagtgaagatcctaccagatggttcacatgtgtgctgaaggatagtgtcacggagaccctgccccgtgtaaataggacagcggcaattagtggctactcattcaagcagtgcagtcaccaaatctctgcgtgtaacaaggatatctatgtggatcttgacatgaagggaatcaactataactcttcggtcgctaagtctgctcaagagtgccaagaaaggtgtacagacgatgtgcactgtcactttttcacttacgcaacaaggcagttcccaagcctggagcaccgtaacatatgtctgctcaagcacacgcagactggcaccccgaccagaatcaccaagctggacaaagttgtctccggcttctctctgaagtcttgcgcactgagtaacctggcttgtattcgcgatatttttcctaataccgtttttgccgactctaatattgattccgtcatggcgccagatgcctttgtctgcgggcgtatctgcacgcaccaccccggatgcctctttttcactttcttctctcaggaatggccaaaggagtctcaaaggaacctgtgtttactgaaaactagtgagagtgggctaccctcaacacgcattaagaaaagcaaagctctcagcggcttctctctgcaaagctgtcgacatagcataccggttttttgccactctagcttttaccacgacacggatttcttgggcgaggagctcgacattgttgccgctaagtctcatgaggcttgtcagaagctctgtaccaacgctgttaggtgccagttcttcacgtatacccctgcacaggccagctgtaacgagggaaagggaaagtgttatcttaagctgtcttccaacggctctcccacaaagatcctgcatggtcgcggtgggatcagcggctataccctgagactttgtaaaatggataacgagtgcacgacaaaaatcaagccgcgtatagtcggtggaaccgcttcagtccggggagaatggccctggcaggtaacgctacataccacatcacccactcaacggcacctctgtggcggaagcatcatcgggaaccagtggattcttactgcagctcactgcttctacggagtggagtcacctaaaattctgcgggtgtattctgggattctgaaccaatcagaaatcaaagaagatacaagcttcttcggagtgcaagaaataattattcacgatcagtataaaatggctgaaagtggatacgacatcgccctgctcaaattggaaaccacagtgaactacactgattcccagcgacccatctgtctgcccagtaagggtgataggaatgtcatctacactgactgctgggttacaggatggggctatcgtaaattgagagataagatccaaaacaccctgcaaaaagctaaaattcccttggtgaccaatgaagaatgtcagaaaagatacagagggcataagattacacataaaatgatttgtgctggatatagggagggaggcaaggatgcttgcaaaggcgacagcgggggtccactgagctgtaaacataacgaggtctggcacttggtaggcatcacatcctggggcgagggatgcgctcaaagagagaggcctggggtatacaccaatgtcgttgagtatgtcgattggattctggaaaagactcaggcagtgtag

SEQ ID NO: 1989 - DNA, 633 bp, Artificial Sequence
  derived and/or modified sequence
taatccgggttttcattgaaatcttgtgctcttagtaatcttgcctgtattcgcgacatcttccccaacacagtgtttgcggatagcaatattgattccgtaatggccccagacgcgttcgtgtgcggtaggatttgcacacatcaccctggctgtttgtttttcacattctttagtcaagagtggcctaaagaaagtcaacgaaacctctgtctgttgaagacctccgaatccgggcttccgagcacaaggatcaagaagtctaaggctctctctggattcagtcttcagtcctgtcggcacagcatccccgtattctgccacagcagcttttatcacgataccgatttcctgggagaggaactggacatcgttgccgctaaaagccacgaagcctgtcagaaattgtgtactaacgctgttcgctgtcaatttttcacatacactccggcacaagccagctgtaacgaaggcaaggggaaatgttacttaaaactgagttctaatggttcgcccacgaaaatactgcacggcaggggaggtatctccggatatactctccggctctgtaaaatggataatgagttgcgcggtgcaccaatgaagatctccggctggctcaagacgagctag

SEQ ID NO: 1990 - DNA, 1722 bp, Artificial Sequence
  derived and/or modified sequence
atgatatttctctatcaagtggtgcacttcattctcttcacatccgtgtcaggcgagtgcgtgacgcaattgctgaaagacacatgcttcgaaggcggcgatataacaaccgtgttcaccccctccgccaaatattgtcaagtggtctgtacctatcatcctcggtgcctgctattcaccttcacagccgagagtccctcagaggatccaacgagatggttcacttgcgtcttgaaagactccgttactgagacactgccaagggtaaaccgtacagcagcaataagcggttactctttcaaacagtgtagtcaccagatatcagtcaataatatttgcttgctcaagcatacccagacaggcacaccaacccggataaccaagttagacaaagttgtgagcggtttcagcttgaagtcttgtgcactttccaatttggcttgtatacgtgatatttttccgaacaccgtttttgccgacagcaacattgactctgtaatggcccccgatgcatttgtgtgcggtcgaatttgtacgcaccatcctggctgtctattctttactttcttcagtcaggagtggccaaaggagtctcagaggaatctgtgcttgcttaaaacttcggagtccggactaccatccactaggataaagaagtcgaaggccctcagtgggttctccctgcaatcctgtcggcactccatcccagtcttttgccatagctccttctaccacgatactgactttctgggcgaagaacttgacattgtggccgccaagtcacacgaagcctgccaaaaactttgtaccaacgctgtgcgttgtcagttctttacgtacacgcctgcacaggcatcatgtaacgagggaaaaggaaaatgttatttaaaacttagctcaaatggcagcccaacgaaaatcttacacggaaggggcggcatctcagggtacactctgagactttgcaaaatggataatgaatgcacaacgaagatcaaaccaaggatagtcggaggaacagccagtgtccgaggagaatggccgtggcaagtgactctacatacgactagccctacgcagcgccatctgtgcgggggctccattattggcaatcaatggatcttgacagctgcccactgcttctacggcgtggagtcgcccaaaattcttcgggtgtatagcggaatccttaatcagtcagagataaaggaggatactagcttctttggcgtgcaggagatcataattcatgaccagtataagatggcagaatcaggatatgatatagccctgctaaaattggagaccactgtgaattacactgatagccagcggcccatttgcctgccgtctaaaggagatcgtaacgtgatctatactgattgttgggtcacgggatggggctacagaaaacttcgggacaagatccagaacactctgcagaaggccaaaattcccctcgtgaccaacgaagagtgtcaaaagcgctaccgggggcacaaaatcacccataagatgatctgtgccggatacagggaggggggaaaggacgcatgtaagggagattctggcgggccactgtcttgtaaacacaatgaagtatggcatctggtggggatcactagctggggggaaggctgcgcccagcgcgaacgccctggagtttacactaacgtggtagaatacgttgattggattttagaaaagactcaggctgtatag

SEQ ID NO: 1991 - DNA, 1878 bp, Artificial Sequence
  derived and/or modified sequence
atgatatttttataccaagttgtgcattttatcttgttcacatcagtgtcaggagagtgtgtcacccagctgctgaaagacacttgctttgaaggaggtgacatcaccaccgtcttcaccccttcagcaaagtattgccaggtggtgtgtacctaccaccctcggtgtctgctgtttacctttactgccgaatccccttcagaagatcctacgagatggttcacatgtgtacttaaagactccgtcactgagaccttgccaagagttaaccgcacagcagcgatatccggctactccttcaaacagtgcagccatcagatatccgcctgtaacaaagatatttacgtcgatctggacatgaaaggaattaactacaatagtagcgttgccaaatccgcccaggagtgccaagagcgctgcactgatgatgtccactgccacttcttcacttacgccacacgccaatttccctcactggaacacagaaacatctgtctgctgaagcacactcagactggcacccccacacgtataaccaaactcgataaggttgtttccggcttctcacttaaatcttgtgccctctcgaacctggcctgtataagggacatcttcccaaataccgtgttcgccgactctaacatcgatagcgtgatggcacccgacgccttcgtttgtggacgaatttgcacccaccaccctggatgtctgttctttacctttttcagccaggagtggcccaaggagtcgcagcggaacctgtgcctgctgaagacatcagagtctggcctgccaagcacccgcatcaagaaaagcaaagccctcagcgggttttcattacagtcatgccgacactcaattcccgtcttttgtcatagctctttttaccatgatactgacttcctgggagaggaactggacatcgtggcagctaaaagtcacgaagcttgtcaaaaattatgtaccaatgccgtgcgctgccagtttttcacatacacaccggctcaggcgtcctgcaacgaggggaaaggaaagtgttaccttaagcttagcagtaacggctccccaaccaaaatactgcacggacgcggtggcatttctggctacacgcttcgcctgtgtaaaatggacaatgagtgcaccacaaagatcaaaccacggatcgtgggcggcaccgcctcggtccgcggcgagtggccgtggcaggtgacactccacacaacctcgcccactcaaagacatttgtgcgggggcagcatcataggcaaccagtggattctcacagctgcacactgtttctacggcgtcgagtcaccaaaaatactccgtgtctatagtgggattctgaatcagtccgagataaaggaagatacaagtttttttggggtccaggagatcattattcatgatcagtacaaaatggccgaatccggatatgacattgcattactgaaacttgaaaccacggtcaattacacagattcccagaggcctatttgtttgccaagtaagggcgatagaaatgtgatttacacagactgctgggtgaccggatggggatacagaaaactgagggataagatccagaatactctgcagaaggcgaagatacccctagtgactaacgaagagtgccagaagcggtaccgcggacataaaatcacacataaaatgatttgcgcaggatacagggagggtggcaaagatgcctgcaagggtgacagtggcggccccctctcttgtaagcacaacgaagtgtggcacctggttggcatcacatcgtggggagaaggatgcgcccaaagggagaggcctggggtctacacaaatgtagtggagtacgttgactggatccttgagaagacacaagctgtgtag

SEQ ID NO: 1992 - DNA, 633 bp, Artificial Sequence
  derived and/or modified sequence
taatctggattctctctgaaatcttgtgctctgtcaaatcttgcttgcatacgcgatatcttccccaatactgtcttcgccgactctaacatcgattctgtaatggcccccgatgctttcgtctgtggacggatatgtacccatcaccccgggtgtcttttctttacattctttagtcaggagtggcccaaagaatcccagcgtaatctgtgcttgctgaagacatctgaatcaggcttaccctcgacgcggataaagaaatccaaagcacttagtggattctcgctgcagtcttgtcggcattctatccctgtcttctgtcatagcagcttttatcacgatacggattttctgggcgaggaactggacatcgtggccgcaaagtcccacgaagcgtgtcagaagttatgcacaaacgcagtgcggtgccagttctttacgtatacccccgcccaagcatcgtgcaacgagggaaaggggaagtgttatttgaagctgtcctctaatggctcaccaaccaagatcctgcacggtagaggtggcatatcaggctatacactccgcctctgtaaaatggacaatgaactgaggggagcaccaatgaaaatatctggctggcttaaaacatcgtag

SEQ ID NO: 1993 - DNA, 1722 bp, Artificial Sequence
  derived and/or modified sequence
atgatcttcttgtaccaggtcgttcacttcatcctgtttacttctgtctctggcgagtgcgttactcagcttctgaaagacacatgctttgaaggcggagacattactactgtgtttaccccgtctgctaagtattgtcaggtggtgtgtacttatcatccccgctgtttgctgttcacgttcaccgcagaatcaccttcagaagatcccacacgttggtttacttgtgttctaaaagatagcgtgactgagaccctcccccgtgtcaatagaactgctgctatttctgggtattccttcaagcaatgttctcatcagatttccgtgaacaacatctgtcttctgaaacacacacagactggaacacccactcgcattaccaagcttgacaaagtggtgagcggctttagccttaagtcctgcgctctgtctaacctggcatgtataagagacatcttccccaataccgtcttcgccgactcgaatatcgattccgttatggcgcctgacgcgtttgtctgcggtcgcatatgcactcatcaccccggatgtttatttttcacatttttctcacaggagtggccaaaggagtcccaaagaaatctgtgcttgcttaaaacttcggagtccggactaccatccactaggataaagaagtcgaaggccctcagtgggttctccctgcaatcctgtcggcactccatcccagtcttttgccatagctccttctaccacgatactgactttctgggcgaagaacttgacattgtggccgccaagtcacacgaagcctgccaaaaactttgtaccaacgctgtgcgttgtcagttctttacgtacacgcctgcacaggcatcatgtaacgagggaaaaggaaaatgttatttaaaacttagctcaaacggatccccaactaaaatcctacacggcagaggcggcatcagcggatacactctccgactctgcaaaatggacaacgagtgtaccacaaagatcaaaccgagaattgtcggcggaacggcatctgtgagaggggagtggccatggcaggtgacgctccatactacgtctccaactcagaggcatctatgcggaggatcaatcataggcaaccaatggatccttactgctgcccattgtttttacggagtggaaagtcccaaaatcctgagagtttatagcggtatactgaaccagagcgagatcaaggaggatacaagctttttcggagtgcaggaaataatcatacatgatcagtataagatggccgagtccggctacgacattgccttgctcaaacttgagacgaccgtgaattataccgacagccagcgaccgatctgcctaccctcgaagggagaccgcaacgtcatctacactgattgttgggtgacaggatggggatacagaaaactacgtgacaaaatacagaatactctacagaaggctaagattccgctagttacaaacgaggaatgtcagaaaaggtaccgtggccacaaaattacacacaagatgatatgcgcaggatatcgggaaggcggaaaagacgcttgtaagggagatagcggaggaccactgtcttgtaagcacaacgaagtgtggcaccttgtgggtatcacatcctggggggaaggctgtgcgcaaagagaaagacctggcgtctacacaaacgttgttgaatatgttgactggattcttgagaagactcaggcggtctag

SEQ ID NO: 1994 - DNA, 1878 bp, Artificial Sequence
  derived and/or modified sequence
atgatttttttgtatcaggtagttcatttcatcttattcacatccgtaagtggcgagtgtgtaactcagttgctgaaagacacatgcttcgaggggggggatatcacgacagtatttacgccaagtgccaaatattgccaagttgtatgcacataccatccccgttgtttgctgttcaccttcactgcagagagcccctccgaggatcccactcgctggtttacatgcgtgcttaaagattcggtgacagaaacacttccaagggtcaataggacagcggccatttcagggtattcattcaaacagtgcagccatcagatatccgcctgtaacaaagatatttacgtcgatctggacatgaaaggaattaactacaatagtagcgttgccaaatccgcccaggagtgccaagagcgctgcactgatgatgtccactgccacttcttcacttacgccacacgccaatttccctcactggaacacagaaacatctgtctgctgaagcacactcagactggcacccccacacgtataaccaaactcgataaggttgtttccggcttctcacttaaatcttgtgccctctcgaacctggcctgtatccgtgacattttccccaacactgtcttcgctgattcaaacatcgattctgtaatggctccagatgctttcgtgtgtggccgaatctgcactcaccatcccggctgtctattcttcactttcttttcacaagagtggccaaaagagtcacagcgtaatctttgcttattgaaaaccagcgagagtggattaccgtccacacgcatcaaaaagtctaaagcgttatccggtttctctctgcaaagctgtagacactccatcccagtcttctgccactcatctttctatcacgatactgatttcctgggcgaagagctcgatattgtggcagccaaatcacacgaagcctgccagaagctctgtaccaacgcagtgaggtgccaattcttcacttacactccagcccaggcatcttgtaatgagggcaaaggaaagtgctaccttaaactgagctccaacggttcacctactaagattctccacggacgcggaggtatttcaggatacaccctacggttatgtaagatggataatgagtgtacaaccaaaataaagcctagaatcgtgggaggcacagccagcgtgagaggggagtggccttggcaagtgaccctccacaccacttcccctactcagagacacctgtgcggcggttcaatcatcggaaatcagtggattctcacagcagcccactgcttctatggcgtagagtcccctaaaatacttagagtctattctggaattctgaaccagagcgaaatcaaggaggatacctcatttttcggagtacaggagatcatcatccatgaccagtacaaaatggctgagtccggttacgatatagctctgctcaaattggaaaccactgtgaactatactgatagccagagaccaatttgtctgccttcgaaaggggaccgcaatgtaatctataccgactgttgggtgacaggctggggatacagaaaactgcgagacaagatccagaacacattacaaaaggccaaaatcccgctggtgactaatgaggagtgccagaaaagatacagaggacacaaaattactcataagatgatctgtgcaggatatcgggaggggggcaaagatgcctgcaagggagatagtgggggacccctgagctgtaaacataatgaagtgtggcacttagtcggtattacttcctggggtgaagggtgcgcacaaagggagcgccccggggtatatacgaatgttgtagagtacgtggactggatcttagaaaaaactcaagctgtgtag

SEQ ID NO: 1995 - DNA, 633 bp, Artificial Sequence
  derived and/or modified sequence
taatctggattctctctgaaatcttgtgctctgtcaaatcttgcttgcatacgcgatatcttccccaatactgtcttcgccgactctaacatcgattctgtaatggcccccgatgctttcgtctgtggacggatatgtacccatcaccccgggtgtcttttctttacattctttagtcaggagtggcccaaagaatcccagcgtaatctgtgcttgctgaagacatctgaatcaggcttaccctcgacgcggataaagaaatccaaagcacttagtggattctcgctgcagtcttgtcggcacagcatccccgtgttttgccattcttccttctaccatgacactgactttctgggcgaggagctggatatagtggccgcaaaatcccatgaggcatgtcaaaaactttgtaccaatgcagtccgatgccaatttttcacctatacaccagctcaggcctcatgcaatgaaggcaaggggaaatgttacctcaaactgtcaagcaacggaagtcccacgaagatcctccacggccgcggcggcatttctggctatacactacggctctgcaagatggacaatgaactgaggggcgcgccaatgaaaatatctggctggcttaaaacatcgtag

SEQ ID NO: 1996 - DNA, 1875 bp, Artificial Sequence
  derived and/or modified sequence
atgatcttcctctaccaagtggtgcacttcatcctgtttacttccgtctcgggcgagtgcgtgacccagctgctgaaggacacctgcttcgaaggaggcgatatcaccactgttttcaccccgtccgccaaatactgccaagtggtctgcacctaccatcctcggtgcctgctgttcacttttacggctgaaagcccgagcgaagatcctacgcgctggtttacctgcgtgctgaaagactccgtcacggagactctcccgcgggttaaccggaccgccgccatctcggggtactcgttcaaacaatgttcgcatcagatctccgcctgcaacaaggatatctacgtggatctggacatgaaaggaatcaattacaacagctccgtggcaaaatcggctcaagaatgccaggaacgctgtaccgatgatgtgcattgtcacttcttcacctacgccacccgccagttcccttcgctcgagcaccggaatatctgtctgcttaagcacacccagaccggcactcctacgcggatcaccaagttggataaggtggtgtctggattttcactgaaatcctgtgccctctccaacctcgcttgtatccgcgacatcttccctaacactgtgttcgcggatagcaacatcgactccgtgatggcccccgacgcattcgtctgcgggcgtatttgtacccatcatcccggctgtctcttcttcaccttcttctcacaagagtggccaaaagaatcgcagcgcaacctgtgccttctcaagacgtccgagtccggactgccgtcaactagaatcaagaaatcaaaagccctctcgggtttctcgctgcagtcgtgccgccactccatcccggtgttctgccactcgagcttttatcatgacactgactttctcggagaagagctggacattgtggctgccaagtcccatgaagcctgtcagaagctctgcaccaatgctgtgcgctgccagtttttcacttacaccccggcgcaggctagctgcaacgaagggaagggaaagtgctatctgaaactgtcctcaaatggatcccccaccaaaatcctgcacggaaggggaggcatcagcggttacacgctgcggctctgcaagatggataacgaatgtactactaagatcaaaccaagaatcgtgggcgggaccgcgtcggtccggggagagtggccttggcaggtgaccctccacacgacgtcgcctactcagcgccatctgtgcggaggctcaatcattggaaatcaatggattctcaccgcggcacattgcttctacggcgtcgagtccccgaaaattctgagagtctactccggcattttgaaccagtcggaaatcaaggaggatactagcttcttcggagtgcaagaaatcatcatccacgaccagtacaaaatggcggagtcaggctacgatattgcccttctgaaattggaaacgaccgtgaattacactgacagccaaagaccgatctgcctgccgtccaagggtgacagaaacgtcatctacaccgactgctgggtcaccgggtgggggtacaggaaactgagagataagatccagaatactctgcaaaaagcaaagatcccgctggtgaccaacgaagaatgtcagaagagatatcggggacacaagatcactcacaaaatgatctgcgccggatatcgcgaaggaggaaaagacgcttgtaaaggagatagcggcggcccattgtcgtgtaagcataatgaggtgtggcaccttgtcggcatcacttcatggggcgaggggtgcgcccaacgcgaaaggccaggtgtctacactaatgtggtcgagtacgtcgattggatcttggaaaaaactcaagccgtg

SEQ ID NO: 1997 - DNA, 1875 bp, Artificial Sequence
  derived and/or modified sequence
atgatttttctgtatcaggtcgtgcattttattctttttactagcgtgtcaggtgagtgcgttacacagctgctaaaggacacctgctttgagggaggggatataacaacggttttcactccaagcgcgaaatactgccaggttgtctgcacctatcaccctcggtgtctgttgtttactttcacggccgaatcaccctcggaagatcctacgcggtggttcacttgtgttctaaaggacagtgtcacggagacactccctcgtgtgaaccgtacggcggcaataagcggctactcgttcaaacagtgctcacaccaaatctccgcttgtaacaaggacatttacgtcgatttggacatgaagggaattaactacaatagctctgtcgctaagagcgctcaggagtgccaagaacgctgtacggacgacgtgcattgccacttttttacatacgccacacgtcagttcccctcgttggaacaccggaacatctgcttgttgaagcacacccagactggcacccctacaaggatcactaagctggataaagttgtttctggtttctctcttaagtcgtgtgcccttagtaatctggcatgtatacgtgacatcttccccaacaccgttttcgcagactccaacatcgacagtgtcatggcgcccgacgccttcgtttgcggtcgtatctgcacgcatcatccaggctgcctgttcttcactttctttagccaggaatggccgaaagaatcccaacggaacttatgtttgcttaagacttctgagtctggtctaccatcaacccgaatcaagaagtcgaaggccctcagtggattcagtctgcaatcctgtaggcatagcatacccgtgttctgtcattcatccttttatcatgacacagacttccttggggaagaactcgatatcgttgccgccaagtcccatgaagcctgccaaaagctctgtactaacgctgtgcgctgccagttcttcacatataccccggcacaggcttcatgtaatgaggggaagggcaaatgttacctaaaactatcctccaacgggtcaccgaccaagatcttgcacggacgcggtggtatatccgggtacactttacgcctatgcaagatggacaatgagtgcacaacaaagattaagccccgaatcgtaggaggcacagcttcagtgcgtggtgagtggccatggcaggtaacccttcacacaacttcccccacgcagaggcacctatgtggtggatctattattggcaatcagtggatcctgactgcagctcattgcttctacggcgtcgaatctcctaagattcttcgagtctatagtggcattctcaaccagtcagaaattaaagaggacaccagtttttttggtgttcaggaaattattatccatgaccagtacaagatggccgaatcagggtatgatattgcccttctcaagctcgaaacaactgtgaactacacggattcacaaagacctatttgcctccccagcaaaggtgaccgcaacgtaatctacacagactgctgggtcacaggctgggggtacaggaagttgcgtgataaaatacagaacacacttcagaaggccaagattcccttggttaccaacgaggagtgtcaaaagaggtatcgaggccacaagatcacccacaagatgatatgcgcaggttatcgcgagggcggtaaagatgcttgcaagggcgattcgggtgggcccctgagctgtaagcataacgaggtctggcatctggttggaattacatcttggggggagggttgtgctcagcgcgagcggccgggcgtgtatactaatgttgtggaatacgtggactggattttggagaaaactcaagctgtg

SEQ ID NO: 1998 - DNA, 1875 bp, Artificial Sequence
  derived and/or modified sequence
atgatttttctgtatcaggtggtgcacttcatattgttcacttctgtgtctggagagtgtgtgacacagctgctgaaggatacatgctttgaaggcggcgatattaccacagtgttcactccaagcgcgaagtactgtcaggtggtgtgcacgtaccacccacgctgtcttctctttactttcacagctgagagccccagtgaggatccaacccggtggttcacatgtgtccttaaggattcagtgactgaaacactgccacgcgtgaaccgtacggcggcgatttccggctatagtttcaagcagtgcagccatcagatttcagcttgcaacaaagacatctacgtcgatctggacatgaaagggattaactataattctagcgtggcgaaaagtgcgcaagagtgccaagagaggtgcactgacgacgtgcactgtcacttttttacctatgctacgaggcagtttcccagcctagagcaccgcaatatttgcctgctgaagcatactcagactggcacaccgactcggattaccaagctcgataaagtagtttctgggttctccttgaaaagctgtgcactgagcaacctcgcgtgcattcgagacatatttcctaatactgtctttgcggactccaatatagactcagtcatggcgcccgacgctttcgtctgcggccgcatctgcactcaccatcctgggtgcctgttcttcacttttttctcccaagagtggcccaaggaaagtcagcgaaatctgtgcctcttaaaaacctctgagagtggactgccatccactcgaatcaaaaagtccaaggcactgtccggtttctctctgcaaagttgccggcattctatcccagtgttctgccattcatcgttctatcatgatacggactttctcggtgaagaattggacatcgtcgctgctaagtcccacgaggcttgccagaagctctgcaccaatgccgtcaggtgccagtttttcacctacactcctgcgcaggccagttgcaatgagggaaagggcaagtgctatctgaaattaagttccaatgggtcacctacgaagattctgcatggaagaggagggattagtggatacacactacgcttatgcaagatggacaatgaatgtactacgaagatcaaacctcgtattgtgggcggaacggccagcgtccggggggaatggccctggcaggtaactctgcataccaccagcccaacccaacgacatttatgtggcggatccatcatcgggaaccagtggattctgacagcagcccactgtttctatggcgtagagtcacccaaaatcctcagagtgtactcaggcattcttaatcagtcagaaataaaagaggataccagcttctttggagttcaggaaatcatcatccacgaccagtacaagatggccgaatctggctacgatatagcacttctgaagctcgaaactactgtcaactatacagattcacaaaggcccatctgtctgccttccaagggcgatcggaacgtgatctatactgactgctgggtgaccggttggggatacaggaagctgcgggacaagatccagaatacattgcagaaagctaagattccgctcgtaactaacgaggagtgccagaagaggtataggggccataagatcacccataaaatgatctgtgccggctacagagagggagggaaggacgcttgtaagggcgacagtggaggacccctctcatgcaagcacaatgaggtgtggcaccttgtcggcattacatcttggggcgagggctgcgctcaaagggagcgccctggcgtttatacaaatgttgtggagtacgtggactggatcctggagaaaacccaggctgtc

SEQ ID NO: 1999 - DNA, 1875 bp, Artificial Sequence
  derived and/or modified sequence
atgatctttttgtatcaagtggtgcactttatcctgtttacctcggtgtctggagagtgtgtgacacaacttctgaaagacacctgttttgagggcggagatatcaccaccgtgtttacaccttcggccaaatattgccaggttgtctgtacctatcaccctcggtgtctgttgtttaccttcactgcagaatccccttctgaagatccaactaggtggttcacctgcgtcctcaaagatagcgtcaccgagaccctgccacgggttaatcggacagccgccatctctgggtactcctttaagcagtgcagccaccagatctctgcctgtaacaaagacatctatgtggatctggacatgaaaggcattaactacaactctagcgttgcgaaatccgcccaggagtgccaggagagatgtactgacgacgttcactgtcacttttttacatatgccacgcgtcagttcccaagcttggagcaccgcaacatctgtctgctaaagcacacacagaccggcacacctacccggataaccaaactggataaggttgtcagcggtttttccttaaaaagctgcgccctgtcaaatctggcttgtatccgtgacatcttccccaatactgtttttgccgactcgaacattgattcggtgatggccccagatgcttttgtctgtggacgaatctgcacacaccatccaggctgccttttcttcacgttcttcagtcaggaatggcctaaggaatcccaaaggaacctgtgtctgctgaagacatctgaaagtggcctaccctcaaccagaatcaagaaatctaaggcgctctccgggttctctctccagtcctgtaggcacagcatccccgtgttttgccattcttccttctatcatgataccgactttcttggagaggagctggatatcgtggcggctaagagtcacgaagcatgccagaaactgtgtacaaatgcagtccggtgccagttctttacttacacccccgcccaggcctcctgcaacgaaggaaagggaaagtgctatctcaagctcagttcaaatggtagccctactaaaatcctccatggccgggggggaataagtggatacactctgcgcctgtgcaagatggacaacgagtgcactacaaagatcaagcctcggattgtgggcggaacggcttcagtccggggtgagtggccctggcaggtcaccctacatacaacgagcccaacacagaggcatctgtgcgggggatcgatcataggcaatcaatggattctgaccgctgcccactgtttctacggggttgagtccccaaagattctgagggtctatagcggcatattgaatcaaagcgagatcaaggaggacactagtttctttggggtgcaggagatcattatccatgaccaatacaaaatggcggagtccgggtacgatattgctctgctcaagttagagacaacagttaactacacggattcacagcgcccgatatgcctcccctcaaagggagacaggaatgtcatctacactgactgctgggtgactgggtggggatacaggaagctgcgtgacaagatccaaaataccttgcagaaggccaaaattcccctggtgaccaatgaggagtgtcagaagcgttaccgcggccacaagattacacataaaatgatctgtgctgggtacagagaaggtggcaaggacgcatgcaaaggtgacagcggaggcccattgtcctgcaagcacaacgaggtatggcaccttgttggtataacatcctggggggaaggctgtgcacagagagaacgacctggggtgtacacgaatgtggtggagtacgtggactggatccttgaaaaaacacaggctgtc

SEQ ID NO: 2000 - DNA, 1875 bp, Artificial Sequence
  derived and/or modified sequence
atgattttcctgtaccaggtggtgcatttcattctttttacatctgttagtggcgaatgcgttacacagcttctgaaagatacctgtttcgaaggcggcgatattaccacagtgttcacaccaagcgcaaaatattgtcaagtggtttgcacctatcatcccagatgcctactgttcactttcaccgctgagtctccaagcgaggatcccactcgctggttcacttgcgtgctgaaggactctgtgactgaaactctgccaagggtgaataggaccgccgctataagcgggtattcttttaagcagtgctctcatcagatttccgcatgcaacaaggatatctacgtcgacctggatatgaaaggaatcaactataacagcagcgttgcaaagtctgcccaagagtgccaagaaagatgcactgacgacgtgcattgccatttcttcacctatgctactaggcagttcccatcattagaacatcggaatatctgcttactaaagcacactcagactgggaccccaactaggatcaccaagttagataaagtagtttcaggcttttccctcaagtcttgtgccctgtctaatctagcctgcattcgggatatcttccccaacacagttttcgctgatagcaacatagactccgtcatggccccagacgcttttgtctgtggccgcatctgcacccaccaccccgggtgtctcttcttcacatttttttcacaggagtggccaaaggaaagccagcgcaatctatgtctgcttaagacctccgaatcaggcctgccttccacccggattaaaaagtctaaagccttgtctggattttccctgcaaagctgtcgccacagcatacccgtgttttgccattcatcattctaccacgacaccgattttctgggtgaggagttagatattgtagcagccaagtctcatgaggcctgccagaaactgtgtacaaacgccgttcgctgccagttcttcacatatacaccagctcaggccagttgtaatgagggcaagggcaaatgttacctaaaactcagtagtaacggttctccaactaaaatcctacatggcagaggagggatatccggatataccctgcgattatgcaagatggataatgaatgcacaacaaaaatcaagcccaggatcgtgggcggcaccgccagcgttcggggtgagtggccatggcaggtgaccctgcacaccacctctccaactcagagacatctgtgtgggggcagcatcatcgggaaccaatggatcctgaccgccgcccattgcttttatggcgtcgagtcccctaagatacttcgggtgtacagcggcatcctgaatcaatctgagataaaggaagatacttccttttttggggtccaggagatcattattcatgaccagtacaaaatggccgagagcggatatgatattgccctgctgaaactggagaccaccgtgaattataccgatagtcagaggcctatctgtctgccaagcaaaggagataggaacgtgatttataccgattgctgggtcacaggttggggctaccgtaaactgcgcgataagattcagaataccctacagaaggccaagatccccctagtgacaaatgaagagtgtcagaaaagataccggggccacaaaattactcataagatgatttgtgccggctaccgggaaggcgggaaagacgcttgtaaaggggactctggtgggcctctatcttgtaaacacaatgaggtttggcatctggtgggcataactagctggggcgagggctgcgctcagcgagaacgtccaggcgtttacacaaacgtggtggagtacgtagactggattctggagaagactcaagctgtc

SEQ ID NO: 2001 - DNA, 1875 bp, Artificial Sequence
  derived and/or modified sequence
atgattttcctctaccaggtcgtgcacttcattctctttaccagcgtgtccggagagtgcgtgactcagctgctcaaggacacttgcttcgaaggtggagacatcaccaccgtgttcactccctcggcgaagtactgtcaagtggtctgcacctaccatccgcggtgcctgctgttcaccttcactgcggagtccccttcggaggacccgaccaggtggttcacttgcgttctgaaagattcggtcactgaaactcttccccgtgtgaacagaactgcggccatctccggatactcctttaaacagtgtagccatcagatctcagcatgcaataaggatatctacgtggatctcgatatgaaaggcatcaactacaattcatcagtggcgaagtcggcccaggagtgtcaagaaagatgtacggatgatgtccactgtcacttctttacctacgcaacccggcagttcccgtcgctcgaacatcggaatatctgccttctgaaacacacccagactggaaccccgactcgcatcactaaacttgacaaggtcgtgtcaggattttcactgaaaagctgcgccctctcaaaccttgcatgcatccgagacattttccctaacacggtgttcgccgactcgaatatcgactccgtgatggccccagacgcttttgtctgcgggcgcatctgcacccatcatcctggttgtctgttcttcactttcttctcacaagagtggccgaaggaatcgcagcggaacctgtgcctgcttaagacttcggaaagcggactcccatccactagaattaagaagtcaaaagctctgtctggtttctcgcttcaatcgtgccgccactcaataccagtgttttgtcacagctccttctaccacgacaccgatttcctgggcgaagagctggacattgtggccgctaagtcccatgaggcctgccagaagctgtgcactaacgcggtgcgatgccagttctttacttacactcctgcccaggcctcgtgtaatgagggcaagggaaaatgctaccttaagctctcgagcaacggctccccgaccaaaatcctccacggaagagggggcatcagcggatacacccttcgcctgtgcaagatggacaacgaatgcaccactaagatcaaacctaggattgtggggggtacggcatccgtgcggggtgagtggccgtggcaggtgaccctccacacgaccagcccaactcagcgccacctctgtggcggctcgattatcggaaaccagtggattctcacggcagcccactgcttctacggggttgaatcaccgaagattctgagagtctatagcgggatcctcaaccaatcggagatcaaggaggacacctcctttttcggagtgcaagagatcatcatccatgaccagtacaaaatggcagagagcggttacgatatcgcgctgctgaagctggagactactgtgaactacaccgacagccaaagaccgatctgcttgccgtctaaaggagatcgcaatgtcatctacactgattgctgggtgacgggctgggggtaccggaagctgcgcgataagatccagaataccctgcagaaggccaaaattccgctggtgacgaacgaggaatgtcaaaagcggtaccgtggccacaagatcactcacaagatgatctgcgcgggttaccgcgagggaggtaaggacgcgtgcaaaggagactccgggggccccctcagctgtaagcacaacgaagtgtggcatcttgtgggaatcacttcatggggtgaaggatgcgcgcagagagagcgaccgggcgtttacactaacgtggtggaatacgtggactggatcctggagaaaacccaggcagtg

SEQ ID NO: 2002 - DNA, 1875 bp, Artificial Sequence
  derived and/or modified sequence
atgatttttctgtaccaagtggtgcactttattctctttacctcggttagcggagagtgtgtgactcaactccttaaagatacttgttttgaaggaggtgacataacgacggtgtttaccccgtcagcaaagtactgtcaggtcgtctgtacctaccaccctaggtgcctgctctttacctttactgcagagtcgccctcggaggaccctaccaggtggttcacctgtgtccttaaggattcagtgactgaaactctgccaagagtcaatcgtaccgcagccatttcagggtatagctttaagcaatgtagtcaccaaatctcggcatgtaacaaggacatttatgtggacctggatatgaaagggataaactataacagctccgtggcaaagagcgctcaagagtgccaggaaagatgcactgacgacgtgcactgccatttctttacctatgcgactcgtcaatttccctcccttgaacatcgcaacatttgcctgctcaagcacactcagactggtacgcccactagaatcaccaaattggataaggtcgtgtccgggttctcgctcaagagctgtgcactttcgaatctggcctgcattagagacattttcccgaataccgtgttcgccgacagcaatattgattcagtgatggcacctgacgcatttgtgtgtggacggatttgtacccatcaccccggatgcctctttttcactttcttttctcaagagtggccgaaggaatcacaaagaaacctgtgtctgcttaagaccagcgagtccggtttgcctagcacccgcattaagaaatccaaggcactctcaggattttcgctgcaatcttgcagacatagcattcctgtcttttgccatagctcgttctaccacgacaccgatttcctgggtgaagagctcgacattgtggcagccaagtcacatgaagcatgtcaaaagctgtgtaccaatgctgtcagatgtcagttcttcacctacacgccagcacaggcctcatgcaacgaggggaaaggaaagtgctaccttaagttgtcatcaaacggatcaccaactaaaatcctgcacggaaggggtgggatctccggatacacccttcgactctgcaagatggacaacgaatgcactaccaagattaagcctagaattgtcggtggaacggcaagcgtgagaggcgaatggccttggcaagttacgctccacaccactagccctactcagcggcatctctgcggcggatccatcatcggtaaccagtggattttgactgcggcgcattgcttttacggcgtcgaatcccctaagatcctgcgcgtgtactcgggtattctgaatcagtccgaaatcaaagaggatactagcttctttggtgtgcaagagatcattatacatgaccaatacaaaatggcagaatccggatacgatatagctcttcttaagctggaaaccactgtcaactacactgattcacagcgccctatttgtctgcccagcaagggagatcggaatgtcatttacactgattgttgggttaccggctggggttacagaaagttgagagataagatccaaaatactctgcaaaaggcgaagattccgcttgtgactaacgaagagtgtcaaaagcgttaccgcggtcataagatcacccataagatgatctgcgccggttaccgcgaggggggtaaggatgcatgcaagggagattcgggtggaccactttcctgcaaacacaacgaagtgtggcacctggtgggaataacctcctggggagagggctgtgcacaacgtgagaggcctggtgtctacaccaacgtggtcgaatatgtcgattggattcttgaaaagacgcaagcagtg

SEQ ID NO: 2003 - DNA, 1875 bp, Artificial Sequence
  derived and/or modified sequence
atgatctttctgtatcaagtcgtccacttcatcctatttactagcgtgtccggcgaatgcgttacccaacttctcaaagacacatgcttcgaaggaggagacataaccaccgtgtttacgccgtccgcaaaatattgtcaggtcgtgtgtacctaccatcctcgttgtctcctatttactttcacggccgaatctccatccgaggaccccaccaggtggttcacttgtgtgcttaaggactccgttacagagacccttccaagagtgaataggactgctgctattagcggctactcgtttaagcagtgtagccatcagatatccgcttgcaacaaagatatatacgtggacctagacatgaaagggataaactataacagctcagtggctaagtcggctcaggaatgccaggaacgctgcaccgacgatgtacactgccacttttttacttatgctactcggcagttcccgagcttagagcatagaaacatttgcctgctaaagcacacacagacagggacaccgacaaggatcacgaagctggataaagtcgtaagtggtttctccttaaagagctgcgccctgtccaatttagcatgtatcagggatattttccctaataccgtatttgctgacagcaacattgacagcgtcatggctccggacgcatttgtgtgcgggagaatctgtacacaccaccctgggtgcctcttctttacatttttttcccaggagtggcccaaggagagtcaaagaaacctttgccttctaaagacttccgagtccggactgccttctacgcgaatcaaaaagtctaaagcactgagcggcttttcgcttcagtcatgcaggcattccatccccgtcttttgccattccagtttttaccatgatactgacttcctgggtgaagaactggatattgttgcagctaagagccatgaggcctgccagaagctctgcactaacgctgtgcggtgtcaatttttcacatacacacccgctcaagcgtcctgcaacgagggtaagggcaaatgctatctcaagttgtcgagcaatggatccccaactaagatcctacacggccgtggcggaattagcggctacactctgcggctctgcaagatggacaatgaatgcacgaccaaaattaaacctcggattgtaggcggaacagcctccgtccggggagagtggccatggcaggtgactctccacacaactagtcccactcagaggcatctgtgcggaggaagcattattgggaatcagtggatcctgaccgctgcccactgcttctacggggtcgagtcacccaagatcttaagggtgtactccgggattctgaatcagagcgagattaaggaagacacatccttctttggcgtgcaggagatcatcattcatgaccaatataagatggctgagtcgggctacgacatcgcactgctcaaactggaaactactgtcaactacacagacagccagcgtcctatatgcctgccctctaagggcgatcgcaacgtgatttacaccgattgttgggttacaggctggggttataggaaactgagggacaagatccaaaacacactgcagaaagctaaaatccccctcgtgaccaacgaagaatgtcaaaagcggtatcggggtcataaaatcacccacaaaatgatctgcgctggctatcgggagggagggaaggacgcatgcaagggggacagtgggggacccttatcgtgcaagcacaacgaagtgtggcaccttgtaggaattacgtcgtggggcgaagggtgtgcccaacgggaaaggcctggtgtgtataccaacgtcgttgaatatgtggattggattctggaaaagacacaggctgtt

SEQ ID NO: 2004 - DNA, 1875 bp, Artificial Sequence
  derived and/or modified sequence
atgatctttctctatcaggtggtgcattttattttgtttacatctgtgtctggggaatgcgtgacacagcttctaaaagatacttgttttgaaggaggagatataactactgtgttcacaccttctgccaagtattgtcaggtagtgtgcacttatcaccctcggtgtcttctattcactttcactgctgaaagtccttccgaagatcccactcgatggttcacatgtgtgttgaaggattctgtaactgaaactctaccccgggttaataggactgctgctatatctgggtattcctttaaacagtgctctcaccagatatccgcttgcaacaaagacatatatgtcgatctggatatgaaagggataaattataactcttcagtcgctaagtctgcacaggagtgtcaagaacgttgcacagatgatgtccattgccatttcttcacgtatgcaactagacagttcccctcactggaacacagaaatatttgtctactgaaacatacacagactggaactcccacaaggataacaaaattagataaagtagtctcaggattctctttgaaatcctgtgccctatctaatctcgcctgcattcgtgacatcttcccaaatactgtgtttgccgatagtaacatagactccgtaatggctccagatgcgtttgtctgcggaaggatctgcactcaccaccctgggtgtctatttttcacattcttttcccaggaatggcccaaagaatctcaacgcaatttgtgtctactcaaaacgtccgaatccgggctcccctccactcggatcaaaaaatccaaagcccttagtggattctccttgcaatcgtgtcggcactccataccagtgttctgccactcatcgttctatcatgacacagacttcctcggggaagagcttgatatcgtcgccgcgaagagtcacgaagcttgtcagaagctgtgtactaacgctgtccggtgccaatttttcacttacacaccagcccaggcatcctgcaacgaaggaaaagggaagtgttatttaaagctttcgtccaacgggtctcctacaaaaatactccatggaaggggggggatatctgggtacacacttcggttatgtaaaatggataatgaatgcacaactaaaattaagccccggatagtcggggggacagcttccgttagaggggaatggccatggcaggtgacactccacactacatcccctactcagaggcacctttgcggggggtcaattataggaaatcaatggatccttactgccgcccactgcttttacggagttgaatctcccaagatacttcgcgtttattccggaatcctgaaccaatccgaaataaaggaagatacttcattttttggggtccaagaaataattattcacgatcagtataaaatggccgaaagtggatatgatatcgctctgctcaagcttgaaacaactgtgaattatacagatagtcagagacctatatgtctaccaagtaaaggagatagaaatgtcatctatactgattgttgggtgacaggatggggatatagaaaattacgggataagatacagaacacactccagaaagccaaaatccccctcgtgactaacgaagaatgtcagaagcggtataggggacataaaatcactcataaaatgatatgtgccgggtatagggagggagggaaagatgcttgtaaaggagattcaggggggcccctttcatgtaaacataatgaagtgtggcacctggtcgggataactagttggggagaagggtgtgcccagcgggagaggccaggggtgtacactaacgttgttgaatatgtggactggatccttgagaaaactcaggccgtt

SEQ ID NO: 2005 - DNA, 1875 bp, Artificial Sequence
  derived and/or modified sequence
atgatttttctatatcaggtagtccactttattctctttacaagtgtgtctggtgaatgtgtcactcagctgctcaaggacacgtgctttgagggcggcgacattaccacagtatttacgccctccgccaagtattgtcaggtggtatgcacctaccatcccaggtgccttttgttcaccttcaccgctgagtcaccctcggaggacccaactagatggttcacttgtgttctaaaggattcggtgaccgagacacttcccagagtgaaccgcacggccgctatctcaggatactcctttaagcaatgttcgcatcagatctcagcatgcaacaaggacatctacgtggatctggacatgaaagggatcaactataatagcagtgtggccaagtcagcccaagagtgccaggagcgatgcacagacgatgtacattgtcatttttttacgtatgccaccagacaatttccaagtctggagcaccggaatatttgtttgctgaagcacacacagaccggcaccccaactaggataacgaagctcgacaaggtggtcagcggttttagcctgaaatcttgcgccctgtccaatctggcatgcattcgggatatctttcctaacaccgtcttcgctgattcaaatattgattctgtcatggcacctgatgccttcgtgtgcgggaggatttgcacccaccatccgggatgcctcttcttcacttttttctctcaggagtggcctaaagagtctcagcgcaacttgtgtctcctaaaaacctcagagagcggtctcccttccacgcgcattaaaaagagcaaagcactttccgggttctccctccaatcctgccgccattccattccggtgttctgccacagctcattttaccatgacactgatttcttgggtgaggagctcgacattgttgctgcgaagtcccatgaagcttgtcagaagctttgtacgaacgccgtcagatgtcagttctttacttacacacctgctcaggcgtcttgtaacgagggaaaaggaaagtgctacctgaagctctcttctaatgggtcacccactaaaatactgcatggtaggggaggcatctccgggtacacgctaaggttgtgcaagatggacaacgagtgcaccaccaagatcaagcccaggatcgtgggcggcacagcctcagtgaggggcgagtggccctggcaggtgaccctgcataccacatcaccaacacagaggcacttgtgcggcggaagcattatcggcaaccaatggattctgaccgccgcgcattgcttctatggcgttgaatcacctaagattctccgagtgtacagtggaatcctgaaccagtccgagattaaggaggacacatccttctttggggtccaggagatcattatccacgaccagtacaagatggcagagagcggatacgacatcgctcttctgaagctggagacaacagtcaactacactgattcacagcgccccatttgcttgcccagtaaaggcgataggaatgttatctacactgactgttgggtaacaggttggggatataggaagctgcgtgataagatccagaatacccttcagaaggctaagatcccgctggtgacaaatgaagagtgccaaaagcggtatcgcgggcataagatcacgcacaagatgatatgtgctggctaccgagagggcggaaaggatgcttgtaagggcgactccggtggtcctctgtcgtgcaaacataacgaggtctggcatttagtgggcattacttcttggggagaaggctgcgcgcaacgggagcggccaggcgtgtacacgaacgtggtcgagtatgtggactggatcctggagaagacccaggcagtg

SEQ ID NO: 2006 - DNA, 1875 bp, Artificial Sequence
  derived and/or modified sequence
atgatcttcctgtaccaggttgttcatttcattctgttcactagcgtctcgggagagtgcgtgactcaactcctcaaagacacctgctttgaaggcggtgacatcacgactgtgtttactccgtcagccaaatactgccaagtggtgtgtacctaccatccgcgctgccttctcttcacgttcactgcagaatcaccctccgaggaccccacccgctggtttacctgcgtgctgaaggattccgtcactgaaaccctgccgcgcgtgaaccgcaccgcagccattagcggatactcgttcaagcagtgcagccatcagatctcggcgtgtaacaaagacatctacgttgacctcgacatgaaaggaatcaattacaactcgtccgtggccaaatctgcccaggagtgccaggagcggtgcaccgatgacgtgcactgccacttctttacctacgccacgcggcagtttccttcgctggaacacaggaacatctgcctcttgaagcacacccagaccggaacgccaaccagaatcactaagctggataaggtggtgtcgggattctcgctgaagtcctgcgctttgtcaaatctggcctgcatccgcgacatctttcctaatactgtgtttgcggactcgaacatcgatagcgttatggcaccggacgcttttgtctgtgggcgcatctgcactcatcatcccggatgtctgttctttacgtttttctcacaggaatggccgaaggagtcccaaaggaatctctgcttgcttaaaaccagcgagtcagggctgccgtccactagaatcaagaagagcaaagcgctgtcaggcttctcattgcagtcctgcagacattcgatccctgtgttctgccactcctccttctaccatgacaccgactttttgggagaagaacttgatatcgtggcagccaagagccacgaggcctgtcagaaactttgcactaacgccgtcagatgccaattcttcacttacacgccggcacaagcctcgtgcaatgaaggaaagggaaagtgctacttgaaactttcatcgaacggatccccgacgaaaatcctccacgggcggggaggcatttcaggatatactctgcggctttgtaaaatggataacgaatgcactaccaagattaagccccgcatagtgggaggaaccgcctctgtgcgcggggaatggccctggcaggtgacgctgcatactacttcaccaactcaaagacatctctgcggcggatccatcatcgggaaccagtggatccttactgccgcccactgtttctacggcgtcgagtctcctaagattttgcgcgtttactcagggatccttaatcagtcagagattaaagaggacacctcattcttcggtgtgcaggagatcatcatacacgaccagtacaagatggcagaaagcggctacgatatcgctctcctcaagctggaaaccactgtcaactacactgactcgcagcgccccatttgccttccatccaaaggggatcgcaatgtgatctacaccgactgctgggtgaccggatgggggtatagaaagctccgcgacaagatccagaataccctgcaaaaagctaagatcccgcttgtgaccaacgaagagtgccagaagcgttaccggggccacaagatcactcataagatgatctgcgccggctaccgggagggcggaaaggatgcctgtaaaggggatagcggcggaccactgtcgtgcaagcacaatgaagtgtggcacctggtgggaatcacttcctggggcgaaggatgtgcgcagagagagcgaccgggagtctacaccaacgtggtcgaatacgtcgattggatcctcgagaaaactcaggctgtc

SEQ ID NO: 2007 - DNA, 1875 bp, Artificial Sequence
  derived and/or modified sequence
atgatatttctgtaccaagtggtccactttatcctttttactagcgtatccggcgaatgcgtgacgcagcttttgaaggatacctgttttgaaggtggggacatcactaccgtgtttaccccttcggctaagtactgccaggtggtctgcacttatcatcctaggtgtctgctgtttactttcactgcagagtcaccttccgaagatcctactcgatggtttacttgcgtgctgaaggattccgtgaccgagacgcttcctagggtgaatcgcactgccgcaatttcgggatattctttcaaacaatgctcgcaccagatttccgcctgtaacaaagacatttatgtcgatctggacatgaagggaatcaattacaacagctcagttgctaagtcggcacaggaatgccaagaaagatgcaccgatgatgtgcactgtcacttctttacctacgcgacccgccaatttccctcactggagcatcgcaacatttgtctcctgaagcatacccaaaccggaacgcccacccggatcacgaagctggacaaagtggtcagcggcttctcccttaagtcgtgtgcgctctccaaccttgcgtgcattagggacatatttcctaacaccgtctttgcggatagtaacattgattcggtcatggcccccgatgcctttgtgtgcggacgaatatgcactcaccatcccggttgtctgttcttcaccttcttttcccaagagtggccaaaagaaagccagcggaacctgtgcctcctcaagacgtcggaatccgggcttcctagcacccgtattaagaaatcaaaggcactgagcggcttttccttgcaatcctgtcggcacagcatcccagtgttctgtcatagctcgttttaccatgacactgatttcctgggcgaggaattggacattgtggcagcaaagtcccacgaagcatgtcagaagctctgtaccaatgccgtgcgctgtcaattcttcacgtacacccctgctcaagcaagctgtaatgagggcaagggaaagtgttacctgaaactttcgtcgaacgggtcccctaccaagattctgcatgggcgcggaggtattagcggatataccctgaggctttgcaagatggataacgagtgcacgaccaagatcaagccgagaattgtcggtggaacggcctccgtcaggggagaatggccctggcaggtgaccctgcacactacctcgcctacgcagcggcatttgtgtggcgggagcatcattggaaaccaatggattctgactgcagcacactgcttttacggagtggaatcacccaaaatactgagagtgtactccggaattcttaatcagtccgagatcaaggaagatacttctttctttggtgtgcaggagattatcatccatgaccaatacaaaatggctgagtccggttacgatattgcgttgcttaagctcgaaactaccgtgaactatactgacagccagcgccctatatgtctgcctagcaagggggaccggaacgtgatctacaccgactgttgggtgaccgggtggggttacagaaaactgcgggataagattcaaaacaccctgcaaaaggcaaaaatcccattggtgactaacgaggagtgtcaaaagaggtaccgagggcataagatcactcacaagatgatctgcgcaggttacagggaaggtggtaaggatgcatgtaagggcgacagcggggggccacttagctgcaagcataacgaggtgtggcatctggtcggaataacctcgtggggtgagggatgtgcacaacgcgaacgtcccggagtgtacaccaacgtcgtggagtacgtggactggatccttgaaaagacgcaagccgtc

SEQ ID NO: 2008 - DNA, 1875 bp, Artificial Sequence
  derived and/or modified sequence
atgatctttctctatcaggtcgtccacttcattctatttacatcggtgtccggggaatgcgttacacaattgttgaaagatacttgctttgaggggggagacataaccactgtgttcacgcctagcgctaagtattgtcaggtagtgtgcacctatcacccacgttgcctgctgttcacattcacggctgagtcccctagtgaggatcctaccaggtggttcacttgcgtgttaaaagatagtgtgactgaaacactgcccagagttaataggactgcagccatttcggggtattctttcaaacagtgtagtcatcagatttccgcgtgcaacaaggacatatacgttgacctggatatgaaaggcatcaactataattcatccgtggctaagtccgctcaagagtgccaggagcgatgtacagacgacgtccactgccactttttcacttatgccacccgtcagttcccatccctggagcacaggaacatttgcctcctcaagcacacacagaccggtactcccacccgaatcactaagttagataaagtggttagcgggttctcactgaagtcttgcgcgctgagcaatcttgcctgcatccgagatatcttcccgaataccgttttcgctgattcaaatatcgattccgtgatggctcctgatgcattcgtgtgtggccggatctgcacccatcaccccggatgtttattttttacattcttcagtcaggaatggcccaaggagtcgcagcggaacctttgtcttctgaaaacctcggaatcgggcctgcccagcaccaggattaagaagtctaaagccctctccggcttttctctgcaatcctgcaggcactccatcccggtgttctgccactcttctttctatcacgatactgattttctgggagaagaactcgacattgtcgcagctaaatcacacgaagcgtgtcaaaagctctgcaccaatgccgttcgctgccagttcttcacatataccccagcccaagccagttgcaacgaaggaaaaggaaagtgctatcttaaactgagcagcaatgggtcgcctacaaaaatcctgcacggcagaggtgggatttcgggttacaccctgagactttgcaagatggataatgaatgcaccaccaagatcaaaccaaggatcgtagggggcacagcttcagtacgcggtgagtggccctggcaggtgactctccacaccactagcccaacgcagaggcacctttgtggcggctccatcattggcaatcagtggattctcacagccgcccactgtttttacggagtcgagtcccccaagattctacgagtgtactccggcatacttaaccagtcagagatcaaggaggatacctccttcttcggagtccaggagatcataatccatgaccagtacaagatggccgaatccgggtatgatatcgctctgctgaaattggagacaactgtaaattataccgactctcagaggcctatttgcctgccctcaaagggtgaccgaaacgtgatctatactgattgttgggtgacaggctggggataccgaaagctgagggataagatccaaaacacactgcagaaagccaagatacctttggtgacaaatgaagaatgtcagaagaggtatcgagggcataaaatcactcacaaaatgatttgtgctggttatagggaagggggcaaagacgcgtgcaagggcgattctggcggaccactttcctgtaagcataatgaagtatggcacctggtgggtattacctcttggggcgagggatgtgcacagcgtgaacgaccgggcgtctatactaatgtcgttgagtacgtcgattggattttggagaaaacacaagccgtg

SEQ ID NO: 2009 - DNA, 1875 bp, Artificial Sequence
  derived and/or modified sequence
atgatcttcctgtaccaagtggttcacttcatcctgttcacttcagtttctggtgaatgcgtaacacaactgctgaaggatacttgctttgaaggtggtgacatcacaacggtgtttactccgtctgcaaaatactgccaggtggtgtgcacgtatcaccctagatgcctgctcttcacattcactgctgaatctccatccgaggatcccactaggtggttcacatgtgtgcttaaggatagcgtcaccgaaaccctgcccagggtaaacaggactgctgcaattagcgggtattcattcaagcaatgttcacaccaaatcagtgcttgtaataaagatatctacgttgacctggatatgaaagggatcaactacaatagctcagtcgccaaaagtgcacaggagtgtcaagagagatgcaccgatgacgtgcactgtcatttcttcacctatgctacaaggcagtttccaagtctggagcaccgaaacatctgcctccttaagcatactcagaccgggacacctaccaggatcactaagctcgataaagttgttagcggcttcagtcttaagagttgtgccctgtccaatttggcttgcatcagggacatcttcccaaataccgtgttcgctgattcaaatatcgattctgtgatggccccagacgcattcgtttgcggcagaatctgcacacaccacccggggtgccttttcttcacatttttctcccaggagtggccaaaggagagtcagagaaacctatgtttgttgaaaacaagcgagtcgggactcccctcaacgaggatcaaaaaaagtaaggccctgagtggatttagcctgcagagctgtaggcattcgattcctgtattttgtcattctagcttttaccatgatacagacttccttggcgaggaactggacattgtggcggcaaagtcacacgaggcttgccaaaagctgtgcaccaacgcagtgcgctgccaattcttcacctacacgcctgcacaagcttcatgcaatgaagggaagggcaagtgttacctgaagctgtcctccaatggtagtccgacgaaaatacttcacggcagaggcggcatttccgggtatactctgcgcctgtgcaagatggacaatgaatgcaccacaaaaattaaaccgcggattgtgggtggaacagcctcagtccgtggagaatggccatggcaggtgaccctacacacaacgtcccccacgcagcgccatctttgcggggggtcaatcatcgggaaccaatggatcctcaccgccgctcactgcttttacggcgtggagtcacctaagatactgagggtatatagcgggattctaaatcagtcagagattaaagaagatactagcttttttggggtgcaggaaattatcatacatgaccagtataaaatggccgagtcaggctatgacatcgcactgttgaagcttgagaccactgtcaactacactgactcacagcgccccatttgcctcccctcaaagggcgacagaaatgttatctatacagattgttgggtcaccggctggggatatcgcaagctgagagataaaattcaaaataccctccagaaggccaagattccccttgttaccaatgaagagtgccagaagaggtatcgcggccataagataacacataagatgatatgtgctggataccgggagggtggcaaggatgcctgcaaaggagattcaggcggccccttgtcgtgcaagcacaatgaggtctggcacctggtaggcatcacttcttggggggagggatgtgcacaaagggagcgcccgggagtgtacacaaatgtcgtggaatacgtagattggatcctcgagaagacccaggcagtg

SEQ ID NO: 2010 - DNA, 1875 bp, Artificial Sequence
  derived and/or modified sequence
atgatattcctgtatcaagtggtccatttcattttgtttacctcggtcagcggtgaatgtgtcactcagttgctgaaggatacctgttttgagggtggggatataaccacggtctttactccctcggcgaagtactgtcaagtcgtctgtacttatcaccccaggtgtctcttgttcactttcaccgcagaatcgccgagcgaggatcccacccgttggtttacctgcgtgcttaaagattcggttaccgaaactcttcccagagtgaacaggacggcagcgattagcggatacagcttcaagcaatgttcccaccagatatccgcatgtaacaaggatatctatgtcgacctggacatgaagggtataaactacaattcctcagtggcaaaatccgcacaggaatgtcaagaaaggtgtactgatgatgtgcactgccacttctttacgtacgccactaggcaatttccatcacttgaacatcgcaacatatgtctgctgaagcatacccagactggaactccgactcgaattactaagctggacaaggtcgtgtcgggattttcgttgaagagctgcgccctttctaacctggcatgtatacgtgacatctttcctaacactgtgtttgcagattcgaacattgacagcgtgatggcccctgacgcattcgtgtgtggcagaatttgcacccatcatcctggatgcctgttctttacgttcttttcccaggaatggccgaaggaatcccagcggaatctttgcctgctgaaaacctccgaaagcggccttccttccactagaattaagaagagcaaagcactcagcggattctcactgcagtcatgtcgtcattcaattcccgtgttttgtcacagctccttttaccatgataccgattttctgggagaagaactggatatcgtggctgcgaagtcccatgaagcatgtcaaaagctgtgtaccaacgcagtgcgatgtcagtttttcacttacactccagcacaggcatcctgtaacgaaggaaagggaaagtgttacttgaagctctcatctaacggatcgccaaccaagatactgcatggtcggggtggtatttcgggctacaccctgagactttgcaaaatggataacgaatgtaccaccaagattaagccacggattgtcggcgggaccgcatccgtccggggggaatggccttggcaggtgaccctgcatacgacctcacctactcagagacatttgtgtggaggcagcattatcgggaatcaatggattctgacggccgcacattgtttttacggtgtggagagcccaaagattttgagagtgtactccggcattcttaaccaatcagagataaaagaggatacctcattctttggagtgcaggaaatcattatccatgaccaatacaagatggccgaaagcggctacgacattgccctccttaaacttgaaactaccgtgaactatacggactcgcagcgccctatttgtttgccctcgaagggggacagaaatgtcatttacactgattgttgggtgacgggatggggctacaggaagctgagagataagatccagaatactctgcagaaggcgaagattccactggtgacgaatgaagagtgtcaaaagaggtacagaggacacaagattacgcacaagatgatttgtgcaggttaccgagaggggggaaaagatgcgtgcaagggtgattccggaggccctctgtcgtgcaagcataacgaggtatggcaccttgtggggattactagctggggcgaagggtgcgcacaacgcgagcgccctggagtgtacaccaacgtggtcgaatacgttgactggattttggaaaaaactcaagccgtg

SEQ ID NO: 2011 - DNA, 1875 bp, Artificial Sequence
  derived and/or modified sequence
atgatcttcctgtaccaggtagtgcactttatattgtttacttccgtttcaggagagtgcgtgactcagcttctgaaagatacttgttttgaaggaggagacatcactacagtgtttacaccctctgctaagtactgtcaggtggtgtgcacctatcacccacgatgtttattatttacctttaccgccgagtccccatcggaagatcctacccgttggtttacatgcgtcctcaaggacagcgttaccgagacactgccaagggtcaatcggaccgctgccatctccggctactcattcaaacagtgctcccaccagatcagcgcttgcaacaaggacatctacgtagatctggatatgaagggcataaactacaattcgtcagtcgccaaatccgcccaggagtgtcaagaacgatgcacggacgatgtgcactgccatttcttcacgtacgccacacgacagttccctagcctagagcaccgcaacatctgtctcttaaagcatactcagacaggtactccgacacgtataacaaagttggataaagtcgtatccggttttagcctgaagtcgtgcgccctttccaatttagcctgcatccgggatatattccctaacaccgtgtttgcagacagtaacattgactcagtgatggcccctgacgcttttgtatgtggacgaatttgtacccatcatcccgggtgcttgtttttcacatttttcagccaggagtggcccaaagagtcccagcgaaatctttgtctcctgaagacctccgagagtgggttgccctccacccggattaagaagtccaaggccctgagtggcttctctctccagtcttgcagacactcaattcccgtgttctgtcactccagtttttatcacgataccgatttcctcggcgaggaactggatattgtggcagctaaatcacacgaggcgtgccagaaattgtgtacaaacgctgttcgctgccagttcttcacatatactccagcccaggccagttgtaacgagggtaaaggcaagtgttacctcaaacttagctccaacgggtcacccacaaaaattttgcatggccgaggaggcatcagtgggtataccctgcggttgtgtaaaatggacaacgagtgcacgactaaaattaagccaagaattgtcggaggtacggcttctgtgcggggagaatggccttggcaggtaaccttgcacacaacctcaccaacacagcgccacttgtgcggagggagcattattgggaatcagtggattctgaccgctgcgcactgcttttacggtgtagaaagccctaaaatcctgcgcgtttacagtgggatacttaaccagtcagaaataaaggaggacactagcttcttcggtgtccaggagataatcatccatgaccagtataagatggcggagtctggatacgatatcgctctgctgaagcttgagaccactgtcaattataccgactcgcagcggcctatctgcctaccgtcaaagggtgaccggaatgtgatatacacagactgctgggtcaccggttggggctaccgcaaactcagggacaaaatacagaataccctacagaaggctaaaatacccctggtgacgaatgaggaatgtcagaaacgatatagggggcacaagattacccacaaaatgatttgcgccggttacagggagggggggaaagatgcttgtaaaggtgactccggcggtccattatcatgtaagcataacgaggtctggcatcttgtgggcattaccagctggggagagggatgcgcacagcgagagcgccccggcgtttataccaatgttgtggaatacgttgattggattctggagaagacacaggctgta

SEQ ID NO: 2012 - DNA, 1875 bp, Artificial Sequence
  derived and/or modified sequence
atgattttcctctaccaagtggtccacttcattttgttcaccagcgtgagcggagagtgtgtcactcaactgttgaaagacacttgctttgaggggggcgacatcactactgtgtttaccccttccgccaagtactgccaagttgtctgcacttatcatcctcgctgcctcctgttcaccttcaccgccgagtcgccctcggaagatccgacgcgctggttcacgtgtgtgctcaaggactctgtcaccgaaaccttgccaagggtcaacaggaccgccgcaatctccggatactcattcaagcagtgcagccaccaaatctcggcttgcaacaaagacatctacgtggatctggatatgaagggtatcaactacaactcgtcggtagcaaagtctgctcaggaatgtcaggaacgctgcacggatgacgtgcactgccatttcttcacctacgccactcgccaatttccatccttggaacaccgcaacatatgtctgctcaagcatacccaaacgggaaccccgacccgcattaccaaactggacaaggtggtgtccggtttctcactcaagtcatgcgcgctgtccaacctggcctgcatccgagacatcttccctaatactgtgttcgcggacagcaacattgacagcgtcatggctccagatgcattcgtgtgcggcaggatctgcacccatcacccgggatgcttgttctttacctttttcagccaggaatggcctaaggagagccaacgaaacctgtgtctcctgaaaactagcgagtcgggactgccgtcaactcgcattaagaagtccaaggcgcttagcggcttctcattgcagtcatgccgccattcaattccagtgttctgccattcatccttttaccacgacacggatttcctcggagaggagctggacatcgttgctgcgaaaagccacgaagcgtgccagaagttgtgcaccaacgctgtcagatgccagtttttcacctacactccagcccaggcctcgtgcaacgaaggaaaaggcaagtgttacctcaagctcagctcaaacggatccccaaccaagatcctccacggaagaggcggaataagcggctacaccctgcggctgtgtaagatggacaatgagtgcactaccaagattaagcccagaattgtcggtggcactgcttccgtccgcggagaatggccctggcaggtgactctccatactacctctccaacgcagcgccatctctgcgggggctcgatcatcggaaaccaatggatccttacggcggcccactgcttctacggtgttgagtcgccgaagatccttcgcgtgtattccggcattctgaatcaatcagagatcaaggaggacacgtcgttcttcggagtgcaggagatcattatccatgaccagtacaagatggcagaatcagggtacgatatcgcgctcctgaaactggagactactgttaactataccgactcacaacgcccaatctgtctgcccagcaaaggcgaccgtaacgtgatttacaccgattgctgggtcaccggatggggctaccggaaactgcgggacaagatccagaacaccctgcagaaggccaaaattccgctggtgaccaatgaagagtgtcagaagcgctaccggggacacaagatcacccacaagatgatctgtgccggataccgggaaggaggaaaggacgcttgcaagggggactcaggcggaccactgtcctgtaagcataacgaggtctggcacctggtgggaatcacttcatggggagagggctgcgcacagcgcgaaaggccgggagtgtacaccaatgtggtggaatatgtcgactggattctggaaaagacccaggcagtg

SEQ ID NO: 2013 - DNA, 1875 bp, Artificial Sequence
  derived and/or modified sequence
atgatatttttgtatcaagttgttcattttattttattcacttctgtttcaggagaatgtgttacccaacttttaaaagatacatgttttgaaggaggagatattactactgtttttactccatcagctaagtattgtcaagttgtttgcacatatcatccaagatgtctactttttacatttacagccgaaagtccatcagaggatccaacaagatggttcacttgtgttcttaaggatagtgttactgaaacacttccaagagtcaacagaactgcagcaatttctggttatagttttaaacagtgttcgcaccaaatttctgcttgtaataaggacatttatgttgatttagatatgaaaggtattaactataattctagtgtagcaaaaagtgctcaagaatgtcaagaaagatgtacagatgatgtacactgtcatttttttacttatgcaacaagacaatttccttcattagaacacagaaatatttgtttacttaaacatacacaaactggaactccaacaagaattactaaacttgataaagttgtatcaggttttagtttgaaatcgtgtgctttatcaaatttggcttgtattagagatatttttcctaatactgtttttgcagatagtaatatagattcagttatggctccagatgcttttgtttgtggaagaatttgtacacatcatcctggttgtcttttctttactttcttctcacaagaatggcctaaagaatctcagagaaatttatgtcttcttaaaacatcagaaagtggacttccttcaacacgtattaaaaagtcaaaagcactttctggattttctttgcaatcttgtagacactctattcctgtattctgtcattcttcattctatcatgatacagattttttaggagaagaacttgatattgtagcagctaaatcacacgaagcttgtcagaaattatgtactaatgctgtacgatgtcaatttttcacatatactccagcacaagcatcatgtaatgaaggtaaaggaaagtgttatcttaaattatcgtcaaatggatcccctactaaaattttacatggaagaggaggaattagtggatacactttaagattatgtaaaatggataatgaatgtactactaaaattaaaccaagaatcgtcggaggaacagcatcagttagaggagagtggccatggcaagttactttgcacacaacttcaccaacacaaagacatctttgtggaggaagtattataggaaatcaatggatattaaccgccgctcattgtttttatggagtagaatctccaaaaattttaagagtatattcaggtatcttaaatcaatcagaaattaaagaagatacttcattttttggagttcaagaaattattattcatgatcaatataaaatggctgagtctggatatgatattgcattattaaaacttgaaacaacagtcaattatactgatagtcaaagaccaatttgtttaccatcaaaaggtgatagaaatgtgatttatactgattgttgggttaccggatggggatatagaaaacttagggataaaattcaaaatacattacaaaaagctaaaataccattagttacaaatgaagaatgtcaaaaaagataccgtggacataaaataactcataaaatgatatgtgctggatacagagaaggtggaaaggatgcttgtaaaggagattctggaggtccattatcttgtaaacataatgaagtttggcatttggtaggaataacatcttggggtgagggatgtgcacaaagagaaagaccaggagtgtatactaatgtagttgaatacgtagactggatattagaaaaaactcaagctgta

SEQ ID NO: 2014 - DNA, 1875 bp, Artificial Sequence
  derived and/or modified sequence
atgatcttcctgtaccaggtcgtgcactttatcctgtttacttccgtttctggcgaatgcgtcactcaactcctcaaagacacctgctttgaaggcggagacatcactacggtcttcacgccctctgcgaaatactgccaggtagtatgtacctatcatccgaggtgtctgctgtttacattcactgctgagtctccctccgaggatcctacacgctggttcacctgtgtgttgaaggatagcgtgactgaaaccctcccaagagtgaaccggacagctgccattagcggctactccttcaagcagtgctcacaccaaattagtgcttgtaacaaggatatctacgtggatttggacatgaaggggatcaattacaattcctctgtagccaaatccgcgcaggaatgtcaggaacggtgtactgacgacgtccactgccatttttttacatacgccactcgacagtttcctagtttggagcaccggaatatctgtctgctgaaacatacacaaacgggtaccccaacaagaatcactaagctcgataaggtggtttcagggttttctctgaagtcttgtgccctcagcaacctggcctgcataagagatatttttcctaatacagtgtttgccgactcaaacatcgactctgtcatggcgccggacgcattcgtgtgcgggcggatttgtacacatcatccaggctgcctcttcttcacattcttttcacaggaatggcctaaggaatcccaaaggaacctgtgcttgctgaagacaagcgaatccggactgccatcaacaaggatcaagaaaagcaaagcactgagcggcttctctcttcaatcctgtcgccatagtattcccgtcttctgtcactcctccttctatcacgatactgactttctgggggaagagctcgacattgtcgcggcaaagagtcacgaggcatgtcagaaactgtgcacgaacgccgtcaggtgccagttcttcacctatacgcctgcacaggcaagctgtaacgagggtaagggtaaatgctacctgaagctgagcagtaacggatctccaaccaaaattctgcacggcagagggggcatttccgggtatacactgaggctgtgcaagatggacaacgaatgcacaacgaagatcaaaccacgcatagtgggcggcacagctagcgtcagaggcgaatggccttggcaggtaacactgcacactacatccccaactcagagacacctctgtggaggcagtattataggcaatcagtggatattgaccgcagcccattgtttttacggcgtggagtcccctaagatactccgggtttacagcggaatcctgaaccaaagtgagataaaggaagacacttctttcttcggggtgcaggagattatcatccatgatcagtacaaaatggccgagtcaggctacgacatagccctgctcaagctcgagactacggtgaactacacagattcacagagacccatatgcctcccaagcaagggagatcgcaacgtcatctataccgattgttgggtgaccggttggggttacaggaagctcagggacaagatccagaatacgctgcagaaggccaaaattccgcttgttaccaacgaagaatgccagaagagataccgagggcacaagatcacccacaaaatgatttgcgcgggttatagggaaggcgggaaagatgcatgtaagggcgactctggcggccctctgagctgcaagcacaatgaggtgtggcatctggtggggatcacatcctggggggagggttgcgcccaacgcgagagaccaggcgtgtacactaacgtggtggaatacgtcgactggattctggaaaagacccaagctgtc

SEQ ID NO: 2015 - DNA, 1875 bp, Artificial Sequence
  derived and/or modified sequence
atgattttcctgtatcaagttgtccattttatactgttcaccagcgtcagcggagagtgcgttacccaattgctgaaagacacctgcttcgagggaggcgatattacgaccgtctttactcctagtgccaagtattgtcaggtcgtgtgtacctatcatcctaggtgcttgctctttaccttcaccgccgagtcgccctcagaggatcccactaggtggttcacatgcgttctgaaggactccgtaaccgaaacactgccgcgggtgaaccgcaccgccgctatcagtggctacagcttcaagcaatgctcacaccagattagcgcctgtaataaggatatttacgtggaccttgacatgaagggcatcaactataacagcagcgttgccaaaagcgcacaggagtgtcaggagagatgcaccgatgacgtccactgtcatttttttacatatgcaactcggcagttcccttccctcgaacaccgcaacatctgccttcttaagcatactcagaccgggacccccacccggataactaaattggataaagtcgtcagtggatttagtctgaaatcatgcgcactgagcaaccttgcctgcattagagacatttttcctaataccgtatttgcagatagcaacatcgactcagtgatggctcccgatgccttcgtctgcggacgtatctgcacccatcaccctggatgtttatttttcacatttttcagccaggaatggcctaaagaatcacagaggaacctctgcctcctgaaaaccagcgagagtggcttgccgagcactcggattaaaaaatctaaggccctgagtggattcagtctccaatcttgccgacactcaataccagtgttttgccattcctcattctaccacgacaccgacttcctgggcgaggagttagatattgtggctgccaaaagtcacgaggcttgccaaaagctttgtaccaacgcagtccgctgccaattttttacctatacacccgctcaggcaagctgcaatgagggaaaaggaaagtgttacctgaaactttcaagcaatggtagcccaactaaaatccttcatggacgcgggggcatcagcggttacactctgagactctgcaagatggacaatgagtgtacaacgaaaatcaagccaagaatcgttggcggcactgcttcagtacggggggaatggccttggcaggtgactcttcacaccacctcacctacccagcgacatctatgcggaggcagcatcatcggaaaccagtggatccttacagcagcacattgtttctacggggtagagagccccaaaatcctccgcgtgtatagcggcattctgaatcaatcagagataaaagaggacacgtctttttttggcgtccaggagattatcatccacgatcaatacaagatggctgagtctggatatgatatcgcgttgctgaaactggaaacaaccgttaattataccgacagccagagaccaatttgcctcccaagcaagggtgacagaaatgtaatttacaccgattgctgggtgactggctgggggtaccggaaactgcgagataagatccagaacacccttcagaaggcgaagatcccgctggtgaccaacgaggaatgccagaaaaggtatcggggccataaaatcactcacaagatgatctgcgccggctacagggaaggaggcaaggacgcatgtaaaggcgattccggaggcccattgagctgtaagcataacgaagtgtggcatcttgttggcatcaccagctggggcgagggatgcgctcaacgcgagcgccccggggtgtatactaatgtggtggagtacgtggattggatcctagaaaagacgcaggccgtt

SEQ ID NO: 2016 - DNA, 1875 bp, Artificial Sequence
  derived and/or modified sequence
atgattttcctttaccaagtggtgcactttatcttgtttacctcagtgtcgggggagtgtgttactcagctccttaaggacacctgcttcgagggcggagatatcaccaccgtgttcactccgtcagcaaagtactgccaagtcgtgtgcacgtatcatccacgctgtctgctcttcactttcaccgccgaatcaccatcagaggacccgactcggtggtttacttgtgttctcaaagattcagtcaccgagacgctccctcgggtgaacagaaccgcggctatctccggttactcatttaagcagtgctcgcatcaaatctcggcatgcaataaggacatctacgtggacctcgatatgaagggaatcaactacaactcatccgtcgcaaaatcagcccaggagtgtcaggaacgctgcactgacgacgttcactgccacttcttcacgtacgcaacgaggcagtttccgtcgctggaacatagaaatatctgcctgctgaaacacacccagactggaactccaacccggattaccaagctcgacaaggtcgtgtcgggtttcagcctgaagtcatgtgccctctcgaacctggcttgtatccgggacatttttccaaataccgtctttgctgacagcaacatcgattcggtgatggcaccggatgctttcgtgtgcggacggatttgtacgcatcatcccggttgcctcttcttcacgttctttagccaagagtggccgaaggaaagccagcgaaacctgtgcctgctcaagacctccgagtccggactgcccagcactaggattaagaagtccaaagcgctgtcaggattctcgctccagtcatgccggcactcgatcccggtgttctgtcattcctccttctaccacgataccgatttccttggagaagaacttgacatcgtggcagcgaaatcacacgaggcctgccagaaactctgcaccaatgcggtgagatgccagttcttcacttacacccctgcacaggcctcgtgcaacgaaggaaaaggaaagtgctacctcaagctgtccagcaatggaagccctactaagatcctgcatggtcgaggaggaatcagcggatatacgctgcgtctgtgtaaaatggacaacgagtgcactaccaagatcaaaccgcgcatcgtcggcggaaccgccagcgtccggggagaatggccgtggcaggtgactctgcacaccacgtcaccgactcagcgccatctttgcggaggcagcatcatcggaaaccagtggatcttgactgctgcgcactgcttctacggggtggaatccccgaagatactcagggtgtattcaggcatcctgaaccagtcggagatcaaggaggatacttccttctttggagtgcaagagatcattattcacgaccagtataagatggcggaatcgggttacgacatcgcactccttaagttggagactaccgtgaactacactgattcgcagcgcccgatttgcctgccaagcaagggagacaggaatgtgatctacactgattgctgggttaccggatggggctacaggaagctgcgggataagatccagaacactctgcaaaaagccaagataccgctggtgactaacgaagagtgccaaaagcggtacaggggacataagatcactcacaagatgatctgtgcgggctacagggaaggggggaaggacgcctgcaagggagattccggtggaccattgtcatgcaagcataacgaggtgtggcaccttgtgggcatcacgtcctggggagagggatgcgcccaacgcgagcgccccggcgtgtacacgaacgtcgtggagtacgtggattggatactggagaaaacccaggccgtg

SEQ ID NO: 2017 - DNA, 1875 bp, Artificial Sequence
  derived and/or modified sequence
atgatttttctgtaccaagtggtccatttcatcctgtttaccagcgtgtcgggagaatgcgtgactcaacttttgaaggatacgtgctttgaaggcggcgatatcacgacggtttttacgcctagcgcaaagtactgtcaggtggtgtgtacctaccatcctcgatgtctgctctttacgttcactgccgaatcccccagcgaggacccaactaggtggttcacctgcgtccttaaggatagcgtgaccgaaacccttccaagggtgaaccggaccgcagcaatttccggatacagctttaaacaatgttcgcatcagatatccgcttgtaataaggacatctacgtggatcttgacatgaagggaatcaattacaattcgagcgtggcaaagtctgcccaagagtgccaagagcggtgtacggatgacgtccattgccactttttcacctacgcaactagacagttcccaagcctggaacaccgcaacatttgtctgctgaaacatactcagaccggaacgccaacccggataaccaaattggataaggtcgtgtcaggattttcactgaagtcctgcgccctgtctaatcttgcatgtattagggacatattccctaacactgtgtttgcagacagcaatattgactccgtcatggcgccagacgcatttgtttgtggaaggatatgtactcatcaccctggctgtcttttcttcaccttcttttcccaagaatggcctaaggaatcgcaacggaacctttgcttgcttaaaacttcagagtccggactgccatccactagaattaagaagtcgaaggccctgagcggcttctcactgcagtcatgtagacactcgatccctgtcttttgccactcctcattctaccatgataccgatttccttggtgaggagctcgacatcgtggcagcaaagtcgcacgaagcatgtcagaaactctgcactaatgcggtcagatgccagttcttcacttacacccccgcacaagcctcttgtaacgaaggaaaggggaagtgttacctcaagctgtcctctaacggtagccccaccaagatcctgcatgggagaggtggaatcagcggctacactctgcgactctgcaagatggataacgagtgtaccaccaaaatcaagccaagaattgtgggaggaaccgcttccgtgcgaggtgaatggccttggcaagtgacccttcatactacttcaccaacccagagacacctctgtggcggtagcatcattggaaaccaatggattctgactgcagcgcattgtttttacggtgtggagagcccaaagattctgagggtgtactcgggtatcctcaaccagtccgaaatcaaagaagatacctccttttttggagtgcaggaaatcataatccatgaccagtacaagatggcagagtcgggatatgacatcgcgttgctcaaactcgaaactaccgtgaactacaccgattcccaaagacctatttgtctgccatcaaagggggataggaacgtcatatacaccgattgctgggtcactggatggggttaccggaaattgagggataagattcaaaacactctgcagaaggcgaaaattcctcttgtgaccaacgaagagtgtcagaagagatacagaggtcacaagataactcacaagatgatctgtgccggatatcgcgaaggcggcaaggatgcgtgtaaaggcgactccggcgggccgttgtcatgtaaacataatgaggtctggcacttggtgggaattaccagctggggcgaaggatgcgcacaacgcgagcggccgggtgtgtataccaacgtggtcgagtacgtggactggattcttgaaaagacccaagcggtc

SEQ ID NO: 2018 - DNA, 1875 bp, Artificial Sequence
  derived and/or modified sequence
atgatcttcttgtatcaagtagtgcacttcatcctgttcacatcggtttcaggtgagtgtgtgacacagcttttgaaggatacctgcttcgaaggcggagacatcaccacagtgttcaccccatccgctaaatattgccaggttgtttgtacgtatcatccccgttgtctgctgttcactttcacagctgagagcccttctgaagaccctacccgctggtttacgtgcgtactgaaggacagcgtgaccgagaccctaccacgggtgaaccggacggcagccataagtggctattctttcaagcagtgtagccaccagatctcggcctgtaataaagacatatacgtggatctcgacatgaagggcatcaactacaactcaagcgtggccaaaagcgcacaggagtgccaagagcggtgtacagatgatgtccactgccatttctttacatatgccacaaggcagtttcctagtcttgaacaccgaaacatctgtttgttgaagcacactcagaccggcactcctactcgcattacgaaactagacaaagtggtatcaggtttttcactgaagagctgtgccctgtccaatctggcctgcatccgcgacatcttcccaaatactgtgtttgctgatagcaatattgatagcgtgatggccccggacgcgtttgtgtgtggcagaatatgcacacaccacccaggctgcctgttttttacctttttcagccaggagtggcctaaggagagccagaggaatctgtgcttattaaagactagtgaatctgggctgccttctacgagaattaagaaatctaaggccctgtccggcttctctctacaatcttgcaggcactcaattccagtgttttgtcattcatccttttaccacgatacggattttctgggggaggagttggacattgtcgctgctaagagccacgaggcctgccagaagctgtgcaccaatgcggtgagatgccagttctttacctatacgcctgcacaggcctcatgcaacgaaggaaaaggtaaatgttacctcaagctctcctctaatgggagccctaccaagattttgcatggacgcggcggaatcagtggctacactctccggctgtgcaaaatggacaatgaatgtaccaccaagatcaagcctaggattgttggaggaactgcttccgtccgcggggaatggccatggcaggtgaccctgcacactacctccccaactcagagacacttgtgtgggggctcgatcataggtaaccagtggattctgaccgcggcacactgcttttatggcgtggaatctcccaagatcttgcgcgtctactcaggtattctgaatcagagcgaaatcaaggaggacacttccttctttggggtccaggagataatcatacatgatcaatacaaaatggccgaaagtggttacgacatcgccctcctgaagctggagacaacggtcaattacaccgactctcagaggccgatctgtctgccttccaaaggagatagaaatgtaatctacacagattgttgggtcacaggctgggggtatcgcaagcttagagacaagatccagaacaccctgcagaaagctaagattcctttagtcaccaacgaggagtgccaaaaaagatataggggacataaaatcacacacaaaatgatttgtgctggttaccgggagggcggcaaagacgcatgtaaaggcgattccggcggtccattaagttgtaaacataacgaagtatggcatcttgtcggaatcacgagttggggcgagggatgtgctcaacgagaacgccccggggtttatacaaacgtagtcgaatatgtagattggatcttggagaaaactcaggccgtt

SEQ ID NO: 2019 - DNA, 1875 bp, Artificial Sequence
  derived and/or modified sequence
atgatcttcctttaccaggtggtgcacttcatcctcttcaccagcgtgtcgggtgaatgtgtgactcaacttctgaaggacacctgcttcgagggaggagacatcaccactgttttcacgccgtcggccaagtactgccaggtggtttgtacttaccacccacgctgcctcctcttcactttcacggcagaaagcccctccgaggatccaaccagatggttcacctgcgtgctcaaagattcggtgaccgagactttgccgagggtcaatcggaccgccgcgatcagcggatactcctttaagcagtgctcgcaccagatttccgcgtgcaataaggatatctacgtcgacctcgacatgaagggcatcaactacaacagtagcgtggctaagagcgctcaggaatgccaggagcgctgtacggatgacgtgcattgtcatttcttcacttatgctactcgacaattcccgtcgctggaacaccggaacatctgcctgctgaagcatactcaaaccgggacccctacccggatcacgaaactggacaaggttgtgagtggattttcactcaaatcctgcgccctgtcgaatctggcatgcattcgagatatcttccctaacactgtgttcgcggactccaacatcgattccgtgatggcccctgacgcgttcgtgtgcggcagaatctgcactcaccacccaggatgtctgttctttaccttcttttcccaagaatggcccaaggaatcacagaggaacctgtgcctgctgaaaacgagcgagtccggtttgccgtcaactagaataaagaagagcaaggccctgtccggcttcagtctgcagtcgtgccggcactcaatcccggtcttttgccattcgtccttctaccatgatactgactttctcggagaggaactggacatcgtcgctgcaaaatcgcatgaagcctgtcaaaagctgtgcaccaatgccgtgaggtgccaattctttacctacacgccagcacaggcctcctgcaacgaaggaaaaggtaaatgttacctcaaactctcgagcaacgggagtcctaccaaaattctgcatggaagaggggggatttccggatacaccctgaggctctgcaagatggacaacgaatgcaccaccaagatcaagcctcggatcgtgggtggaaccgcttccgtgcgcggagagtggccgtggcaagtaaccctgcacactacttcgccaactcaacggcatctgtgcggaggaagcatcatcgggaaccagtggatcctcactgcggcacactgcttctacggtgtcgagtcaccgaagattctcagggtttactcaggcatcttgaatcagtcagagattaaagaagatacctctttctttggagtgcaggagatcatcatccatgaccaatacaagatggccgaatcaggctatgatattgcgttgctgaaactcgaaactaccgtgaactacactgactcgcagcgcccgatttgtctgccctctaagggggatcgcaacgtcatctacacggattgctgggtgaccgggtggggataccgaaaacttcgggataagatccagaacaccctgcaaaaggccaaaataccgcttgtgaccaatgaggagtgccagaagaggtaccgcggccacaaaatcactcacaagatgatctgcgccgggtaccgtgaggggggcaaggacgcatgtaagggcgactccggcggcccattgtcctgcaagcacaatgaagtttggcaccttgtgggaatcacttcatggggagaaggctgtgcccagcgcgaacgccctggcgtctatactaacgtagtggagtacgtcgactggatcctggaaaagacgcaggctgtc

SEQ ID NO: 2020 - DNA, 1875 bp, Artificial Sequence
  derived and/or modified sequence
atgatctttctttaccaagtcgtgcactttattctctttacttcagtctcgggtgaatgcgtgacccaactgctgaaggacacttgtttcgagggcggagatattaccactgtgtttactccatcagcgaagtactgccaagtcgtgtgcacctaccatccaagatgccttcttttcacttttaccgcggaatcgcctagcgaagatccaacccggtggtttacttgtgtgttgaaggattcagtgactgaaactctgcctcgagtgaacaggacggcagcaatttcgggctactctttcaaacaatgttcccatcagatctcggcatgtaataaggatatctacgtggatctggatatgaagggtataaactacaatagcagtgtcgccaaatcagctcaggagtgtcaggaaagatgtacggatgacgtgcattgccacttctttacctacgcaactcggcagtttcctagcttggagcacagaaacatctgccttctgaagcatacgcaaaccggtacccctacgcgcattaccaagctcgataaagttgtgtcgggattttcgctgaagtcgtgcgcactgtcaaacctggcgtgcattcgtgacatttttcctaatactgtctttgcagattcgaatatagattcggtgatggctccagatgcattcgtctgtgggcgcatctgtactcaccatcctggatgcttgtttttcactttcttctcccaagagtggcctaaagaaagccagcgcaacctctgtttgctcaaaaccagcgagtcggggctcccctcgaccagaatcaagaagagcaaggcgctcagcgggtttagccttcaatcgtgtcggcattccatccctgtcttttgtcactcgtctttttaccatgacaccgatttcctgggagaagaactggatattgtcgctgccaaatcacacgaggcctgtcagaaattgtgtaccaacgcggtgagatgtcaattcttcacttacacccctgcacaggcctcttgcaacgagggcaagggaaagtgttacctgaagctgtccagcaacggatcgccaaccaagattctgcacggacgaggaggtattagcggctacaccctgcgactttgcaagatggacaacgaatgtactaccaagatcaagccgcggatcgtgggaggtaccgcatccgtgcgtggtgaatggccatggcaggtgactctgcatactacctcaccaactcagagacacctgtgcggtggctccatcatcggtaaccaatggatcctgactgcagcacactgcttttacggagtcgagtcgcctaagatcttgagagtgtactccggtattcttaatcaatccgaaatcaaagaggacactagctttttcggcgtccaagagatcattattcacgatcaatacaagatggctgaatccggttacgatattgcactgctgaagctggaaactaccgtgaactacactgattcgcaaaggccaatctgtctgccgtcgaagggtgatagaaatgtgatttacaccgactgctgggtgaccggatggggttaccgaaagctccgcgataagattcagaacactctgcaaaaggcaaagattccccttgtgacgaacgaagaatgtcagaagcgataccgtggacacaagattacccataagatgatctgtgcaggataccgggaaggtggaaaggacgcttgcaagggcgacagcggtggtcccctctcgtgtaagcataatgaggtgtggcacctggtgggaatcacttcatggggggagggatgtgcacagcgtgaacggccaggagtgtacactaatgtcgtggaatacgtggattggatccttgagaaaacccaggcagtc

SEQ ID NO: 2021 - DNA, 1875 bp, Artificial Sequence
  derived and/or modified sequence
atgatctttctataccaagtcgtgcactttatcctcttcacttccgtttctggagaatgtgtcacgcagctcttaaaagacacatgctttgagggaggagacatcaccaccgtgttcactcccagcgcgaaatactgccaggtcgtatgcacataccacccaagatgtctcctgttcactttcaccgccgagtccccttctgaggatcccacccgctggtttacctgcgttctcaaggatagtgtcactgaaaccctgccgagggtgaacaggacagctgccatcagcgggtatagttttaagcaatgtagtcaccaaatctctgcatgcaataaggatatctacgtcgatctggacatgaaaggtattaactataattcgagtgtcgctaagagcgcacaggagtgccaggagagatgcactgacgacgttcattgccatttctttacctacgcaactagacagttcccgtctctcgagcaccgcaatatatgcctgctgaaacatacgcagacaggtacgcctacccgtatcaccaaactagacaaggttgtctccggcttctcactgaaatcatgcgccctgtcgaacctggcctgtatacgtgatattttccccaacacagtgtttgcagactctaacattgactccgttatggcacctgatgcattcgtgtgtggcaggatctgcacccaccacccgggctgcctattctttacctttttttcccaggagtggcctaaggagagccagcgaaacctgtgcttactgaaaacgagcgagtcagggttgccctccacccggatcaagaagtccaaagccctttccggattctctttacagagctgcagacacagcatccccgtcttttgccattcttctttttatcatgataccgacttccttggcgaggagctcgacatcgtggcagctaagtcacatgaggcctgccagaaactgtgtactaatgcagttaggtgtcagtttttcacctacacgcccgcccaggcatcttgtaacgaaggcaaaggaaagtgttatctgaagctctccagcaatgggagtcccactaagattttgcatgggaggggtgggattagtggttacacattgcggctgtgtaagatggataatgaatgcaccacaaagattaagccccgcatcgtaggggggaccgcaagcgtacgaggagaatggccatggcaggtgaccctccacaccaccagtcccacccagaggcatctatgtggcggaagcataattggtaatcagtggatcctgacggccgcccactgcttctacggggttgagtctccaaagattctccgcgtgtacagcggcatcctcaatcagtctgagattaaggaagataccagtttctttggagtgcaggagatcataatccacgatcagtacaagatggccgagagcggatatgacattgcattgttaaagctggagactactgtcaattatacagacagtcaacgacccatttgcctgccaagtaaaggcgatagaaatgtgatatacactgactgttgggtgactgggtggggatacaggaaactgcgggacaaaatccagaacaccctgcagaaggcaaaaattcccctagtgaccaatgaagagtgtcagaaaaggtatcgagggcacaagatcacccacaaaatgatttgcgctggctatagagaaggcgggaaagacgcatgcaagggtgacagtggaggacccctaagctgtaagcacaatgaggtctggcatcttgtgggaatcacatcctggggcgagggctgtgcacagcgggagaggcccggagtatacacgaatgtggtagagtacgttgattggatcttggagaagactcaggcggtg

SEQ ID NO: 2022 - DNA, 1875 bp, Artificial Sequence
  derived and/or modified sequence
atgatctttttgtaccaagtcgtccacttcatcctttttacatctgtatccggagagtgcgtgactcagcttctgaaagatacctgttttgaaggcggggacatcaccaccgtgttcacgccatcagcaaaatattgtcaagtggtctgtacgtaccacccaaggtgcttgctttttaccttcacagctgagtctcccagcgaggatcctacccgctggtttacctgtgttctaaaggatagtgttactgaaacgttaccccgggtcaatcggacagcagccatttcgggatatagcttcaaacagtgctctcatcaaatttcagcgtgcaacaaggacatctacgtagatctcgacatgaaaggcattaattataactcctcagtcgcaaagtctgcccaagaatgccaggagcggtgcactgacgacgtgcactgccatttttttacctacgcaactagacagttcccgtctctggaacaccgaaatatttgtctgttgaagcatacccaaaccggcactcccactcgcatcaccaaacttgataaagtcgtgtctgggttcagccttaagtcatgtgccctaagcaaccttgcttgtatccgggacatcttccctaacaccgtctttgcggacagtaacattgacagtgtgatggcccctgacgctttcgtgtgcggtcgcatatgtactcaccaccccggatgtctgttcttcactttcttctctcaggaatggcctaaagagtctcagagaaacctttgcctgctaaagactagcgaatctggcctgccctccacacggatcaagaagtcaaaggccctcagtggctttagcctccagtcatgtcgccacagcattccagtgttttgtcactccagcttttaccatgataccgactttttgggggaagaattagacattgtggcggcaaagagccatgaagcctgccagaagctttgtacgaacgccgtgaggtgccaatttttcacgtatactcctgcgcaggcgtcttgcaatgaaggaaaaggcaaatgctatctcaaactgtctagtaacggatcacctactaaaattcttcacggtcggggcggaataagtggctacaccttgcgtttgtgtaagatggataatgagtgcacgaccaaaatcaagcctcgaatcgtgggcgggacggccagcgtgaggggcgagtggccctggcaagtgactctgcacacaacgtcgcccacccaacgccacctctgtggtggatccattatagggaaccagtggattttaacggctgcgcattgcttttatggggtcgagtctcctaagatactgcgggtgtactcaggcattttgaatcagtcggagattaaagaggacacgtcattcttcggcgtccaggaaatcatcattcatgaccagtacaagatggcagagtccggttacgatatcgcactcctgaagctggaaaccaccgttaattacactgacagccagaggccaatttgcctgcctagtaagggggatcggaatgtgatctacactgattgctgggttaccggatggggttacaggaaactccgggataaaatccaaaataccctgcaaaaagccaagatccccttggtgacaaacgaagagtgccaaaagcggtatcgcggacataagatcactcacaaaatgatctgcgcagggtaccgggagggtggaaaagacgcttgtaaaggggacagcggcggtcctctgagctgcaagcataacgaagtgtggcatctggttgggattacaagttggggcgaaggctgtgcccaacgagagcgtccaggagtgtacactaatgtagtcgagtacgttgattggattttggagaagacccaggctgtg

SEQ ID NO: 2023 - DNA, 1875 bp, Artificial Sequence
  derived and/or modified sequence
atgatcttcctgtaccaggtggtccactttatcctttttacttcggtgtccggggaatgcgtcacccaactgctcaaagacacctgttttgagggaggagatattaccactgtctttaccccgagcgcaaaatactgccaagtggtgtgtacttaccaccctcgctgccttctttttacctttaccgccgaaagcccttccgaggatccaaccagatggtttacgtgtgtgcttaaggactcggtgacggagactctgcctcgagtgaacagaacggccgccatctcgggatacagctttaagcaatgttcgcatcaaatcagcgcatgcaacaaagatatctatgtggacctcgatatgaagggcatcaactataactcctctgtggccaagtcagcgcaggagtgtcaggaacggtgcactgacgatgtgcactgtcatttcttcacttacgcgactagacaatttccctcgcttgagcatcgcaacatttgtttgctgaagcacacccagaccggaactcccacgcgtattactaaacttgacaaggtcgtgtccggctttagcctcaaatcgtgtgctctgtccaatcttgcatgtattagagacattttccctaataccgtgttcgcagactccaacatagatagcgtcatggccccggatgcctttgtctgtggacgcatttgtacgcatcatcccggttgtctgtttttcacctttttctcgcaggagtggcccaaggagtcgcaaagaaatctttgtctgcttaagacgtcggaatcgggtctgccttcgactcgcattaagaagtcaaaggccctctcgggattttcgcttcagagctgcaggcattcgatccctgtgttttgtcattcatccttctaccacgacactgacttccttggcgaagaactggatattgtggccgcaaaatcacatgaagcgtgtcagaagctgtgtaccaacgccgtcagatgtcaattctttacctacactcctgcacaagcatcctgtaacgaaggaaagggaaagtgttaccttaagctctcttcaaacgggtcaccaacgaagatacttcacggacgcggagggatatccgggtacactttgagactgtgtaagatggataacgaatgcaccaccaagatcaagcccagaattgtgggaggtactgcatcagtaagaggcgagtggccatggcaggtgaccctgcacaccactagccctactcagcgacacctgtgcggtggatcaataatcgggaaccaatggatcctcaccgctgcccactgtttctatggggttgagtcacctaagatactgagagtctacagcggcatcctcaaccagtctgaaatcaaggaagatacttccttcttcggggtgcaggaaatcatcattcatgaccaatacaagatggctgaatccggatatgacatcgcactgctcaaactggaaacgaccgtgaactataccgattcgcaacggccaatatgccttcccagcaagggggatagaaacgtcatctacactgattgttgggtgaccggctgggggtacaggaaacttcgggataagatacagaatactctgcagaaggccaaaattcccctggtgaccaatgaagagtgccaaaaacgataccggggacataagatcacgcataagatgatttgcgcaggttacagagagggtggcaaagatgcttgtaagggagacagtggcgggccactgtcgtgtaaacataacgaggtctggcatctcgtcggtattacttcctggggcgagggttgtgcacagcgtgaacgtccaggcgtgtacacgaacgttgtggaatacgtagattggatcctcgaaaagacccaggccgtg

SEQ ID NO: 2024 - DNA, 1875 bp, Artificial Sequence
  derived and/or modified sequence
atgatttttctgtaccaggtggtgcactttattctttttacttccgtgagcggagaatgtgtgacccagcttctgaaagatacctgtttcgagggtggagatatcaccactgtgttcacgccgtcggcaaagtactgtcaagtggtgtgtacgtaccatccgcggtgccttctgtttacctttaccgccgaaagccctagcgaggatccaaccaggtggttcacctgcgtgctcaaggattccgtgaccgaaaccctgccacgcgtgaaccgcactgcagcaatctcgggttattcctttaagcagtgcagccatcaaatttcagcatgtaacaaagacatttacgtcgacttggatatgaaggggatcaactacaatagctccgttgccaagagcgcacaggagtgtcaggaaagatgtacggatgatgtgcattgtcacttcttcacctatgccactcgccagtttccttcccttgaacataggaacatttgcctgctgaagcatacccagaccggtaccccaactcggatcaccaagctcgacaaggtcgtctcaggatttagcctcaagagctgcgcactctcgaacctcgcctgcattagagacatattcccgaacaccgtctttgcagattcaaacatcgactcagtcatggcacctgacgcattcgtgtgtggacgcatttgtacccatcaccctggatgcctgtttttcacctttttcagccaagaatggccaaaggaatctcaacggaatctgtgccttcttaaaacctcggaatccggcctcccgtcgacccggattaagaagtcgaaggcgctgtcgggtttctcccttcagtcctgtcggcactctattcccgtgttttgccactcatcattttaccatgacaccgattttctgggagaagaactcgacattgtggctgccaaatcacacgaagcatgtcagaaactctgtaccaatgccgtgcgctgccagttctttacgtacaccccagcacaggcatcatgtaacgaaggaaagggcaaatgttaccttaagctgtccagcaatggctcccctaccaagattcttcatggaagagggggcatttccggttacacgttgagactttgtaagatggataatgagtgcactaccaagattaaacccagaatagtgggtggtacggcatcggtgagaggggaatggccatggcaagtcacccttcacactaccagcccgacgcagcgacatctttgcggtggctcgattattgggaaccagtggattctcacggcggcacactgcttttacggggtcgaatccccaaagattcttcgcgtgtactcgggtattttgaaccaatcggagatcaaggaagatacttccttttttggggtgcaagagattatcatccacgaccagtacaagatggcggaaagcgggtacgatattgctcttcttaagctggaaacgaccgtcaactacaccgattcacaaagaccaatatgccttccatcgaagggagacaggaacgtgatttacactgactgttgggtgactggatggggatacagaaagctcagagacaagattcagaatactctgcagaaggcgaaaatacccctcgtgactaacgaagaatgccaaaaaagatacagaggtcacaagatcacccacaaaatgatttgcgccggctaccgagaagggggcaaggacgcatgcaaaggggactccggaggacctctttcatgcaagcataatgaagtgtggcaccttgttggaatcacttcgtggggagaaggctgcgcgcaacgagaaagacccggagtctacaccaacgtggtggagtatgtggattggatccttgaaaagacgcaagccgtc

SEQ ID NO: 2025 - DNA, 1875 bp, Artificial Sequence
  derived and/or modified sequence
atgatcttcctgtatcaagtagtgcatttcatcctgttcacttctgttagcggagagtgcgtcacccagctcctcaaggacacgtgcttcgaaggtggcgacatcaccaccgtgttcaccccttcggccaagtactgtcaggtggtgtgcacttaccatccgcggtgtctgctgtttaccttcaccgcagagtccccttcggaggacccgacccgctggttcacttgcgtgttgaaggattccgtgaccgaaaccctgccgcgcgtcaatcggacggcagccatatccgggtacagcttcaagcaatgctcccatcagatctcggcctgcaacaaagacatctacgtggacctcgacatgaagggaatcaactacaattcgtcggtcgcgaagtccgcccaggaatgccaagagcgctgcactgacgatgtgcattgtcacttttttacctacgcgactagacagttcccatcactcgaacataggaatatctgcctcctgaagcacacccagaccggaactcctactcgaatcaccaagctggataaagtggtgtccgggttctcgctcaaatcgtgcgccttgtccaaccttgcgtgcatcagggacatcttccctaacactgtgtttgccgattcaaacatcgacagcgtcatggctccagacgctttcgtgtgcggcagaatctgcacccaccatccgggttgcctcttcttcactttcttctcgcaagagtggccaaaggaaagccaacgcaacctgtgcctgctcaagacctccgagagcggcctgccgagtactagaatcaaaaaatcgaaggcactgtcaggcttttcactccaatcatgtaggcactccatccccgtgttttgtcactcatccttctaccatgacaccgacttcctcggagaagagcttgacattgtcgcagctaagagccacgaagcctgccaaaagctgtgtactaacgcggtcagatgccagtttttcacttacaccccagcacaagcctcctgcaacgagggaaaaggcaagtgctaccttaagttgagctcgaatggaagcccgactaaaatcttgcatggacgcggcggtatctcgggttatacgctgcgcctctgcaagatggataacgaatgcaccactaagattaaaccccgcatcgtcggcgggaccgcgtcagtccgtggggagtggccttggcaggtgactctgcatactacttccccgacccagcgccacctctgtggcggatcgattatcggaaaccagtggatcctgactgccgcccactgcttctacggagtggagagcccgaagatcctgcgggtgtactctggaatccttaatcagtcggagatcaaggaagataccagcttctttggtgttcaggagattatcatccacgaccagtacaagatggctgagagcgggtacgatatcgcgttgctgaaactggaaaccaccgtcaattacactgattcacaaagaccgatttgtctcccatccaagggcgatcgaaacgtgatttacaccgactgttgggtcacgggatggggataccggaagctgcgggacaaaatccagaacactctgcagaaggctaagatcccgctggtcactaatgaagagtgccaaaaaagatatcggggccacaagattacgcacaaaatgatctgcgccggataccgggaaggagggaaggatgcgtgcaaaggggattccggaggccccctgtcatgcaagcacaatgaagtgtggcaccttgtgggaattacctcgtggggagaaggatgtgcacagcgggaacgcccaggagtttacactaacgtggtggaatacgtggactggatcctggaaaagacgcaggccgtg

SEQ ID NO: 2026 - DNA, 1875 bp, Artificial Sequence
  derived and/or modified sequence
atgatttttctgtaccaagtggtgcatttcatcttgttcacgtcggtttccggagagtgcgtcactcagctcctgaaagacacgtgcttcgaaggcggagatatcactacggtgttcaccccttcagcgaagtactgccaggtcgtttgtacttaccatccacgctgcctgcttttcacctttactgccgaaagcccgtcggaagatcctactcggtggtttacttgcgtcctcaaagactctgtgactgagactctgccgcgcgtgaatagaaccgcagcaatttccggctactcgtttaagcaatgttcgcatcaaatctccgcttgcaacaaagatatctacgtggatctggatatgaagggcatcaactacaattcgtcagtcgcaaagtcagcgcaggagtgccaggagcggtgcactgacgacgttcactgccatttcttcacttacgcgacccggcagtttcccagtctggagcaccgcaacatttgcctgctcaaacacacccaaactggtaccccgaccaggatcaccaagctcgacaaggtcgtgtcgggtttttctctgaagtcctgtgcactcagcaacctggcatgcattcgcgacatcttcccgaacaccgtattcgccgactccaacatcgactcggtgatggcgccagacgcatttgtgtgcggacggatctgcactcatcacccggggtgtctgttctttactttcttctcgcaggaatggccgaaggaaagccagcggaacctgtgtctgttgaaaaccagcgaatccgggttgccgtcgacgcgcatcaaaaagtccaaggcactgtcgggattctccctgcaaagctgcaggcattccatcccggtgttctgccactcctccttctatcatgataccgattttctgggcgaagagttggatatcgtcgccgcgaagtcgcacgaagcgtgccagaagctgtgcaccaatgcggtgagatgtcaattcttcacttatactcctgcacaagcgtcatgcaatgaaggaaagggcaaatgctatctgaagctctcctccaatgggagtccaaccaagatcctgcatggccggggtggcatttccggatataccttgagactgtgcaaaatggacaatgaatgcaccactaagataaagccgaggatcgtgggaggaaccgcgtcggtgcggggagagtggccatggcaggtgactctgcatactacgtcgccgacccagaggcacttgtgtggagggtccattattgggaatcagtggatcctcacggcagctcattgcttctacggcgtggaatcaccgaagatcctgagagtgtacagcggaatcctgaaccaatcggagatcaaagaagatacgagctttttcggtgtccaagagattatcatccacgaccagtacaagatggctgaatccggatacgacatcgcgcttctcaagctggagactactgtgaactatactgactcgcaaagaccgatctgcctgcccagcaaaggggacagaaatgtgatctacaccgactgctgggtgactggctggggatacagaaagctgcgggataagatccagaacacgctccaaaaggccaagatccctttggtgactaatgaagaatgtcagaaacgataccggggacacaaaatcactcacaagatgatctgcgccggataccgggagggagggaaggacgcgtgcaagggcgattcggggggacctctgtcctgcaagcacaacgaggtgtggcacctcgtgggcatcacttcatggggagagggatgcgcccagagggaacgccccggggtttacacgaatgtggtggaatacgtggactggatcctcgagaaaactcaggccgtc

SEQ ID NO: 2027 - DNA, 1875 bp, Artificial Sequence
  derived and/or modified sequence
atgattttcctgtatcaagttgtccacttcatcctcttcacgtcagtgtcaggcgaatgcgtgacccagctgctcaaagacacgtgctttgaaggaggggacatcaccactgtattcacgccttccgcgaagtactgccaggtcgtgtgcacctaccaccctcggtgcctgcttttcaccttcactgccgagagcccctccgaggatccgacgcgctggtttacttgcgtgctgaaagactcggtgacggaaaccctgcctagagtgaaccgcaccgcggctatctcgggttattccttcaagcagtgctcgcatcagatcagcgcctgcaacaaggatatctacgtcgatctggacatgaaaggaatcaactacaactcatccgtcgcaaagtcggcccaggaatgccaggaacggtgtaccgacgatgtgcattgtcatttcttcacctacgcgaccagacagttcccatctctcgaacaccggaacatctgcctgctcaaacacactcaaaccggtactccaacgagaatcacgaaactggacaaggtcgtctcaggctttagcctcaagtcatgtgccctgagcaatctggcttgcattcgggatatcttcccaaatacggtgttcgctgattcgaatatcgattccgtgatggcaccggacgcatttgtttgcggaagaatctgtactcatcacccggggtgcctgtttttcactttcttcagccaggaatggccaaaggaatcccaaagaaatctctgcttgcttaaaacttccgaatcgggcctgcccagcaccagaatcaaaaagtcgaaggcattgtcgggcttttcactgcagtcgtgtagacattcaatccccgtgttttgccattcatcgttctaccacgacacggacttcttgggagaggaactggacatcgtcgctgccaagtcgcacgaggcttgtcagaagctgtgcaccaatgctgtccggtgtcagtttttcacctacaccccggctcaagcaagctgcaatgagggcaagggaaaatgttacttgaagctgtcctcaaacggatctccgactaagatcttgcatggaaggggaggaatctccggttacaccctgcggctctgtaaaatggataacgagtgcaccaccaagatcaagccgcggatcgtgggaggcactgcgagcgtgcggggagaatggccttggcaggtgaccctgcataccacgtctccgactcagagacacctttgcggcggctcgatcatcggtaatcaatggattttgactgccgcgcattgcttttacggagtggagtcccctaagattctgagagtgtacagcggtatcctcaaccagtcggaaatcaaggaggacacgtcatttttcggggtccaggagatcatcattcacgaccaatacaagatggcagagagcggctatgacatcgcactgctcaagttggaaactaccgtgaactacacggattcacaacgccccatctgcttgccgtcgaaaggagatcggaacgtgatctacaccgactgttgggtgaccggatggggctaccggaaattgcgcgacaaaatccaaaacacgctgcaaaaggccaaaatccctctcgtgactaatgaagagtgccaaaagcgctatcgcggacacaagattacccataagatgatctgcgccggataccgcgaagggggaaaggacgcctgcaagggagattccggaggacctttgtcctgcaaacacaatgaagtgtggcacctggttggaatcacttcgtggggagaaggatgcgcccaaagagaacgcccaggcgtgtacaccaacgtggtggagtacgtcgattggattctcgaaaagactcaggcagtg

SEQ ID NO: 2028 - DNA, 1875 bp, Artificial Sequence
  derived and/or modified sequence
atgatttttctctaccaagtagttcacttcattcttttcactagcgtgtcaggtgaatgcgtcactcaactcttgaaagatacatgctttgaaggtggtgatattacaacagtttttaccccatccgcaaagtactgccaagtggtgtgtacatatcaccctagatgccttctttttacattcacagctgagtctccgtctgaggatcctaccagatggttcacatgtgtgctcaaggatagtgtgactgaaaccctccccagagttaacagaaccgcagctatcagtggttattcgtttaagcaatgctcccatcaaatttctgcatgcaacaaggatatctatgtcgatcttgatatgaaggggataaattataactcttctgttgccaagtcggctcaagagtgccaagagcgctgtactgatgatgttcattgccattttttcacatacgctactcgtcagtttccgtctcttgagcatcgtaatatttgtttgcttaagcatacgcaaacaggaactccaactaggattactaaactagacaaagtggtatcgggattttcactcaagtcttgtgcattatccaaccttgcgtgtattcgtgacattttccctaatacggtttttgccgattctaatatagattccgtcatggctccggatgcctttgtgtgtgggaggatttgcacccaccacccaggttgtctttttttcacttttttcagtcaagagtggcctaaggaatctcagcgcaatctatgcttactcaaaacctcggaatcgggtctcccatcaacccgaattaaaaagagcaaagcattgagcggtttttccttgcagtcatgcaggcattcaatccccgttttctgtcacagctcattctaccacgatacagattttctcggggaagaactcgacattgtggcagctaaatcgcatgaagcctgccaaaagttgtgcactaatgccgtccggtgtcaattcttcacctatacccctgctcaagccagctgcaatgagggtaaggggaaatgttatctcaaactatcttcaaatggttcaccaacaaagattttacacggccgaggcggaatctccggttacactcttcggctctgcaaaatggacaatgaatgtacgactaagattaagcctcggatagtaggcggaaccgcctcggttaggggcgagtggccctggcaagttacgcttcatactacaagtcctactcagcgccacctttgcggcgggtctatcattggtaaccagtggatacttaccgccgctcattgcttttacggtgttgagagtccgaaaatccttcgtgtatatagcggaatattaaatcaatcagagatcaaggaggacacctccttctttggcgttcaagagatcatcattcacgatcaatataagatggctgaatccggttacgatatcgctcttttaaagcttgagactacagttaattatacagactcacaacgacctatctgccttccatctaaaggcgataggaacgtgatttatactgattgctgggtcacagggtgggggtatcgcaagcttagagataagatccaaaacactttgcaaaaggctaagatcccacttgttaccaacgaggaatgccaaaaaagatatcgaggtcataaaatcacgcataagatgatttgcgccggttatcgtgaaggtgggaaagatgcatgcaagggagattcgggaggtcccctttcttgtaagcacaatgaggtgtggcatcttgttgggattactagttggggggaaggttgcgctcaaagagagaggccaggtgtgtatacgaacgttgttgaatacgtggattggattctcgaaaaaactcaagccgtt

SEQ ID NO: 2029 - DNA, 1875 bp, Artificial Sequence
  derived and/or modified sequence
atgatctttctctaccaggtggtgcacttcatcctgttcacctcggtgtcaggggagtgcgtgacccagcttctcaaggatacgtgcttcgaaggcggagacatcaccaccgttttcaccccatccgccaagtactgccaggtggtctgcacgtaccatccgagatgcctgttgtttaccttcaccgccgaatcgccgtccgaagatccgactaggtggttcacctgtgtgctcaaagattcagtcaccgaaactctcccgcgcgtgaaccgaacggcggccatctcgggttactcgttcaaacagtgttcccaccagatttcagcgtgcaataaagacatctacgtcgacctggatatgaaggggatcaattacaactccagcgttgccaagtcggcgcaggaatgccaggaacggtgcactgacgacgtgcattgccacttcttcacgtacgccacccgtcagttcccgtcgctggaacataggaatatctgcttgttgaaacatacccagaccggaaccccgacccggatcaccaagctggataaagtggtgtcgggattctcgctgaagagctgtgccctctcgaacctggcgtgcatccgggacatctttccgaacaccgtctttgccgatagcaatatcgacagcgtgatggcgcccgacgccttcgtgtgtggacggatttgcacccaccacccaggctgcctgtttttcacgttcttttcgcaagaatggccgaaagaatcccagcgcaatctgtgcctcctcaagactagcgagtcaggattgccatcaacccgcatcaagaagtcgaaagcactctcgggattttccctgcagtcatgccggcactcaattccagtgttctgccattcatcattttaccacgacaccgatttcctcggagaagaactggacatcgtcgcggcgaagtcccatgaagcctgtcaaaaactgtgcactaacgcggtgcggtgtcagtttttcacttataccccggcccaagcctcgtgcaacgagggaaagggaaagtgctacctcaagctgtcatccaatggctccccaaccaagatcctgcacggtcgcggaggaatctcgggctacacgctccgcctgtgtaagatggacaacgaatgtactaccaaaatcaagccaagaatcgtcggaggaaccgcctccgtgagaggagaatggccgtggcaagtgacgctgcatactacttcacctacccaacggcatctctgtggaggatcgatcatcggaaatcagtggatcctgacggccgcccattgcttctacggggttgaatccccgaagattctccgcgtctactccgggatccttaatcagtctgagatcaaagaggatactagcttcttcggggtgcaggaaatcatcattcacgaccaatacaagatggctgagtccggctatgatatcgcactgctgaagctcgagactactgtgaactacaccgactcacaacggccaatctgtctgccttcaaagggcgacagaaacgtgatctacaccgattgctgggtcaccggctggggatataggaagctgcgggacaagatccagaatactctgcagaaggcaaagatacctctggtgactaatgaggagtgtcaaaaacgctaccgcggtcataagattactcacaagatgatctgcgcgggttacagggaaggaggaaaggatgcctgcaagggcgatagcggaggaccgttgtcctgcaagcacaatgaagtttggcatctggtcggaatcacgtcgtggggagagggttgcgcgcagagggagcgcccgggagtgtacaccaacgtcgtcgaatacgtggattggatcctggaaaagactcaggcagtg

SEQ ID NO: 2030 - DNA, 1875 bp, Artificial Sequence
  derived and/or modified sequence
atgatttttttgtaccaggtggtgcacttcatccttttcacatccgtgtccggcgaatgtgtgactcagctccttaaggacacctgtttcgaaggcggtgacatcaccaccgtgttcactccctccgctaagtattgccaggtggtgtgcacttaccacccccgctgtctactctttacatttaccgcagagagccctagtgaggatcccacgcgctggttcacatgtgttctaaaagatagcgtgacagaaacactgccacgcgtgaatcgtactgccgcaatctctggctattcattcaaacagtgctctcatcagattagtgcatgtaataaagacatatacgtagacctggatatgaaggggattaactataacagtagcgtggctaaatccgcgcaagagtgccaggaacggtgtacagacgatgtgcattgtcatttttttacctatgctactaggcagttccctagccttgaacaccgcaatatctgtcttttaaagcacactcagaccgggacaccgactcgaattaccaagctggacaaggtcgtgtctggtttcagtctcaaatcctgcgcactgtctaacctggcttgcatacgggatatctttcccaatactgtgttcgcggactcaaatatcgattccgtgatggcacctgatgctttcgtttgcgggcgaatttgcacccatcatccgggctgtctctttttcacattttttagtcaggagtggccaaaggagagccagaggaatctttgtctactgaagacttcagaatcaggtttgccttctactcgcatcaagaagagcaaggcactttccggcttctccttgcagagctgcaggcattcgattccagtattctgtcattccagcttttatcacgacacagacttcttaggagaggagctcgatatcgttgctgctaagtcacacgaggcttgccaaaaattgtgcaccaacgcggtcaggtgtcagttcttcacctatacacctgcacaggcaagctgtaacgagggcaaggggaagtgttacttgaagttgtcatccaacggtagcccgaccaagattctgcatggtagaggtggcatcagcgggtacactctccgcttatgcaagatggataatgagtgtacaaccaagattaagccacgcatcgtcggaggtaccgcttcagtaagaggggaatggccatggcaagtgacccttcacaccacttcacccacacagaggcatctgtgcggcggctcaataatagggaaccagtggattctgacggccgcgcactgcttctatggcgtggagtcccccaagattctacgcgtttattccgggattttgaaccagagtgagatcaaggaggatacaagcttttttggtgtccaggagatcataatccatgaccagtacaaaatggccgagagcggctacgatatagccctattaaaattggagacaacagtgaactacacagacagccagcggccaatttgcctgcccagtaagggagaccgcaatgtgatctacacagactgttgggtcaccggttggggctataggaaactacgcgacaagatccagaacacacttcagaaagcaaagatccctctggtgaccaatgaggaatgtcagaaaagataccggggccataagattacacataaaatgatctgcgctggctaccgggaagggggaaaggacgcctgcaaaggtgattcaggagggcctctgagttgtaagcacaacgaagtgtggcacctggtaggaattaccagctggggtgagggctgcgcccagcgggagagaccgggggtctatacaaatgtggtcgagtacgtagactggatcctagagaagacccaagcagta

SEQ ID NO: 2031 - DNA, 1875 bp, Artificial Sequence
  derived and/or modified sequence
atgatttttctgtaccaagttgtgcactttattctttttacttcagtgtcgggagaatgcgttacccagcttctgaaggatacctgttttgaaggcggagacatcaccaccgtgttcactccttcggctaagtactgtcaagtggtgtgtacctaccatccgcgctgccttctctttacctttactgcagaatctccttcagaggatccaacccgatggttcacctgtgtcctgaaggactccgtgaccgaaactctgccccgcgtgaatcgcactgccgcaatctcgggatacagctttaaacaatgttcccatcagataagcgcatgcaataaggacatttacgtggatcttgatatgaaaggcattaactacaattcctccgtggcaaaatccgcccaagaatgccaggaacgctgtaccgatgatgtgcattgtcacttctttacctatgcaactcggcaatttccttcgcttgagcatcgaaacatttgtctgctgaaacatactcaaaccggaacccctactcggattactaaattggataaggtggtgtcagggttctcgctgaagtcgtgtgctttgtccaacctggcatgtattagagacatttttccgaacactgtgttcgcggactcgaacatcgattccgtgatggccccggacgcgtttgtttgtggaagaatttgcactcaccaccctggttgtctcttcttcactttcttctcacaggagtggcccaaagaatcccagcggaacctctgtctgcttaagacgtcagaatccggtctgccttcgaccagaatcaagaagagcaaagcattgtcaggctttagcctccagtcctgtaggcattcaattccagtgttctgccacagcagcttttaccatgatacggactttcttggagaggagctggatatcgtggccgccaagagccatgaggcctgccaaaaactgtgcactaacgcggtccggtgccagtttttcacctatacccctgcacaggcaagctgtaacgaagggaaagggaagtgctaccttaagctgagctcgaatggatcccctacgaagatactgcatggacgcggtggcatctcaggctacaccctgcgtctgtgtaagatggacaatgagtgtactaccaagatcaagccacgaatcgtcggtggcactgcatccgttcggggcgaatggccatggcaagtgacccttcataccacgtcgcctacccagcggcacctgtgcggaggcagtatcattgggaatcagtggatattgacggcagcacactgcttttacggagtggagtcccccaagattctccgcgtatattctggcatcctgaaccaaagcgagattaaagaagatacttcgttttttggtgtgcaagagattatcatccacgaccaatacaagatggctgagtcgggttacgatatcgccctccttaaactggaaactaccgtgaattacaccgacagccagcgcccgatttgcctgccttctaaaggtgacagaaacgtgatctacactgattgttgggtgactgggtggggctacagaaaacttagagataagattcaaaatactctgcagaaggcaaagattcctcttgtcactaatgaagagtgccagaagcggtaccgggggcacaagatcacccacaagatgatttgtgccggttatagagaaggaggaaaggacgcatgtaaaggagactccggaggaccactgtcctgcaagcataatgaagtctggcatctggtgggtataacctcctggggagaaggatgcgcccaaagagaacgcccgggagtgtacaccaacgtagtggagtacgtggactggatccttgagaaaacccaggccgtc

SEQ ID NO: 2032 - DNA, 1875 bp, Artificial Sequence
  derived and/or modified sequence
atgatttttctgtaccaggtggtacacttcattttgtttacctcagtgagtggcgaatgcgtaacccagctccttaaagacacctgtttcgagggtggagatatcacgacagtcttcaccccgtcagccaagtactgccaggtggtctgtacctaccaccccagatgtctgctgtttacgttcacagctgaaagccccagcgaggacccaactcggtggttcacatgcgttctgaaagactctgtgacagagaccctgccacgcgtcaacagaacagcggcaatcagcggctacagttttaagcagtgctcacaccagatctccgcctgtaacaaggacatttacgtggatctggacatgaaaggaataaactacaattcatccgttgccaagtctgcccaggagtgtcaagagaggtgcacagatgatgtccactgccacttttttacctatgctacacgccagtttccctccttagaacataggaatatttgcctgttgaaacatactcagaccgggactccaaccagaatcaccaagctggacaaggtggtgtcaggtttttccttgaagtcgtgcgccctcagcaacctagcttgcatccgggacatttttcctaacacagtgttcgccgactcgaatatagactcggtgatggcccccgacgctttcgtctgtggccgaatctgcactcaccatccgggttgcttgttcttcactttcttttcccaagagtggccaaaggaatcacagcgcaatctgtgtttgctgaagaccagcgagagcgggctgccttccaccaggattaagaagagtaaagccctgtccggtttctcgttacaaagttgtagacattccataccggtgttctgccattcatcattttaccacgacactgattttcttggtgaggagctggacatcgtcgctgccaaatcccatgaggcttgtcaaaaactgtgtacaaatgccgtccgttgccaattctttacctacacacccgcgcaggcatcgtgcaatgagggcaaggggaagtgctacttaaagctgtccagcaatgggtctcccaccaaaatcctccatggtcgcggaggaatctccggctatacgttgagattgtgcaagatggataacgagtgcactaccaagattaagccccgtatcgtcggcggtacagccagcgtaagaggcgagtggccctggcaggttactctgcatactacctctcctacccagcggcatctgtgtggcggatccataataggtaatcagtggatactgaccgccgctcactgcttttacggcgtggaatcccctaagattctgagagtctacagcgggatcctgaatcaaagcgagatcaaggaggacaccagtttctttggggtgcaggaaataattatccacgatcaatataagatggctgaatccggctatgacatcgccttgctgaaactggagaccacagtcaattataccgacagccagaggcccatctgcctgccatctaagggggaccgcaacgtgatttacactgattgttgggtgaccggttggggttatcgtaaactccgcgacaagatccagaataccctccagaaggccaaaatcccgctggtgacaaatgaggaatgtcagaagcggtacagaggccataaaattacacataagatgatctgtgcaggttaccgcgagggcggcaaagacgcttgtaagggggattccggaggaccactgtcctgcaagcacaacgaggtgtggcaccttgtcggaattaccagctggggggaggggtgcgcccagcgcgagaggcccggcgtctacactaacgtggtggagtacgtcgactggatactggagaagacgcaagccgtt

SEQ ID NO: 2033 - DNA, 1875 bp, Artificial Sequence
  derived and/or modified sequence
atgatctttctgtaccaagtggtccatttcattctttttacctcagtgtcgggtgagtgcgtcacccaactccttaaggatacctgtttcgaaggaggagatataaccactgtgttcaccccctcagcaaagtactgtcaagtggtgtgtacctaccatccccggtgcctgctttttacgttcactgcagaatcacccagcgaggacccaacccgctggtttacctgcgtgctcaaggattccgtcacggaaactcttcctagagtcaatagaactgcagcaatttccgggtactcgttcaaacaatgttctcaccagatctccgcatgcaacaaggatatctacgtggacctggacatgaagggaatcaactataactcctctgtggcaaagtccgcccaagaatgtcaagaacgatgcactgacgatgtgcactgccatttctttacttacgctactaggcagttcccatcactcgagcatcgcaacatatgtctgctgaaacacacccaaaccgggacccctacgagaattactaagttggataaggtggtgtcaggattcagcctgaagagctgcgctctctccaatctggcgtgcataagggacatatttcccaacactgtctttgcagattccaacatcgattccgtgatggcccctgacgcctttgtgtgtggccgcatttgcactcaccatccaggttgtctgtttttcacctttttctcgcaagaatggcctaaggaatcacaaagaaacctgtgcttgcttaagacctccgaatcgggactgccatcaaccagaataaagaagtccaaggctctctcgggattctcgctccaatcgtgtaggcactctatccccgtgttttgtcatagctccttttatcacgacactgacttcctgggtgaagagcttgatatcgtcgcagcaaagtcccatgaggcatgccagaagctctgtactaacgccgtgcggtgccaattctttacgtacaccccagcacaggcatcatgcaatgaagggaaggggaagtgttacctcaagttgtcatcgaacgggtcaccaactaagattctgcacggcaggggtgggatttccggctacactctccggctgtgtaagatggataacgaatgcaccactaagattaaaccgagaattgtgggaggcactgcctcggtcaggggtgaatggccatggcaagtgaccctgcataccacttcgcctacgcagcgacatctttgtggaggctccataattggtaaccaatggatccttactgcagcacattgtttctacggggttgaatcacctaagattctccgtgtgtactcgggtatccttaaccaatctgaaatcaaggaggacacctcgttctttggagtgcaggagatcataatccatgaccagtacaaaatggcagaaagcggttatgacattgccttgctgaagctcgaaaccaccgtgaactacactgacagccaaagaccaatctgtctgccatcgaagggagatcgaaatgtcatttacactgactgttgggtcactggatggggataccgcaagctgagagataagatccaaaatacgctgcagaaagccaagatcccacttgtgaccaacgaagagtgtcagaaaagataccgtggtcataagataacccacaagatgatttgtgcaggttaccgggaaggtgggaaggatgcatgcaagggggattcgggaggccccctgtcctgtaagcacaacgaggtgtggcacctggtgggtattacctcgtggggagaaggatgcgcacagagggagcgacctggtgtgtacaccaatgtcgttgagtacgtggattggattcttgaaaagacccaagccgtc

SEQ ID NO: 2034 - DNA, 1875 bp, Artificial Sequence
  derived and/or modified sequence
atgatcttcctctaccaagtggtccactttatcctgttcacctctgtctcgggagagtgtgtgacccagctgttgaaggatacttgtttcgagggtggcgacatcacgaccgtgttcactccgtcagcaaagtactgccaggttgtttgcacctatcatccaaggtgtctgctgttcacgttcactgcagaaagcccatcggaggaccctacccgttggttcacctgtgtgctgaaggattcggtgaccgaaaccttgccgagggtgaaccggaccgccgctatttctggatactcgttcaagcagtgcagccaccaaatctccgcttgcaacaaggatatctacgtcgaccttgacatgaaggggatcaattacaattcatcagtggcaaaatctgcccaagaatgccaggaaaggtgtaccgacgacgtgcattgccactttttcacttatgccacccgccagttcccgtcactggaacatcgcaacatctgtcttttgaaacacacccagactggcacgccgacccggatcaccaaactggataaagtcgtgagcggcttctccctgaagtcatgtgctctctccaacttggcctgcatccgcgacatattcccaaacactgtctttgcagattcgaacatcgatagcgtcatggccccggatgcatttgtctgcggcaggatctgcacccaccaccccgggtgtcttttcttcacgttctttagccaagagtggcccaaagaatcgcaaagaaatctgtgtctgctcaagacgtcagagtcggggctgccctcgactagaatcaaaaagtccaaggcgctgtccgggttttccctgcagtcctgccggcattccatccctgtgttctgccactcgagcttctaccatgataccgacttcttgggagaagaactggacattgtggcagccaaaagccatgaggcgtgccaaaagctgtgcactaacgcggtgagatgccagtttttcacctacaccccggcccaggcttcgtgtaacgaaggaaagggcaagtgctaccttaagctcagctccaacggatccccaactaagatcctgcatgggcggggaggaatctcggggtacactctccgactttgcaaaatggacaacgagtgcacgactaagattaagcctagaatcgtgggaggcaccgcgtccgtgcgcggggagtggccgtggcaggtgaccttgcataccacctcaccgacccaacgccacctctgcggaggatcaatcatcggaaaccagtggatcctcactgctgcgcactgcttctacggagtggaatcgccaaaaatcctccgggtgtactctgggatcctgaatcaatcggagataaaggaagataccagctttttcggagtccaagaaatcatcattcatgaccagtacaagatggccgaatcaggttacgacatcgcgctgctgaagctggagactaccgtcaactatactgacagccaacgccctatctgcctcccttctaagggtgaccgcaacgtgatttacactgattgctgggtgacgggatggggatatcggaagttgcgagacaaaatccagaatacccttcagaaggccaaaataccactcgttaccaatgaggaatgccagaagcggtaccggggacacaagatcacgcacaagatgatctgcgctggttacagggaaggtggtaaggacgcatgcaagggcgactcggggggaccattgagctgcaagcacaacgaagtctggcacctggtgggaattacctcgtggggagagggatgtgcccaacgcgagcggccgggagtgtacaccaatgtcgtggagtacgtggactggatcctcgagaaaacgcaggcggtg

SEQ ID NO: 2035 - DNA, 1875 bp, Artificial Sequence
  derived and/or modified sequence
atgatctttctctaccaggtggtgcattttatccttttcactagcgtcagtggggaatgcgtgacacagcttctcaaagacacgtgcttcgaaggcggggatatcacaacagtttttacaccctcagccaaatactgtcaggtcgtgtgtacctatcatccgaggtgcttgttgttcacgtttactgccgagtctccgagtgaagatcccacccggtggttcacttgcgtgctgaaagattcagtcaccgagaccctacccagagtgaacaggaccgccgcgatttccggttactcgtttaaacagtgtagccaccagatttctgcatgcaacaaagacatttatgtggatcttgacatgaaggggatcaactacaacagctctgtggccaagagcgcccaggagtgtcaggagcggtgtacggacgatgttcactgccactttttcacatacgcaacacggcagttcccaagcctggaacataggaacatatgtctccttaaacatacacagaccgggaccccaactcgaattactaagctagacaaagttgtctcagggttctcgctaaagagctgcgctcttagcaatttggcttgcatcagggatattttcccaaacaccgtgttcgccgacagtaacatagacagtgtaatggctccagatgctttcgtgtgcggccgtatctgtacccatcaccccgggtgcctgttcttcacatttttcagtcaggagtggccaaaagaatcccagcgtaatctctgtttgctgaaaacttctgagtcgggactgccctctacacgaatcaagaaatctaaagccctgagtggttttagtctgcagtcttgccggcattccattcccgtcttttgccacagttccttttaccatgacacggatttcctgggagaagagttggatattgtggccgctaaatcgcacgaagcatgccagaagctgtgtacgaacgctgtgcggtgccaattttttacctacacccccgcccaggcttcatgcaacgaaggtaaaggaaaatgttacttaaagctgtctagcaacggttctccaacaaagattctgcatggcagaggaggtatcagcgggtacacactccgactgtgtaagatggacaatgagtgtacaaccaagatcaagccacggatcgtcggcgggaccgccagcgttagaggtgagtggccatggcaggtgacactgcacaccacaagcccgacacagcggcatctttgcgggggtagtataatagggaatcaatggattcttacagccgcccattgtttttatggcgtcgagtcccctaaaatcttacgcgtgtactcggggatcctgaaccagtcggagatcaaggaggacacgagcttcttcggagtccaagagataattatacacgaccagtataagatggcggaaagcggttatgatatcgcactgctcaagctggagaccacagttaactatacagatagccagaggccgatttgcctgccaagtaaaggcgatagaaacgtgatttataccgattgttgggtgacaggttggggttataggaaactgcgggacaaaattcagaacactctgcaaaaggctaagatccccctggtgacgaacgaagaatgccagaaacggtacagggggcacaagatcacccataagatgatctgtgctggttaccgcgaaggaggaaaggatgcatgcaagggggacagcggtggtccactctcttgtaagcacaacgaagtctggcatttggtcggcattacttcatggggggagggctgcgcacagcgcgagcgtccgggagtttataccaatgtggtggagtacgtggactggatcctcgagaaaactcaggctgtg

SEQ ID NO: 2036 - DNA, 1875 bp, Artificial Sequence
  derived and/or modified sequence
atgatcttcctttatcaagtcgttcattttatcttgttcacaagcgtctcaggcgagtgcgttacacagctgctcaaagacacttgctttgaaggaggcgatataactaccgtgttcacaccaagcgccaaatactgccaggttgtgtgcacatatcaccccaggtgtctgttgttcacattcactgctgaatcaccatctgaggatcctaccagatggtttacctgtgttctgaaggacagcgtgaccgaaactctgccccgcgtcaatagaactgcagctattagtggttactccttcaagcaatgcagtcaccagattagtgcctgcaacaaggatatttacgtggatcttgacatgaaaggaatcaattataactccagcgtcgctaaatcagcccaggaatgccaggagcgttgtacagacgacgtgcactgtcacttcttcacttatgcaacacgtcaattcccctcactggagcatcgtaacatatgcttgctgaagcatacccagaccggaacaccaaccaggatcaccaaactcgataaagttgtctcaggtttctctctcaagtcttgcgcccttagcaatctggcttgcattagggatattttcccaaatacagtctttgccgatagtaatatcgactcagttatggctccagacgccttcgtgtgcggccgcatctgtacacatcaccccggctgccttttcttcacattcttcagccaggaatggcctaaggaaagtcagaggaacttgtgcctcttgaagacctctgagtccggattgccctctactcgtatcaagaagtcaaaggcattgagcggcttttcattgcagtcctgtagacatagcatcccagttttctgtcacagctccttctatcatgacaccgatttccttggagaggagctcgacattgtcgcagccaagagccatgaggcctgtcaaaaactgtgtaccaacgcagtgagatgtcagtttttcacttacactcctgcacaggcttcatgcaacgaaggtaagggcaagtgttacctcaaactgagcagtaatggctctccaaccaagatcctgcacggtaggggaggaatctcaggatataccctgagactgtgcaaaatggacaacgagtgcactaccaagatcaagccacgtattgtcggaggcaccgccagcgtgcgcggtgaatggccatggcaggttactctgcacaccacctcaccaacacagcgccatttgtgtggtggatctatcattggcaatcagtggattctgactgctgctcactgcttttatggagtggagagtcccaagattctgcgcgtgtactccggaattctcaatcagagcgagatcaaggaggacacctcattttttggcgttcaggagatcatcatccatgatcagtacaagatggccgaatccggttacgacattgcccttcttaaattggagactaccgtgaactacaccgactcccagcgtcctatctgcctcccttccaagggtgatcgtaacgtgatctataccgactgttgggtcacaggatggggataccgtaagctgagggacaagattcagaacactctgcagaaagccaagatccctctggtcacaaacgaagaatgccaaaagcgttaccgcggacataagatcacccacaaaatgatttgtgccggatacagagagggaggaaaggacgcttgtaagggagatagtggcggtccactcagctgcaagcacaacgaagtctggcacctcgtaggaattacatcctggggcgaaggttgcgctcagagggagaggcctggcgtttacaccaatgtcgtggagtacgttgattggattctcgaaaaaactcaggcagtt

SEQ ID NO: 2037 - DNA, 1875 bp, Artificial Sequence
  derived and/or modified sequence
atgatatttttgtatcaggtggttcactttatcttgtttacgtccgtgtctggggagtgtgtgacgcaacttctgaaggatacctgtttcgaagggggggatattacgacagtctttacacctagcgctaaatactgtcaggtcgtatgtacatatcatccaagatgccttctgttcacctttacagctgagtctccatctgaggaccctactcgctggtttacttgcgttctgaaagattcggtgaccgagactctgcctagagttaaccgcaccgctgcgatcagtggatactcctttaaacagtgttcccaccagatttcggcttgcaataaagacatctacgtggatctcgacatgaaagggatcaactacaactctagcgttgctaaatctgcccaggagtgccaggagcgctgtacggacgacgtacactgccatttttttacatacgctacacggcagttcccttcgctcgaacacaggaacatttgcctgctgaagcacactcagactgggacaccaactcgtattactaagctagataaagtggtgtccggcttctcattaaagtcatgtgccctgagtaacttggcctgcatccgcgacatattcccaaacaccgtgtttgcggacagcaatatcgatagtgtgatggctccagatgcttttgtgtgcggaagaatttgcacacatcacccgggatgtctgttctttacatttttttcacaggagtggccaaaggaatcccaacgcaatctatgcctgctgaagacaagcgaatccggcctgcccagtacacggataaaaaaaagcaaggcactgtccgggttcagcctccagtcgtgtcggcatagcatcccagtcttctgccattcgtcattctaccacgacaccgactttctaggggaagagctcgacatcgtggctgcaaagtcccatgaagcctgtcagaagctctgtactaacgcggtgcggtgccagttctttacatacacgcctgcgcaagcatcatgcaacgaaggtaaagggaagtgttatctgaaactgtcgagtaacgggtcccccactaagatcctgcacggccggggggggatttcaggctatactctccgactgtgcaagatggacaacgagtgcaccacgaaaattaaaccacgcattgtgggggggacagcaagtgtgcgcggagagtggccttggcaggtgactttgcataccacgtcaccaacacagaggcatctctgtgggggaagcataattggcaaccagtggatactcacagctgcacactgcttctacggtgtggagtcgcccaaaattttgagggtgtatagtggcatcctcaaccagtccgagataaaggaggacacctcattttttggagtgcaggagatcatcattcacgatcaatataaaatggccgaatccggatatgacattgctcttctcaagttggaaactacggtgaattacacagacagtcagaggccaatatgtctcccttccaagggtgatcgtaacgtcatttacactgattgctgggtgacagggtggggatatagaaagctgcgagacaaaattcaaaatacactgcaaaaggccaaaattccgctggtgaccaatgaggagtgtcaaaagcgatatcgaggccacaagattacacacaaaatgatctgcgctgggtatcgggagggcgggaaggacgcctgtaaaggcgacagcggaggcccgctctcttgtaaacataacgaagtgtggcacctagttgggattactagttggggtgagggatgcgcccagagggagaggccgggcgtgtacactaacgtggttgagtacgtagactggatcctggaaaagacccaggcagtt

SEQ ID NO: 2038 - DNA, 1875 bp, Artificial Sequence
  derived and/or modified sequence
atgatatttctgtaccaagtcgttcactttattctcttcacgagtgtttccggcgagtgcgtgacacagttactgaaggatacctgtttcgaggggggggacattaccaccgtctttacgccatctgccaagtattgtcaggttgtgtgcacttatcacccaaggtgtcttcttttcacatttaccgcagaatccccctctgaggatcctactaggtggttcacttgcgtcctcaaggactcagtaacagaaacgctgccgcgtgttaatcgtactgcagctatttctgggtactcatttaagcagtgtagccaccagatcagcgcctgtaacaaggacatatacgtggatcttgacatgaaagggataaactataacagctcagttgccaaatccgcccaggaatgtcaagagagatgtaccgatgatgtgcactgccatttttttacgtacgccacccgccagtttcccagcctggagcatcgcaacatatgtctcctgaagcacacccagaccgggacccctacgcgaattaccaagctcgacaaggtagtgtcaggattttccctgaagtcctgtgccctgtctaatctggcctgtatcagggacatcttccccaacaccgtttttgctgattctaacattgatagcgtcatggctcccgatgcatttgtctgcggccgcatttgcacacatcatccagggtgtctgttcttcaccttttttagtcaggaatggccaaaggaaagccaaagaaatctgtgtctactgaagacaagcgagagtggcctccccagtactcggatcaagaagtccaaggctctttcaggcttcagcctgcagtcgtgcaggcactctatacctgtgttctgtcactccagcttttaccatgatacagatttccttggtgaagagctcgatattgtggcggcgaagtcccacgaggcgtgccagaaactgtgcaccaacgcagtgaggtgccaattctttacatacactcccgcgcaggcaagctgcaacgaaggaaaggggaagtgttacctgaaactgagttccaacgggtcgcccactaagatcctgcatggccgcggtggaatatccggatatactcttcgcctgtgcaagatggataacgaatgtaccaccaagatcaagccaaggatcgtagggggcaccgcttcagtaaggggagagtggccgtggcaggtgacactccataccacgagccccacccaaaggcatctttgtgggggttccatcatcggtaatcagtggatcctaacagccgcccattgtttttatggcgtcgaatcccctaaaatcctgcgcgtgtacagcgggatcctgaaccagtccgagatcaaagaagacacgagcttcttcggtgtccaggaaataataatccatgaccagtataaaatggccgaatcagggtacgacatcgcccttcttaagctggagacaacagtcaattataccgactcccagaggccaatatgcttaccttcaaagggagatcggaatgtgatatacaccgactgctgggttaccggctggggctacaggaaactgagggataaaattcaaaacaccctccagaaagccaaaatcccgttggtgaccaacgaagagtgccaaaaacgttaccgcggacacaagatcacgcacaaaatgatctgcgccggctaccgtgagggcggaaaagatgcctgtaaaggggacagcggggggcccctgtcctgcaagcataatgaggtttggcatttagtgggaatcacaagttggggggagggatgtgcacaacgcgagcgacctggagtctatactaacgttgttgaatacgtcgactggattctcgagaaaactcaagctgtc

SEQ ID NO: 2039 - DNA, 1875 bp, Artificial Sequence
  derived and/or modified sequence
atgatctttctgtaccaagtcgtccactttatactgtttacttccgtgtcaggggagtgtgtgactcagctgcttaaggatacgtgcttcgaaggtggagatatcaccactgtgttcaccccatcagcaaaatactgtcaggtcgtctgcacttaccacccgagatgcctgttgttcacctttactgcagaatcgccatcagaagatcctactcggtggtttacttgtgtgctgaaggattccgtgaccgaaacccttccccgagtaaatagaacggccgccatctccgggtactcctttaagcaatgttcgcatcaaatatcggcatgtaacaaggacatctatgttgacctggatatgaagggtatcaactacaattcgagcgtggcaaagtctgctcaagagtgtcaggaacggtgtactgatgacgtacactgccacttctttacgtacgccacccggcagtttccttcacttgaacacagaaacatttgcctgctgaaacatacccaaaccggaaccccaactaggattacgaaacttgacaaggtcgtgtcgggattctcattgaaatcgtgtgcactctccaaccttgcatgtataagggatatctttcctaatactgtgtttgcggattcgaacattgacagtgtgatggcgccggatgcattcgtctgcggaagaatttgtacccatcaccccggctgtctctttttcacctttttctctcaggagtggcccaaggaatcccaacgtaatctgtgcctgctcaagacttccgagtctggtctgccctccacgcgcattaagaaatccaaggcgctttcaggattttccctccagagctgccgacacagcattcctgtgttttgccattcaagtttctaccatgacaccgattttcttggggaggagctcgacattgtggccgctaagagccatgaggcatgtcagaagctctgcaccaacgcagtccgctgccagtttttcacgtatactcctgcccaagcctcctgtaatgaaggcaagggaaagtgctacctgaagttgtcgtcgaatgggtcgccaactaaaatcctgcatggacgcggcggtatctcgggctatacccttagactctgtaagatggataatgaatgtaccaccaagattaagcctaggatagtgggcggcactgcgtcggtccgtggcgaatggccttggcaagtgaccctgcacactacctcgcctactcaaaggcatctttgcggtggttccataatcggcaaccagtggattcttaccgcagcacactgcttttacggagtggaaagtccgaagattcttagggtgtacagcggtatcctcaaccaatccgagataaaagaagatacgtcctttttcggtgtgcaagagatcattattcatgaccaatacaagatggcagaatcgggatacgacatcgcactcctcaaactcgaaaccaccgtaaactacaccgatagccaacgcccgatttgtctgcccagcaagggtgataggaacgtgatttacaccgactgttgggtcaccggttggggatacagaaaacttagagacaaaatacagaacacccttcaaaaggcaaagatcccactggtgactaatgaggaatgtcagaaacgctataggggtcataagattactcacaagatgatttgcgcaggataccgggaggggggaaaggatgcctgtaagggagattcaggcgggccactgtcgtgtaagcataacgaagtttggcatcttgtgggaattacgtcctggggagaaggctgtgctcaacgcgaaagacccggggtctacactaacgtggtggaatacgtcgattggattcttgagaaaactcaggcagtg

SEQ ID NO: 2040 - DNA, 1875 bp, Artificial Sequence
  derived and/or modified sequence
atgatattcttgtaccaggtagtacacttcattttgttcacctccgtctccggcgagtgtgtgacacaacttctaaaggacacctgtttcgaggggggtgacattactacagtatttacgccaagtgctaaatattgtcaggttgtttgcacctaccatccaaggtgtctgctttttacattcaccgcggagagcccctccgaagaccctactagatggtttacctgtgtcctcaaagatagcgtaactgaaacacttccacgagtgaatcggactgccgcaatcagtggctatagtttcaaacaatgtagccaccagattagtgcatgtaacaaggatatctacgtcgacctggacatgaagggaataaattataactccagtgtcgctaaatccgcccaggagtgtcaggagagatgtactgacgatgtgcactgccatttcttcacctatgctacgagacaatttccctctctcgaacatcgtaatatatgccttttgaagcacacccagaccggcacacctacacggataacaaaattagacaaggtcgtctctgggttcagcctaaaatcttgcgccttgtccaatctggcatgcattagggacatctttcccaacaccgtttttgcggattccaatatcgatagcgtgatggcacccgatgccttcgtttgcggaaggatttgtactcaccaccccggctgtctattctttacattttttagccaggaatggccaaaagaatcgcagagaaacctgtgcctgctcaagacatcagaatccggactgccatccactcgcattaagaaatctaaagcgctgtcggggttctccctgcagtcctgcagacactctatacctgtgttctgccactcttcattctaccacgataccgacttcctaggcgaagagctagatattgttgccgccaagtctcacgaagcttgtcaaaaactgtgcactaacgccgttcgctgccagtttttcacatacacaccagctcaggcctcctgcaatgaggggaaggggaagtgctatctgaaactgtccagtaacggctcgccgacgaagatcttacatggccgtgggggcatatcagggtacacacttcggctctgtaagatggataacgaatgtactacaaaaatcaaaccccgtatcgtaggcggtaccgcctccgtccggggtgagtggccatggcaggtgactctacacaccaccagccccactcagaggcacctgtgcggcgggtctattatcggaaaccaatggatcctgaccgcagctcattgcttctatggagtggagtctcccaaaatactgagggtctactccggaatactaaatcagagtgaaattaaggaggacacatctttcttcggcgttcaggagattattatccatgaccagtacaaaatggcagaatctggttatgatatagcccttctcaagctcgaaaccaccgtgaattataccgactctcagagaccaatctgcctccccagcaaaggcgaccgcaacgttatttatacagactgttgggttaccgggtggggatataggaagttgagagacaagatccaaaatacactccagaaagctaagatcccgctcgtcactaatgaggagtgtcagaagcgataccgcgggcataaaattacccacaagatgatctgtgctggctacagagaaggcggtaaggacgcttgtaagggagattcggggggcccccttagctgcaagcacaatgaagtctggcacctggtcggaatcacatcatggggtgagggatgcgcgcagagggaacggcccggagtgtataccaatgtagtcgagtatgtggattggattctggaaaaaacacaggccgtt

SEQ ID NO: 2041 - DNA, 1875 bp, Artificial Sequence
  derived and/or modified sequence
atgatttttctctatcaggtggtgcacttcattctgttcacatctgtctctggggaatgtgtcacacaacttttgaaagatacgtgttttgaaggaggcgacataacgacagtctttacgccaagtgccaaatattgtcaggtggtatgtacttaccatcctagatgtttattgtttacattcacggctgaatccccaagcgaagatccgaccagatggttcacgtgtgtgctgaaagatagcgttacggaaacgctaccgcgtgtaaatcgcaccgctgcgatttctggatattcgtttaaacagtgctctcaccagataagcgcgtgcaacaaagatatttatgtggaccttgatatgaaaggaattaattacaattcctctgtagccaaatcagcccaagaatgccaagaaagatgtacagacgatgtacattgccatttttttacctatgcaacacgccaatttcctagcttagaacataggaatatctgcctgcttaaacacactcagactggaacaccaacaaggattaccaagcttgataaagtggtgagcggatttagccttaaatcttgtgctttaagcaatttggcgtgtattagagatatttttccgaataccgtctttgcagacagcaatattgattctgtgatggcaccagatgcttttgtttgtgggaggatttgcacccaccatcctggatgtctgtttttcactttcttttcacaggaatggccgaaagaaagccaaaggaatctgtgtctcctcaaaacgtctgaatcgggcttaccttctactagaattaaaaaaagcaaagctctgtccggctttagcttgcagtcatgccgccactctattccagttttttgtcactcctccttctaccatgacactgattttcttggtgaagaattggatatcgttgcagccaagtcccacgaagcgtgccaaaaattatgcacgaatgcagtgcgctgccaattcttcacctacacgccggcccaggccagctgcaatgaaggtaagggtaaatgttatcttaagttgtcatctaacggcagtccgacgaagatcctccacggacgtggcggcatctctggatacacgcttcgtctgtgtaaaatggacaatgaatgtacgacaaaaattaaacctcgcattgttggcggtacggcctcagttagaggagaatggccctggcaagtaacactccacactacttctcctacacagagacacttatgcggtggcagcattattggcaatcagtggatcctcactgcggcgcattgcttttacggcgtagaatctcctaagattctgcgtgtgtatagtggcatccttaatcaaagcgaaattaaagaagacacatcattttttggagttcaggaaattattatccatgatcagtataagatggcggagtcaggatacgatattgccttacttaagctcgaaacaactgtcaattatacagacagtcaacgaccaatctgccttccgtctaaaggggacagaaacgtcatttatacagattgttgggtcacaggctggggatatcgcaaactgcgggacaaaattcaaaacactctgcagaaggcaaaaatccctcttgtaaccaacgaagaatgtcagaagagatatcggggacataagattacacataaaatgatatgcgccggatatcgcgaaggcggcaaagatgcttgcaagggcgactctggcgggccgctgtcgtgcaaacataatgaagtatggcatctggtgggcattacgtcatggggggaaggatgcgcacagagagaacgtccgggagtctatactaatgtcgtcgaatatgttgactggattcttgaaaaaacccaggctgtt

SEQ ID NO: 2042 - DNA, 1875 bp, Artificial Sequence
  derived and/or modified sequence
atgattttcctctaccaggtggtgcacttcatcctcttcacttcagtctcgggcgagtgcgtgactcaactgctcaaagacacctgtttcgaaggaggagatattactaccgtgttcacccccagcgccaagtactgccaagtggtgtgcacctaccacccacggtgcctcctgttcactttcactgccgaatcaccgagcgaggacccaaccagatggttcacttgtgtcctgaaagattcagtcacggaaaccctgcctcgggtcaaccgtacggccgcgatctcgggctattccttcaagcagtgcagccatcaaatcagcgcctgtaataaggacatttacgtcgacttggacatgaaaggcatcaattacaattcatcagtcgctaagtcagcacaggagtgtcaagaacggtgcactgacgacgtgcattgccacttcttcacgtacgcgacccgtcagttcccttcgcttgagcaccgaaacatctgcctgcttaagcacactcaaactggaactccgacccggatcaccaagctggacaaggtggtcagcggattcagcctgaagtcatgcgctctctccaacctggcgtgtatccgcgacatatttcccaatactgtgttcgcggattccaacatcgactccgtgatggccccagacgccttcgtgtgtggacgcatctgtacccaccaccctggatgtctcttctttaccttcttctcgcaagaatggccgaaggaaagccagcgcaatctgtgcctgctcaagacctcggagtccggcctgccgtcaacccgcatcaagaaatccaaggctctgagcggtttttctctgcaaagctgtaggcactcgatcccggtgttctgccactcatcattctaccacgacacggactttctgggcgaggagctggacatcgtcgccgcgaaatcacacgaagcctgccagaaactttgcaccaatgccgtgaggtgccaattcttcacttacactccggcgcaagcatcgtgcaacgagggaaagggaaagtgctatctgaagctctcgtcgaatggatctccgactaaaatcttgcacggcagaggaggcatttccggatacactctgcgcctgtgcaaaatggataatgaatgtacgaccaaaatcaagccgcggatcgtgggaggaactgcatcggtgcgcggtgaatggccgtggcaagtgactctgcacaccacctcgcccactcaacgccacttgtgtgggggatcgatcatcggaaatcagtggatcctgactgcggcccattgtttttacggggtggagtccccaaagatcctgcgggtctactcggggattctcaatcagtccgaaatcaaggaagatacttcctttttcggagtgcaggagattatcatccatgatcaatacaagatggcagaatcgggctacgatatcgcgctgctgaagctcgagactaccgtgaactacactgactcgcagcggcccatctgcctgccttcgaagggtgaccggaacgtcatctacactgactgctgggtgactgggtggggatacagaaagctgagagataagatccagaataccttgcagaaagccaagatcccgctggtcaccaacgaagaatgccagaagaggtaccggggacacaagatcacgcacaagatgatttgcgcgggataccgcgaaggagggaaagatgcctgtaagggagactccgggggccccctgtcgtgtaaacacaatgaagtttggcatctggtgggaatcacctcatggggcgaggggtgcgcgcagcgcgaaagacctggtgtttacaccaacgtcgtcgagtacgtcgactggatcctcgaaaagacccaggccgtg

SEQ ID NO: 2043 - DNA, 1875 bp, Artificial Sequence
  derived and/or modified sequence
atgatcttcctgtaccaagtggtgcatttcatactgttcacttccgtgagtggagagtgtgtgactcaactccttaaggatacgtgttttgaagggggcgatattactaccgtgttcacgccttcggcaaagtattgccaagtggtgtgcacttaccaccctcgctgtcttttgtttacctttacggcagaatccccctcagaagatcccactagatggtttacgtgcgtccttaaagatagcgtcacggaaaccctcccgcgtgtgaatagaactgcagcaatctccggatactcttttaagcaatgtagccatcagatatcggcatgtaacaaggacatttacgtcgacctggatatgaagggtattaactataactcgagcgtcgcaaaatccgcccaagagtgccaagagcgatgtactgatgacgtgcactgtcactttttcacgtacgcaacccgccaatttccatcgctcgaacatagaaatatctgccttcttaagcatacccaaactggaacgccaaccagaatcaccaagttggacaaggtggtgtcggggttttccctgaaatcatgcgcattgagcaacctggcctgtattcgcgacatttttccaaacactgtgttcgcggactcgaatatagattcagtgatggctcctgatgcctttgtttgtggacgcatctgtactcatcatccgggctgtctctttttcacctttttctcccaggaatggcccaaagaatcccaacgaaacctgtgtttgttgaaaacttctgaatcaggacttccttcgactcgcataaagaagtccaaagcgctgtctgggttttcacttcaatcctgtagacatagcatccctgtcttttgtcacagctcgttttaccacgataccgatttcctcggggaagaactggatattgtggcagccaaatctcatgaagcatgtcagaaactgtgtaccaacgcggtcaggtgccagttctttacgtacaccccggcacaggcttcctgcaacgagggaaagggaaagtgttacctgaaactgtccagcaatggatccccgactaagatactgcatggacggggaggaatctcgggttacactcttagactttgcaaaatggacaacgaatgtaccaccaaaatcaagccacggattgtgggagggaccgcctccgtgcgtggtgagtggccatggcaggtgactcttcacactacctcgccaacccaaagacatctttgcggtgggtcgatcattggaaaccagtggatccttactgcagcgcattgtttctacggagtggagtctccaaagattcttcgagtctactccggcattcttaaccaaagcgagataaaggaggataccagcttttttggggtccaggaaatcatcatccacgatcaatacaaaatggcggaatcgggttacgatatcgccctcctgaaactcgaaaccacggtcaattacactgattcgcaaagaccaatctgccttcccagcaaaggagacagaaacgtgatttacaccgattgctgggtcaccggctggggataccggaagctccgggacaaaattcaaaatacccttcagaaggcaaagatccctctggtgactaacgaagagtgtcagaagagataccgagggcacaagattactcacaagatgatctgtgcgggctacagagaaggggggaaagatgcctgcaagggtgacagcgggggacctctgagttgcaagcacaatgaggtctggcacttggtgggaatcacgagctggggcgagggatgtgctcaacgagaacgtcccggcgtctacactaatgttgttgaatatgtggactggatactggaaaagactcaagcagtg

SEQ ID NO: 2044 - DNA, 1875 bp, Artificial Sequence
  derived and/or modified sequence
atgatctttctttatcaggttgtacatttcatcctatttacatccgttagcggcgagtgcgttacccagctgctgaaagatacatgtttcgagggtggagatataaccacagtgtttacgccctccgccaaatattgtcaggtggtttgcacgtaccaccctcggtgcctgctgtttacctttactgctgagtcgccctcggaggatcccactcgatggtttacatgcgttcttaaagacagcgttactgagaccctcccccgtgtgaatcggaccgctgccattagcggttatagttttaaacaatgttcccaccagatcagtgcgtgcaacaaggacatttacgtggatctcgatatgaagggcataaactacaattctagcgtggctaaaagtgctcaggagtgccaggagcgctgcacagacgatgttcactgtcacttcttcacctatgctacccggcaatttccatccctggagcacagaaacatatgtttgctgaaacacacccaaaccgggacacctactcgcatcaccaagttagataaggtggtctcgggtttctcactgaagagctgtgccctgtccaacctggcatgcatcagagatatttttccgaatactgtgttcgcagatagcaatatcgattcagtgatggcccctgatgcattcgtctgtggcaggatatgcacccatcatcccgggtgtctgttctttacattctttagtcaggagtggcccaaggaatctcagcgtaacctatgtctgctgaaaacctcggaaagcggtctgccttcaacacgaattaagaagagcaaagccctgtccggcttcagcctgcagtcctgccggcatagtattccagtattttgtcattcctccttctatcacgacaccgactttctgggcgaggaacttgacatagtggctgctaagtcacacgaggcttgtcagaaactatgtacaaacgcagtgcgctgccagttcttcacttataccccagcccaagcatcttgcaacgaagggaaggggaagtgctatctgaagttgagcagcaacggcagcccaactaagatcctccacggccgcggcggcatctctggatacacgctccgactgtgcaagatggataacgaatgtactacaaagatcaaaccaaggatagtagggggaaccgcgtccgtaagaggggagtggccatggcaggtgactctgcatactacgtcacccacccagcgccatctgtgcggaggtagcatcattggcaaccagtggatattaacagccgcacactgcttctacggagtagagagccccaaaattctaagagtgtattcgggaatcttgaaccaaagcgagataaaagaggatacttcattcttcggagtgcaggagattattattcacgaccagtacaaaatggcggaaagtggctacgacattgcattattgaaactcgagacaaccgtaaactatactgactctcagcgtcccatttgcttgccatcaaaaggggacaggaacgtgatctacacagattgctgggtgacagggtggggctataggaaattgagagacaagattcagaacacactgcagaaagcaaagattccccttgttactaatgaggaatgtcagaagagatatcgagggcacaagatcacacacaaaatgatttgtgccgggtacagggaggggggcaaagatgcctgcaaaggggactcagggggccccttgtcatgcaagcacaacgaagtttggcacctagtcggaatcactagctggggagagggatgtgcccagagagaaagaccaggtgtctatacgaacgttgtagaatatgtggattggatactcgaaaagacacaagctgta

SEQ ID NO: 2045 - DNA, 1875 bp, Artificial Sequence
  derived and/or modified sequence
atgatattcctttatcaagtcgttcatttcatcctgttcacctccgtttctggcgaatgtgtcactcagttgctgaaggacacatgtttcgaaggcggggacattaccacggtctttacgccctccgccaagtactgtcaggtggtgtgcacctaccatcctcggtgtctcctgttcactttcacagcagaaagcccttcggaggatcctacacgatggttcacgtgcgtgctgaaagattccgtgacagagaccctaccacgagttaacaggacagcagccatctctggctatagcttcaagcagtgctctcatcaaatctcagcatgtaacaaggacatttacgttgacctggacatgaagggaataaactacaacagttccgtggcaaagagcgctcaagagtgccaggagagatgtacagatgatgtgcactgccatttttttacgtatgccactcgccagttcccatctttagaacaccgaaatatctgcctcttgaaacacacacagaccggcacacctacgagaattaccaaacttgataaggtagttagcgggttcagtttgaaatcttgtgctttgtcgaatctcgcttgcatacgtgatatctttccaaatacagtgtttgctgactccaacatagattccgttatggcaccagacgctttcgtctgtgggcggatttgcacacaccacccaggctgcctcttcttcacttttttctcccaggaatggccaaaggagagccagcgaaatctctgcctactgaagacttccgagagtggactcccatcaacccgaattaaaaaatctaaggctctctccggctttagcctgcagtcgtgtagacactccattcccgttttttgccattcctctttctaccacgacactgacttcctgggcgaagagctagacatagtagccgcgaagagtcacgaggcctgtcaaaagctttgtaccaatgctgtaagatgccagtttttcacttacactccggcacaagcatcatgcaacgaaggcaaagggaaatgctacctgaaactgtcgtccaatggaagcccaaccaagatcctacatggaaggggggggatttccggctacaccttgagattgtgtaaaatggataatgaatgtaccactaagatcaaaccgcgtatcgtcggtggtactgcgtctgtgagaggggagtggccatggcaggtgacgttacatacaacaagtccaacgcagcgacatctgtgcggagggtctatcataggaaatcagtggatcctgacggcagcccattgtttctacggcgtggaatcaccaaaaattctgcgggtatacagcggcatccttaatcaatctgaaattaaggaagacacttcgttcttcggcgtacaggagattattattcacgaccagtataaaatggccgagagtggatatgatattgcgctgctcaagttagagactacggtgaactacaccgattctcagcgacccatatgtctgcctagcaagggcgatcgaaatgtgatttacaccgactgctgggtaactggctggggatatagaaaactcagggacaagatccagaacacattacaaaaggcgaaaatccccctcgtcaccaatgaggagtgtcagaaacgataccgcggacacaagatcacccacaaaatgatctgcgccggctaccgggagggtggcaaggatgcttgtaaaggcgatagcggcggtcctctctcttgcaagcataacgaagtgtggcacctggtcggaattacgtcctggggggaaggctgtgctcagagagagcgaccgggggtgtacaccaatgtggtggaatacgtggattggattttggagaaaacccaggcagtg

SEQ ID NO: 2046 - DNA, 1875 bp, Artificial Sequence
  derived and/or modified sequence
atgatatttctgtatcaggttgtccacttcatcctattcactagcgtgagcggagagtgcgttacccagctgctgaaagacacctgctttgaaggtggggacatcaccaccgtctttaccccttccgccaagtactgccaggtggtgtgtacctaccaccctcggtgtctgttattcactttcaccgctgagagtccgtccgaggatccaactagatggttcacttgtgtgcttaaagacagtgttacggaaacactgccaagggtcaatcgaaccgctgcaatttctggctatagcttcaagcagtgcagtcaccagatatctgcgtgcaataaggacatttatgtggatctggacatgaaagggatcaactacaacagtagcgtggctaagagtgcacaggagtgtcaggaacgatgcactgatgatgtacactgccacttttttacgtacgcaacacggcagttcccttcacttgagcatagaaacatttgcctgctgaagcacacccagacaggcactccgactcggatcacaaagctcgacaaggtagtgtcaggattttctcttaagtcttgtgcactctccaatctagcatgcattcgggatattttcccaaacaccgtgtttgccgacagcaatatcgactctgtgatggcccctgacgctttcgtctgtggacgcatctgcacccaccaccccggctgcctcttctttacgtttttctcccaggaatggccgaaggagagccagagaaatctgtgcctcctgaaaacaagcgaatccggcctgcccagcacccgcattaagaagagcaaagctctaagtggtttctctcttcaatcttgtagacattccatcccggtgttttgccacagttccttctaccacgataccgatttccttggcgaagaattggatatcgttgccgcaaagagccacgaggcctgccaaaaactgtgcacaaacgccgtgaggtgccagttttttacttacactcctgcccaggcttcctgtaatgaggggaagggtaagtgctatctcaagctgtcctccaacggaagcccaacgaagatcctgcacggtcgcggaggaatcagcgggtacactttgcgtctctgcaaaatggacaatgaatgcacaacaaagattaagcccaggattgttggaggaactgccagtgtgcggggagaatggccgtggcaggtgacgcttcatacaaccagccccactcaaagacatctttgcggggggagtattatcggcaatcaatggattcttaccgctgcccattgtttttacggtgtggagtcccccaaaattcttagagtctactctggcattctgaatcagtcggagattaaggaagacaccagctttttcggagtacaggagattattatccacgaccagtacaaaatggcggaaagtggatacgatatcgctctgctcaagctggagacgacggttaattatactgactctcaacgacccatttgcctgccttcgaagggggacaggaatgtgatttacacagattgttgggtcaccggatggggctatagaaaactgcgagataaaatccagaacactttacagaaggccaagataccactcgtgaccaacgaagagtgccagaaacgctatcgaggccataagatcactcacaaaatgatatgtgccggctatcgcgagggagggaaagatgcatgtaagggagatagcggaggtcctttgtcctgtaagcataatgaagtgtggcatctcgtagggatcacaagctggggggagggttgtgcgcaacgcgagaggcccggagtttacaccaatgtggtggaatatgttgattggatcctagagaaaacacaagcagta

SEQ ID NO: 2047 - DNA, 1875 bp, Artificial Sequence
  derived and/or modified sequence
atgatatttttatatcaagtagtacattttatactatttacgtcggtttcgggtgaatgtgtaacgcaattattaaaagatacgtgttttgaaggtggtgatataacgacggtatttacgccgtcggcgaaatattgtcaagtagtatgtacgtatcatccgcgttgtttattatttacgtttacggcggaatcgccgtcggaagatccgacgcgttggtttacgtgtgttctaaaagattcggtaacggaaacgctaccgcgagttaatcgaacggcggcgatatcgggttattcgtttaaacaatgttcgcatcaaatatcggcgtgtaataaagatatatatgttgatctagatatgaaaggtataaattataattcgtcggtagcgaaatcggcgcaagaatgtcaagaacgttgtacggatgatgtacattgtcatttttttacgtatgcgacgcgacaatttccgtcgttagaacatcgtaatatatgtttattaaaacatacgcaaacgggtacgccgacgcgtataacgaaattagataaagtagtatcgggtttttcgttaaaatcgtgtgcgctatcgaatttagcgtgtatacgtgatatatttccgaatacggtatttgcggattcgaatatagattcggtaatggcgccggatgcgtttgtatgtggtcgaatatgtacgcatcatccgggttgtctattttttacgtttttttcgcaagaatggccgaaagaatcgcaacgaaatctatgtttattaaaaacgtcggaatcgggtctaccgtcgacgcgaataaaaaaatcgaaagcgttatcgggtttttcgttacaatcgtgtcgacattcgataccggtattttgtcattcgtcgttttatcatgatacggattttttaggtgaagaactagatatagtagcggcgaaatcgcatgaagcgtgtcaaaaactatgtacgaatgcggtacgatgtcaattttttacgtatacgccggcgcaagcgtcgtgtaatgaaggtaaaggtaaatgttatctaaaattatcgtcgaatggttcgccgacgaaaatactacatggtcgtggtggtatatcgggttatacgttacgtctatgtaaaatggataatgaatgtacgacgaaaataaaaccgcgtatagtaggtggtacggcgtcggtacgtggtgaatggccgtggcaagtaacgttacatacgacgtcgccgacgcaacgacatctatgtggtggttcgataataggtaatcaatggatactaacggcggcgcattgtttttatggtgtagaatcgccgaaaatattacgtgtttattcgggtatattaaatcaatcggaaataaaagaagatacgtcgttttttggtgtacaagaaataataatacatgatcaatataaaatggcggaatcgggttatgatatagcgctattaaaattagaaacgacggtaaattatacggattcgcaacgtccgatatgtctaccgtcgaaaggtgatcgaaatgttatatatacggattgttgggtaacgggttggggttatcgaaaattacgagataaaatacaaaatacgctacaaaaagcgaaaataccgctagtaacgaatgaagaatgtcaaaaacgatatcgtggtcataaaataacgcataaaatgatatgtgcgggttatcgagaaggtggtaaagatgcgtgtaaaggtgattcgggtggtccgttatcgtgtaaacataatgaagtatggcatctagtaggtataacgtcgtggggtgaaggttgtgcgcaacgtgaacgtccgggtgtttatacgaatgttgtagaatatgttgattggatactagaaaaaacgcaagcggta

SEQ ID NO: 2048 - DNA, 1875 bp, Artificial Sequence
  derived and/or modified sequence
atgatctttctgtatcaagttgtccatttcattttattcacatctgttagtggagagtgtgtaactcaacttctgaaagatacttgctttgagggaggggacatcacaaccgtgtttaccccatctgctaaatactgccaggtggtgtgcacataccaccctcgctgcctcctcttcaccttcacagcagaaagcccgtccgaagacccgacgagatggtttacatgtgtgttgaaagactccgtgaccgaaacccttcctagggtgaaccgcacagccgccattagcggctacagcttcaagcagtgtagccatcagattagcgcttgtaacaaagatatctacgtggacttagatatgaaaggcattaactataatagctcagtggctaaaagcgcccaggaatgtcaggaaaggtgtactgatgacgttcactgtcattttttcacatacgccacccggcagttcccctccctggagcaccgcaatatctgcctactgaagcacacacagaccggcacccccacgagaatcacaaaactcgataaggtggtctctggcttttctctgaagtcttgcgccctttccaatttagcctgcattcgtgacattttccctaatacagtatttgcagactctaacatagacagcgttatggcccctgatgccttcgtgtgcggacggatttgcacacaccatcctggatgcctattcttcacatttttttcacaggaatggcccaaggagtctcagcgaaatttgtgcctcttaaaaacaagcgaatcaggccttccatctacccgcatcaaaaagagcaaggctctgtctggtttctctctgcagagctgtcgacatagtattccagtgttttgtcacagttcattctatcatgataccgatttcctgggagaagaactggacatcgtggcagccaagtctcacgaagcctgccagaaattgtgcaccaatgccgttcgctgccagtttttcacctacaccccagcacaagcctcttgcaatgaagggaagggcaagtgctacttgaagctgtcatctaacggtagtccgactaaaattctgcatggccggggagggatctcaggctatactctaagactatgtaaaatggacaacgaatgcacgacgaagattaaacctaggatagtcggcggaactgccagcgttagaggagaatggccctggcaggtcaccctgcacactacatctcccacccaaaggcatttgtgcggcgggagcatcattgggaaccaatggatcttaactgcagctcactgcttctacggcgtagagagccctaaaatactgagggtgtattctggcattttgaaccaatcggaaataaaggaggacactagttttttcggggtacaggagatcattatccacgaccagtacaaaatggcagaatctgggtacgacatcgcactgcttaagctcgagaccacggtgaactatacagatagccagcgccccatatgcctccctagcaaaggcgacaggaacgtcatatacacggactgctgggtaacgggctggggatacaggaagttaagagacaagattcagaataccctccagaaagctaagattcccctggtcaccaatgaggagtgccaaaagagatatagggggcacaagattactcataaaatgatctgtgccggatatcgcgaaggtggcaaagacgcatgtaagggagacagtggcgggcctctgtcctgtaagcacaacgaagtgtggcatttagtgggaataactagctggggtgaaggatgcgcccagcgggaaagaccaggagtttacacaaacgtggtggagtacgtggattggatactagagaagacgcaggcagtg

SEQ ID NO: 2049 - DNA, 1875 bp, Artificial Sequence
  derived and/or modified sequence
atgatctttctgtaccaagtcgttcactttattctctttacctccgtcagtggggaatgcgttacccagctgctcaaggatacttgtttcgaggggggcgacatcactacagttttcactccaagcgcgaagtattgccaagtggtctgcacttaccaccctagatgtttactgtttacttttaccgcagaatcccccagcgaagatcccacgagatggttcacctgcgttcttaaggattctgttacagagaccttgccccgggtgaatcgcaccgctgccatcagtggctacagctttaaacagtgtagtcaccagatcagtgcttgcaacaaggatatttatgtggacctagacatgaaaggaatcaactataatagcagcgtcgccaagtcagcccaagagtgccaggagaggtgtacagacgatgtgcactgccacttttttacctatgccacccgacagtttccaagtctggagcaccgcaacatctgcctgctgaagcacacacaaacggggacaccaactaggatcaccaaactggacaaggtagtgtccgggttttctctgaagtcctgtgccctgtccaatctggcgtgtataagggacatcttcccaaacaccgtatttgccgactctaacatcgactccgtcatggcccctgacgcattcgtctgtgggcgaatctgtacacatcatcctggctgtctgttttttacctttttctcacaggaatggcccaaggagtcacaacggaatctatgcttgcttaagacgtcggaatccggcttacccagcaccagaatcaagaaatccaaggccctcagtgggtttagcctccagtcctgtagacattccatccccgtcttctgtcactctagcttctaccacgataccgactttttgggagaagagctcgatattgtggctgcgaaaagccacgaagcatgtcaaaaattgtgtaccaacgctgtccgatgtcagttcttcacctatactcccgcacaggcgagttgcaacgagggcaaaggcaagtgctatttaaagctgagctctaacggtagtcctacaaagatcctgcacggaagaggggggatctctgggtacacattgagactctgtaagatggacaatgagtgcacaacgaagatcaagcctaggattgtgggagggactgcatccgttcggggggagtggccctggcaggtgaccctgcacactacttccccaactcagcgccacctgtgcggaggaagcatcatagggaaccagtggattttgactgctgcccattgtttctacggagtagagtcaccaaagattctcagagtgtactctgggattctcaaccagagtgaaatcaaggaggacacttccttctttggtgtgcaagaaattattattcacgaccagtacaaaatggccgagtccgggtacgacatcgctctgcttaagctagagacaacagtgaattatacagactctcagcggccaatttgcttacctagcaaaggagatcgaaacgtgatatacaccgattgttgggttaccgggtggggctacagaaagctgcgagataaaatacaaaacaccctgcagaaggctaaaattcccctggtgaccaacgaggagtgtcagaaacgctaccggggacacaagatcacacacaagatgatttgtgccggctatagagagggcggcaaagacgcgtgtaaaggagattctgggggccccctgagctgcaagcataacgaggtttggcaccttgtaggcatcactagctggggtgaggggtgtgcccagagagaacgccccggcgtatacaccaacgtggtggagtatgtggactggatcctcgaaaaaacccaggcggtc

SEQ ID NO: 2050 - DNA, 1875 bp, Artificial Sequence
  derived and/or modified sequence
atgatattcctgtatcaggtcgtgcatttcatcttgttcacttccgtctcgggagagtgtgtcactcaactcttgaaggatacttgtttcgaggggggagacatcaccaccgtgttcactccttccgcgaagtactgccaggtggtctgcacctaccatcctcggtgtctgctcttcacctttactgctgaatcaccgtcggaggaccctactcgctggttcacctgcgtactgaaggactcggtgacggagactctcccgcgtgtgaaccgcactgccgcaatcagcggctactcgttcaagcagtgctcccaccagatctccgcttgcaataaggatatctacgtcgatcttgacatgaaaggaatcaactacaattcatcggtggccaagtcggcgcaggaatgccaggagaggtgcactgatgatgtgcactgccacttcttcacttacgcaacgagacagtttccttctctcgaacatagaaacatctgtttgttgaagcacacgcagactgggacccctaccagaatcaccaagctggacaaggtggtgtccggattctcactgaaatcgtgcgcactcagcaatttggcgtgcattcgcgatatctttccaaacaccgtgttcgccgactcgaacatcgattccgtgatggccccggacgccttcgtctgtggccggatctgcacccatcatcctggctgcctgttctttaccttcttttcccaggaatggccgaaggagtcccaacggaacctgtgcctgctgaaaacttcggagagcggcctgcctagcactaggattaagaaatcaaaggcattgagcggattttccctgcagtcttgccgccattccatccccgtgttttgccacagctccttctaccacgataccgactttttgggagaggagctggacatcgtggcggcgaagtcccatgaagcctgccagaagctgtgcaccaacgccgtacgctgccaattcttcacctacactccagcgcaggctagctgcaacgagggcaagggaaagtgctacctcaaattgagctccaatggctcacccaccaaaattctccacgggcgcggcggaatcagcggatacaccctgaggctttgcaagatggacaatgagtgcactactaagatcaagccgcggatcgtgggaggaaccgcttccgtgagaggagaatggccatggcaggtgaccctccacactactagccccactcagagacatctgtgtgggggaagcattatcggaaaccagtggattctgactgctgcccactgtttctacggagtggagtccccgaagatcctcagagtgtattcagggatcctgaatcaatcagagatcaaagaagatacgtcgttcttcggcgtgcaggaaatcatcatccacgaccagtataagatggccgagagcggatacgatattgctctcctcaaactcgaaaccaccgtgaattacaccgactcgcaaaggcctatttgcttgccttccaagggtgaccggaatgtgatctacactgactgttgggtcactggctggggataccggaagctgcgcgacaaaatccaaaacactctgcaaaaggcgaagatcccactcgtcaccaacgaggagtgccagaagagatacagggggcacaaaatcacgcataagatgatctgcgcgggttacagagagggaggcaaggatgcttgcaaaggggattcgggcggaccattgagctgtaaacacaatgaagtttggcacctggtgggcatcacgtcgtggggggaaggttgcgctcagcgcgagcgcccaggtgtgtacaccaacgtcgttgagtacgtggactggatccttgaaaagactcaagcggtc

SEQ ID NO: 2051 - DNA, 1875 bp, Artificial Sequence
  derived and/or modified sequence
atgatctttttatatcaggtggttcacttcatccttttcacgtccgtgtcgggtgagtgcgtgactcagctgcttaaggatacgtgcttcgagggaggcgacataaccacagtgtttacgcccagtgccaagtattgccaggtcgtctgtacatatcacccccgctgcttgctattcactttcaccgcggagtcaccatcggaagacccgacccgatggtttacgtgcgtgctgaaggactcggtaacggagacgctgccccgcgtgaaccggactgcagcaatctcgggctacagcttcaagcagtgttcgcaccagatttctgcatgcaataaagacatttacgtcgatctggacatgaaaggaataaattataattccagtgtggctaagagcgcccaggagtgccaggagcgctgtaccgacgatgtgcactgccatttctttacatacgccacgcgccagttcccttcgcttgagcatcgcaatatttgcctgttaaagcatacgcaaactgggacccctacgagaatcaccaagttggacaaggtggtcagcggattcagtttgaagagctgcgcactttctaatctggcctgcattcgcgatatctttccgaacaccgtgtttgcagactctaacatagacagtgtgatggccccagatgccttcgtttgcggcagaatttgcacccaccatcccggatgcctgttttttacgttcttctctcaggagtggcccaaagagagtcagcggaacctgtgcttattgaagaccagcgaaagcggccttccgagtacgcgcatcaagaaaagtaaggcgctgtctggattctcgctacagagctgtcgccacagtataccagttttttgccactcgtctttctatcatgatacggatttcctgggcgaggagctggacattgtggcggccaagtcgcacgaggcatgccagaagttatgcacaaacgccgtcaggtgccagttctttacgtacactccggcgcaggcctcgtgcaatgagggcaagggtaagtgctatctgaagctgtcatcgaatggatccccaaccaagattctccatggcagaggcggcatcagtggctatacactccgcctgtgcaagatggataacgagtgcacgacgaagatcaaaccacgcatcgtgggaggtactgcttcagtgaggggcgagtggccgtggcaggttaccctgcacacgaccagtccgacgcaacgccacctgtgcggaggcagcattatcggcaatcagtggatactcacggccgcccactgtttctacggagttgagagtccgaagattctgcgtgtttactcgggaattctaaaccagagtgagataaaggaggacacgtctttcttcggagttcaggagattatcatccacgaccaatataagatggccgaatctggctatgatattgcccttcttaagcttgaaacgactgtgaattacaccgatagccagcgacccatatgcctgcctagcaagggcgaccgcaacgtgatatataccgattgctgggtaacaggctggggctatcgaaagcttcgtgataagatccagaacacgttgcagaaggcgaagattccattggtaaccaacgaggagtgtcagaaaaggtacaggggccataaaataacgcataaaatgatctgcgcgggctaccgagaggggggtaaagatgcatgcaaaggcgattcggggggccccctgtcttgcaaacataatgaggtgtggcatcttgtcggaattacctcatggggggaggggtgtgctcaacgagagcgacctggggtatacacaaacgtcgttgaatacgtcgattggatcctggaaaagactcaggccgtg

SEQ ID NO: 2052 - DNA, 1875 bp, Artificial Sequence
  derived and/or modified sequence
atgatcttcctgtaccaggtggtgcatttcatcctcttcacctcagtctcaggcgagtgcgtgacccagctgctgaaggacacgtgctttgaaggaggagacatcactaccgtattcaccccgtcagccaagtattgccaagtggtctgcacttaccatcctcggtgcctgttgttcacctttactgcggaatccccgtcggaggatccgactcgctggtttacctgcgtgctcaaggattcggtgaccgaaactctgccgcgcgttaatcgcaccgcagcgatttcgggctacagcttcaagcagtgctctcatcaaatctcagcttgtaacaaagacatctacgtggatctggatatgaaaggaatcaactacaattctagcgtcgccaagtcggctcaagagtgtcaggaacggtgtaccgatgacgtgcactgccatttcttcacttacgctacccgtcaatttcccagcctcgagcatcggaatatctgccttctcaagcacacgcaaactggaactccgactcgaatcactaaactggacaaggtcgtctccggcttctccttgaaatcctgcgcactgtcgaacctggcatgcatccgggacatcttccctaacactgtctttgcggactccaacattgattccgtgatggcccctgacgcatttgtgtgtggaagaatttgcacccaccaccctgggtgcttgttcttcaccttcttcagccaggagtggccaaaggaatctcagcgcaatctctgcctgcttaagacttccgagtccggtctgccgagcaccagaatcaaaaagagtaaggcactttccggattctcactgcaatcctgcaggcactccatcccggttttctgccactcatcgttctaccacgacaccgattttctcggtgaggagctggatattgtggccgcaaagtcgcatgaggcgtgccaaaaactctgcaccaacgcggtgcggtgccagtttttcacgtacactccagcccaggcctcatgcaatgaaggaaagggaaagtgttacctcaaactcagcagcaacggctctccgaccaagatcctgcacggaaggggcggaataagcggttatactctcaggctgtgtaagatggataacgagtgtacgactaagatcaagccaagaatcgtaggggggactgcgtcggtccgcggagagtggccgtggcaggtgactctgcacacgacctcacccacgcagcgccacctgtgcggcggatccataatcggaaaccagtggatcctgacggcagcgcattgcttctacggagtggaatcacctaagatcctccgggtgtactcgggaattctcaatcaatccgaaatcaaggaagatacttcatttttcggcgtccaagaaatcatcatccacgaccagtacaagatggcagagtcaggatacgatatcgccctcctcaaattggaaaccactgtgaactatactgactcgcaaaggccgatctgcctgcctagcaagggcgaccgcaatgtgatctacaccgactgctgggtgaccggctggggctaccgcaaactgcgtgacaaaatccagaacaccctgcagaaagccaaaatcccactggtgactaacgaagaatgtcaaaagagataccgggggcacaaaatcacgcacaagatgatctgcgccgggtaccgcgaaggaggcaaggacgcttgtaagggagactctggaggaccgctcagctgcaagcataatgaagtgtggcatttggtgggtatcacttcgtggggagaggggtgcgcccagcgagaacgccccggagtgtacaccaacgtcgtagagtacgtcgactggattctcgaaaagacccaggcggtg

SEQ ID NO: 2053 - DNA, 1875 bp, Artificial Sequence
  derived and/or modified sequence
atgatcttcctttaccaggtagtgcattttattctcttcacaagtgtgtctggcgagtgtgtcactcagctcttaaaggacacttgttttgagggcggagacatcaccacggtattcaccccttccgctaagtattgccaggttgtctgcacatatcacccgcgatgcctcttatttaccttcacggccgaaagtccttctgaggatccaaccagatggtttacatgcgtgttgaaagactccgttacagagaccctgccacgggtgaatcgcactgctgcaatatctggctactcctttaagcagtgctctcatcagatctcagcttgtaataaagacatttatgtggatctagacatgaagggaatcaattacaattccagcgtggctaaatcagctcaggagtgccaggaaagatgtaccgatgatgtgcactgtcacttctttacgtatgcgacgagacagttcccttccctggagcaccgaaatatctgcttgctgaagcatactcaaacagggactcctacaagaatcactaagctagataaggtcgtctctggtttctctctcaagtcgtgtgccctgagtaacctggcctgcattcgcgatatcttcccgaatactgtttttgcagattccaatatcgatagcgtgatggctcctgacgctttcgtgtgcgggcgaatctgtacccaccaccccgggtgtctcttcttcacctttttctcccaagagtggccaaaggagtctcaaaggaatctgtgtctcctgaagactagcgagagcggcctcccctctacgcggatcaagaagtctaaagccctgtccgggttcagtctccaatcttgtaggcattcgatcccggttttctgccatagcagcttttatcacgacacagactttttgggggaggagttggatattgtggcagcaaagagccatgaagcatgccagaagttgtgcactaatgccgttagatgtcagttcttcacttacaccccagcgcaggcttcctgtaatgaaggaaaaggcaagtgctacctgaaactgtcgtccaacggaagcccaactaagatactgcacggacggggaggcatttctggatacaccttaaggctgtgtaagatggacaatgagtgcaccactaagattaagcccagaattgtgggcggcacagcaagtgtgcgaggtgagtggccatggcaggttacattacataccacatctcccacccagaggcacttgtgcgggggctctatcatcgggaatcagtggattctgaccgccgcgcactgcttttatggggttgaaagccccaagatacttagggtgtatagcggaatcctgaaccagagtgagattaaagaggataccagtttcttcggggtgcaagaaataatcatccacgaccagtacaagatggctgaaagtggatatgatattgctctgcttaagctggagaccacagtgaactatacagactctcagagaccaatttgtctgccctcaaagggagatcgtaatgtgatttataccgattgttgggtgacgggatggggctacaggaagctgcgagataaaatccagaataccctgcagaaagctaagatccctctggtgacaaacgaggagtgccaaaagaggtacagaggtcacaagatcacacacaaaatgatttgtgccggatacagagagggcggtaaggacgcgtgtaaaggggacagcggtggccccctgagctgtaagcataatgaagtgtggcatctcgtcggcatcacatcttggggcgaagggtgcgcgcaacgcgaaaggcctggagtgtataccaacgtggtggagtatgtggattggattctagagaagacccaggcagtg

SEQ ID NO: 2054 - DNA, 1875 bp, Artificial Sequence
  derived and/or modified sequence
atgatcttcctgtaccaggtggtgcatttcatcctgtttacttcggtatctggcgagtgtgtcacacagctgctgaaggatacctgttttgaaggcggcgacatcacaacagtgtttactccaagcgctaagtattgccaagtggtgtgcacctatcaccccagatgtctgttatttactttcacagctgagtcaccatctgaagatcccaccaggtggttcacatgcgtcctaaaggactccgtcacagaaaccttgccgcgcgtcaatcgaactgcagccatatcaggatactccttcaaacagtgttcacaccagatatctgcttgtaacaaagacatttatgttgatctggacatgaaagggatcaactacaactcttctgtagccaaaagcgcccaagagtgccaggagcgatgtaccgacgacgtgcactgtcattttttcacatacgccacacggcaattccccagtctggaacatagaaacatctgtctactgaaacacacacaaacaggtaccccaacacggataacaaaactggacaaggtcgtatctggattcagtcttaagtcttgtgcattaagtaacctggcttgcattcgagatatctttccaaacactgtgttcgccgacagtaatatcgactctgtgatggcgccagacgccttcgtatgcggaaggatttgtactcatcatcccggctgtctgttttttacattcttttcacaggagtggccgaaggagtcccagcggaacctgtgccttctgaagactagtgagtccgggctgccctccacccggatcaagaagagtaaagccctgtccggattctctctgcagtcctgcagacattcaattcccgtcttttgtcactcttcattctaccatgatacggacttcctgggggaggaacttgacatagtggccgccaaatcccacgaggcctgtcagaagctgtgtacgaacgccgtcaggtgtcagttcttcacttacacccccgcccaggcctcttgcaatgaaggcaagggcaagtgctatctaaaactgtcttcaaatgggagccccaccaaaatattgcacgggcgaggcggtatttccggctatactctaaggctttgtaagatggacaatgagtgtaccaccaagatcaaaccacgaatcgttggggggacggcatccgtgcgcggggagtggccctggcaggttacactccacactacaagcccaacacagaggcacctttgcggtgggtctataataggaaaccagtggattctgactgcggcacattgcttctatggggttgaaagtccaaaaatactacgcgtttacagcggcattctcaaccagagcgagattaaggaggacactagcttcttcggagtgcaggaaatcattatccacgaccaatacaagatggcagagagtggttatgacatcgccttacttaaactggagacaactgtgaactatacggattcccagaggcccatttgtctgcccagcaagggtgaccgaaacgtgatatatactgactgctgggttacagggtggggctatcggaagctgagagataaaatccaaaacacactgcaaaaagcgaaaatacccctggtgactaatgaggaatgccagaagcggtatagaggtcacaagatcactcataaaatgatttgcgctggttacagggagggcggcaaagatgcttgcaaaggggacagcggaggacccctctcttgcaaacacaacgaagtgtggcacttggtgggtatcacaagctggggagaaggatgcgcgcagagagaacggcccggtgtatataccaatgtggtcgaatacgtggactggatactagagaagacacaggctgta

SEQ ID NO: 2055 - DNA, 1875 bp, Artificial Sequence
  derived and/or modified sequence
atgatattcctttaccaagtcgtccatttcatattgttcactagcgttagcggggaatgcgtgacccagcttctgaaggatacttgttttgaaggaggtgatatcactacggtgtttactcctagcgcgaagtactgtcaagtcgtgtgcacttaccatccaagatgcctcttgtttacttttactgccgagtccccaagcgaagatccaacccggtggtttacctgtgtccttaaggattcagtcactgaaacgttgcctagagtgaacagaaccgcagcaatcagcggatactccttcaagcagtgctcacatcagatctcggcgtgtaacaaggacatctacgtcgatctcgatatgaagggaatcaactacaactcttccgtcgcaaagtcggcgcaagagtgccaagaacgttgcactgatgatgtgcattgccatttctttacctacgccaccagacaatttccctcactggagcaccgtaacatttgtctgctgaaacacacccagaccggcacgcccacgagaataaccaagctggataaggtcgtgtcgggcttctctctgaagtcctgtgctctctccaatctcgcctgtattcgcgacatcttcccaaatacggtatttgccgacagcaacatcgattcggttatggcccccgatgcctttgtgtgtggacgtatctgcactcaccacccggggtgtctgttctttaccttcttttcacaggagtggccgaaagaatcccaacggaatctctgcctgctgaaaacttccgagtccgggctgccttctaccagaatcaagaagtcgaaggcactttccggtttttccctccaaagctgccggcattccatccctgtgttctgccattcgtcgttttaccatgatactgacttcctgggtgaggaactcgacatcgtcgccgcaaagtcgcacgaggcctgtcaaaaactttgcactaacgctgttaggtgccaattcttcacctacacccctgcacaagcatcctgtaacgagggtaagggaaagtgctaccttaagctgtcatcgaatggatcccccaccaaaatactccatggacggggcggcataagcggctacaccctccgtctttgtaaaatggataacgaatgcactactaagattaaacctagaattgtcggaggtactgcaagtgtccgcggtgagtggccatggcaggtcaccctccacaccacttcgcctacccagcgccatctgtgtggtgggtcgatcattggaaatcagtggattttgactgctgcccattgtttctacggggtggaatcgccaaagattctgcgggtgtactcaggaattctgaatcagtcggagattaaggaagatacctcgttcttcggggtccaagagattatcattcatgatcagtacaagatggcggaatcggggtacgacattgccttgcttaagctggagacgaccgttaactataccgattctcaacgaccgatttgccttccatcgaaaggtgaccggaacgtcatttacacggattgctgggtcaccggatggggctaccggaagctgagagataagatccagaataccctgcaaaaggccaaaattcctcttgtcactaatgaagaatgtcagaaacgctacagaggtcacaagattacccacaagatgatttgtgcaggataccgagaaggcggtaaagacgcttgtaagggagattcgggagggcccctgtcttgcaagcacaacgaagtgtggcatctggtggggattaccagctggggagaaggatgtgcccagagggaaagacccggagtttacaccaacgtggtggaatatgtcgactggattctggaaaagactcaagcagtg

SEQ ID NO: 2056 - DNA, 1875 bp, Artificial Sequence
  derived and/or modified sequence
atgattttcttgtaccaagtggtacattttattctgtttactagcgtgagtggagagtgtgtgacacagctcctgaaagacacctgcttcgaagggggtgacattacaaccgtatttacaccatctgccaaatattgccaggtggtctgcacctatcacccaaggtgtctgctgtttacttttacagcagaatcccccagtgaagaccccaccagatggttcacctgcgtcctcaaagattcggtaaccgagaccctccccagggtgaaccgcactgccgccatctcagggtatagctttaagcaatgcagccatcagatttcagcatgcaacaaagacatttacgtggaccttgacatgaaagggatcaactataattccagcgtggcaaagtcagcgcaggaatgtcaggagagatgtaccgatgacgtgcactgccatttttttacctatgcgacccggcagttccccagtctagagcatagaaacatttgtcttctgaagcacactcaaacaggtacccccacaaggataacaaagctggacaaggttgtgtcaggtttctccctaaagagctgcgctcttagcaatctggcgtgtatcagggacatcttcccaaacaccgtgttcgccgattccaacatcgactctgtcatggcaccggacgccttcgtttgtggtcgcatctgcactcatcaccctggctgcctcttttttacatttttctctcaagagtggcccaaggaatctcagagaaatctgtgcttactgaaaacgagtgagagcgggctaccttccactcgcatcaagaaatccaaggcactgtctggcttcagcttacagagttgccgacattctatcccggtcttctgccacagctcattctaccacgatacggacttcctcggtgaggagctggatatcgtggctgcgaaatcgcatgaggcctgtcaaaaactttgtaccaatgctgttcggtgccagtttttcacttacacccctgcccaggcaagttgcaatgaaggaaaagggaagtgctatctgaagctctcaagtaacggctccccgaccaagatcctgcacggccgtggtgggattagcgggtatactctccggttgtgtaaaatggataatgagtgtactaccaagatcaaacccagaatcgtcggtggcaccgcctccgtgcgaggcgagtggccctggcaagttacactgcacaccacttctcccacccagcgccatctgtgtggcggtagtataatcggtaatcagtggatattgaccgcagcacactgtttttacggcgtggaatctccaaaaattctgcgtgtgtactcgggcatcttgaatcagagcgaaattaaggaagacacctcgtttttcggtgtgcaggaaattatcatccatgatcagtataagatggctgagtcaggctacgatatcgctctccttaaattagagacaacagtgaattatactgattcccaaagaccaatctgtctgccttctaagggagacagaaatgtgatatatacagattgttgggtgacgggttgggggtataggaagctgagggacaagattcaaaacacccttcagaaggcgaagataccactggtgacaaatgaggaatgtcagaaaaggtatcggggccacaaaattacccacaagatgatctgcgcaggttatagggagggtggcaaggatgcgtgtaaaggtgatagtggcggccctttatcctgcaaacataacgaagtgtggcacctggtgggtatcacttcttggggggagggctgtgctcagcgcgaacgacctggcgtttacactaatgtcgtggagtatgtggactggatactagagaagacacaggcagtg

SEQ ID NO: 2057 - DNA, 1875 bp, Artificial Sequence
  derived and/or modified sequence
atgattttcctctatcaggtggtgcatttcatcctttttacgtccgtgtctggagagtgtgtgactcaactgctgaaggacacatgttttgagggcggtgacataacaacagtgtttacgccctcagctaagtattgccaagtggtgtgtacatatcaccccagatgcctgctctttacatttacggccgagtctccctcagaggatccaaccagatggtttacttgtgttctgaaggattcagttacggagactctccctcgggtgaatcgaacagccgctattagcggatattcatttaaacaatgcagtcaccagatctctgcctgtaataaggacatctacgtcgaccttgatatgaagggaataaattataactcttccgtggctaagtccgctcaggagtgccaggaaagatgtaccgacgacgtgcactgtcacttcttcacatacgcaacacggcagttcccttctttggagcaccgcaatatttgtctcctgaagcatactcagacgggcacccccacccggatcacaaagctcgataaagtggtttctggtttcagtctgaaatcctgcgcactctcaaatctggcctgtatcagggacatctttccaaatactgtgttcgccgacagcaacatcgattctgtgatggctcccgatgctttcgtttgtgggcgcatctgcacccaccaccccggttgcctttttttcacgttcttctcacaagaatggcccaaagaatctcagagaaacctctgcctgctcaaaacgtccgagtctggccttcccagtacgcggattaaaaagtcaaaagctctgtccggcttttcactgcaatcctgtcggcatagcataccagtgttctgtcacagcagcttctaccatgacactgacttcttgggcgaggaactggatattgtggctgcgaaaagccacgaggcttgtcagaagctgtgcaccaacgcggtcagatgtcagttttttacttacacaccagctcaagcctcttgtaacgagggcaaggggaagtgttatctgaaactctccagcaatggaagccctactaaaattctgcatggtagaggaggcatctcaggctacactctgaggctttgcaagatggataacgagtgcacaacaaaaattaagcccaggatagtgggaggtacagcgtccgtcaggggtgaatggccttggcaggtcaccctccataccacttcacccacccaaaggcatttgtgcggcggctccatcataggcaatcaatggatcctgacagctgcccactgtttctacggtgtcgagtcacccaagattctgcgcgtttattccgggatactgaaccaaagcgagattaaagaggacacttcctttttcggtgtgcaagagatcattatccatgaccagtataaaatggcagagagcggatatgatatcgctctgctcaagcttgaaacaactgtaaattatacggactcccagcgccctatttgtcttccaagcaaaggcgataggaacgtcatatataccgactgctgggtcacaggttggggataccgaaagctgagggacaagattcagaatacattgcaaaaagcgaagatccctctggtgacaaatgaggagtgccaaaaacgatatagagggcacaagattacacacaagatgatctgcgcaggctaccgagagggtggaaaggacgcttgcaagggcgactccggcggaccactttcctgcaaacacaacgaggtgtggcaccttgtggggataacaagctggggcgaggggtgcgcccagcgcgaaaggccaggggtttataccaatgtagtggaatatgtcgactggatattggaaaagacccaagccgtg

SEQ ID NO: 2058 - DNA, 1875 bp, Artificial Sequence
  derived and/or modified sequence
atgatatttctgtaccaggtggtccactttatattgttcacctccgtcagtggtgaatgcgtcacacaattgctgaaagatacctgctttgaggggggggatattactaccgtcttcacgccctccgccaaatattgtcaggtggtctgcacgtaccatccaagatgtcttcttttcacattcaccgcagagtcccctagtgaggaccccacccggtggtttacctgtgttctcaaggacagtgtgaccgagactctaccccgcgtcaataggaccgccgccatctctggttattccttcaaacagtgctcccatcaaattagtgcttgtaataaagacatctatgttgacttggacatgaagggtattaactacaactcctccgttgccaagagcgcacaggaatgccaagagagatgcacggacgatgtgcattgccatttcttcacttacgccaccaggcagttccccagcctggaacacaggaacatttgcctgttgaagcacacacagacggggaccccaacgcgcatcacgaagctggacaaagtcgtgtctgggttttcgttgaaatcttgtgcactcagtaacctcgcctgcatacgcgacatatttcctaacacagtttttgccgactctaatatcgactcagtcatggcccccgacgcctttgtctgtggcaggatctgtactcaccaccctggatgtctgtttttcactttcttttcacaagagtggcccaaagagtcccagcgtaatctttgtctgctaaagacctcagagtcaggcctaccatctaccagaatcaagaaaagcaaagccttgtctgggttcagtctccaaagctgccgtcattccattcctgtcttctgtcactcctccttctaccatgatacggactttctcggggaggagctcgacattgttgctgcaaagagccacgaggcctgtcaaaagttgtgcactaacgcagtccgctgtcagttttttacttacacccctgcacaagctagctgtaatgagggcaagggaaaatgctacctcaaactttcatcaaatggttctccaactaaaattctgcacggacgtgggggaatcagcggctatactctccggctgtgcaagatggacaatgaatgtacaaccaaaattaaaccgcgcatcgtagggggcactgcctcagtgcgtggagaatggccttggcaggtcacccttcacacaacatctcccacacagcggcacctttgcggggggagtatcattggcaatcagtggatcctgaccgctgcccactgcttttacggcgttgagtcaccaaaaatcttgcgagtgtattccggcatcctaaatcagagcgagatcaaagaagatactagcttcttcggcgtgcaagagatcatcatacacgatcagtataagatggcagagtcaggctacgatattgccctcctcaaattggagaccacggtgaattatactgactcccaaaggccaatttgtctgcccagtaaaggcgatcggaatgtgatctacacagactgctgggtaaccggatggggctaccgcaagttacgcgacaagatccagaataccctgcagaaggctaagatccctctcgtcactaacgaggagtgtcagaagcggtacagaggccataaaattacacataaaatgatctgcgccggttacagggaaggaggcaaggacgcatgcaagggcgacagtgggggccctctgtcctgcaagcataatgaggtgtggcacttggtcgggataacctcttggggtgaggggtgtgcgcagcgggaacgaccaggcgtttacaccaacgtcgttgaatatgtggactggattctcgaaaaaactcaggctgtg

SEQ ID NO: 2059 - DNA, 1875 bp, Artificial Sequence
  derived and/or modified sequence
atgattttcctttatcaagttgtgcactttatccttttcacctccgtaagcggagagtgtgtgacacaactgcttaaggatacatgcttcgaaggaggggacataacaaccgtgttcaccccctccgcgaagtattgtcaggtggtatgtacctatcaccctcgatgcttgctttttacgttcaccgcagaatctccatcagaagacccaactaggtggttcacttgcgtgctgaaggatagtgtgactgaaaccttgccccgagtcaatcgcaccgccgcaatttccgggtacagcttcaaacagtgcagtcatcagatcagtgcttgcaataaggatatttatgtggatctggacatgaagggaatcaattataacagcagtgtggctaaatcagcccaagagtgccaggaacgctgcaccgatgacgtgcactgccacttttttacctatgccacccggcagttcccatcattggagcatcgaaacatatgtttgctgaaacacacccagaccggcacgcctaccaggattactaagctggacaaagtcgtctccggattctctctgaagtcatgcgctttgtcaaacctcgcctgcatccgggacatctttccgaataccgtgtttgcggattccaacatagactccgtgatggcgcctgatgcttttgtttgcggacgaatctgtactcaccaccctggatgtttgtttttcaccttcttctctcaggaatggccaaaggagagccagagaaacctgtgcctgcttaaaacctccgagtccggcctgccatcaacaaggattaaaaagagcaaggccctgagtggattctctctgcagagttgtcgccacagtatccctgtgttctgccacagttctttttaccacgacaccgattttttgggggaagagctcgacattgtcgccgccaaatcacacgaggcttgtcagaagttgtgcaccaacgccgtccggtgccagttctttacctacacacctgcccaagcgagctgcaatgaagggaagggcaaatgctatctgaagctttcttccaatggaagtccaactaagattctgcatgggagaggtggaatctccggctacacgctgcgcctgtgtaagatggacaacgaatgcactacaaagatcaagcccaggatcgttggaggcactgccagtgtccggggagagtggccctggcaagtgactttgcacactacatctcccacccagcgccacctgtgtggcggatcaattatcgggaatcagtggatcctgacggcagctcattgcttttacggcgtcgaatcccccaagatcctgcgagtatactcagggatccttaaccagtcagagattaaggaggacacaagcttcttcggcgttcaggagatcattatccatgatcagtacaagatggctgaatctggatacgatatcgcactgttgaagctggaaacgaccgtgaactacactgattctcagcgcccaatttgcttgccatccaaaggtgataggaacgtaatttacaccgactgctgggttactggatggggctaccggaaactccgggacaagatccagaatactctgcaaaaggccaagatcccattggtaacaaatgaagagtgccagaagcgctatcggggccacaagattacccataagatgatctgtgctggctaccgggaggggggaaaggatgcttgcaagggtgactccggaggcccattgtcttgcaaacacaacgaagtatggcatctggtggggatcacgagctggggggaggggtgtgctcagcgcgaacgccccggagtgtacaccaacgtggtagaatacgtcgattggatacttgagaagacacaagcagta

SEQ ID NO: 2060 - DNA, 1875 bp, Artificial Sequence
  derived and/or modified sequence
atgatcttcctgtaccaggtcgttcacttcattctgttcacgagcgtgtccggagagtgcgtgactcagctgctcaaagatacttgcttcgagggcggcgacatcactaccgtttttactccttccgcaaagtactgtcaggtggtgtgtacttaccatccgcgctgcctgctgttcactttcaccgcggagtcaccttcggaggatccaaccagatggtttacctgcgttcttaaagattcagtcaccgagactctcccaagagtgaacaggactgcggctatttcgggatactcgttcaaacaatgctcgcatcagatctccgcgtgcaacaaggacatctacgtcgacctcgatatgaagggaatcaactacaactcaagcgttgccaagagcgcccaagagtgtcaagaacgctgcaccgacgatgtccattgccacttttttacctacgccaccagacagttcccatccctcgaacaccggaatatctgcctcctgaaacacactcagaccggaactccgactcgcattaccaagctggacaaggtggtgtcgggattttcgctcaaatcgtgcgcgctctcaaacctggcttgcattcgagatatcttccctaatacggtgttcgcggactccaacatcgattcagtgatggcgcctgacgcttttgtttgcggccggatctgtacgcatcatccagggtgcctgttcttcacttttttcagccaggaatggccaaaggagtcacaaaggaacctgtgtctgctgaagaccagcgagtcgggcctcccttccactaggatcaagaagtcgaaagcgcttagcggattctcgctccagtcgtgtagacattcgatcccggtcttttgccactcgtctttctaccatgataccgatttcctgggagaagaattggatatcgtggcggcaaaatcccacgaggcgtgtcagaaactgtgcactaatgccgtgcggtgccagtttttcacctacaccccagcgcaggcctcatgcaacgaaggaaagggaaaatgttacttgaagctgtcctccaacggatccccgactaagatcttgcatggtagaggaggcatctctggatacactctgcgcctctgtaagatggacaacgagtgcacgacgaagatcaagccgcggattgtgggtggcactgcttcagttaggggtgaatggccttggcaggtgactctgcacaccaccagccccactcagcggcacctgtgcgggggcagcatcatcgggaatcagtggatcctgactgcagcacactgcttctacggcgtggagtccccgaagattctgcgggtgtactcgggcattctcaatcaatcggaaatcaaggaggatactagcttcttcggagtgcaagagatcattatccatgatcagtacaaaatggccgaatccggatatgacatcgccctgctgaagctggagactactgtgaactacaccgacagccagcggccgatctgcttgccgtccaagggagatcgcaatgtgatctacaccgactgctgggtgaccggatggggataccgtaaactccgggacaagatccagaatactctgcagaaagccaagattccattggttaccaacgaggaatgccaaaagcggtaccgcggacataaaatcactcataaaatgatttgtgctgggtaccgcgaaggtggaaaggatgcatgtaaaggagattcggggggaccactgtcctgtaagcataacgaagtgtggcacctggtgggaatcacttcatggggcgaaggctgcgcacaacgcgaaagacctggcgtttacacgaatgtggtcgaatacgtcgactggattcttgaaaagacccaagcggtc

SEQ ID NO: 2061 - DNA, 1875 bp, Artificial Sequence
  derived and/or modified sequence
atgatttttctgtatcaggttgtccattttatactgttcacaagcgtctcgggggagtgcgttacccaactgctgaaagacacatgctttgagggcggagatattactacagtcttcactcccagcgccaagtactgccaagtggtttgtacttaccacccacggtgtcttctctttactttcacagctgagtccccgagcgaagacccaacacgatggtttacatgcgtgctgaaggatagcgtgaccgaaaccttgccccgagtgaaccggactgctgccatctcaggttacagctttaagcaatgctcacatcaaatcagtgcatgcaacaaggatatttacgtggacctggatatgaagggaataaactataattcaagcgtggccaaatctgctcaagaatgccaagagaggtgtaccgatgatgtccactgccacttctttacatacgccacgagacaatttccatccctggagcatagaaacatttgcctgcttaaacacacacagaccggcacacccacaagaatcacaaagttggacaaagtggtgagcggttttagcctgaagtcctgcgctctatctaaccttgcttgtataagagacatttttccaaatactgtgttcgcggattccaatatcgatagcgtcatggcccccgatgcctttgtgtgcggtcgaatttgtacacatcacccaggctgcctgttcttcacattctttagccaggaatggcccaaggaatcacagcggaacctttgcctactcaagaccagcgagagcggccttcccagtacccgcatcaaaaagtctaaagccctcagcgggtttagtctgcaaagctgccgacattccattccagttttttgtcattcgagcttttatcacgacaccgatttcctgggcgaggagctggatatcgtggccgcgaaatcacacgaggcttgtcagaagctatgcactaacgctgtaaggtgccaattcttcacttacacacctgctcaagcatcctgtaacgagggaaagggcaagtgttaccttaaactttcctcgaatggttctcctactaaaatcctccacggtcgtgggggaatctccgggtacactctgaggctgtgtaagatggacaacgagtgtaccaccaagataaaacccagaattgtgggaggtacagccagcgtacggggagaatggccctggcaggtcacacttcacacaacaagccctacccagcgccatctgtgtggcggatccatcattggaaaccagtggatactgacagccgcacactgcttttatggcgtcgagagccccaagatccttagggtgtatagtggcatactgaaccagtccgagatcaaggaggatacttcattctttggcgttcaagaaatcataatccacgatcaatacaagatggccgagagcggatatgacattgccctgctcaagctcgagaccaccgttaattatacagactcgcaaaggcctatctgcctgcctagcaaaggagacaggaacgtgatctacaccgattgctgggttacgggctggggttaccgaaaattgagggacaagatccagaatactttgcagaaagctaaaatccctctggtgaccaatgaggagtgtcagaaaaggtaccgggggcataaaattacacacaagatgatctgcgccggttatagagagggagggaaggatgcttgtaagggagacagcggaggaccgcttagttgcaagcataacgaggtctggcatctggtgggaataacaagctggggggagggatgcgcacagagagaacgccctggcgtctataccaacgtcgtggagtacgtggattggatcctcgagaagacgcaagctgtc

SEQ ID NO: 2062 - DNA, 1875 bp, Artificial Sequence
  derived and/or modified sequence
atgatcttcctctaccaggtggtccattttatactgtttacctccgtgtcaggcgagtgtgtgacccagttgcttaaggatacttgcttcgagggcggtgatatcactactgtatttacaccgagtgcaaaatattgtcaagttgtgtgcacgtatcacccacgctgcttgctcttcaccttcaccgcggaatctccctctgaggatccgaccagatggttcacatgtgtcctcaaagattctgtcacggagaccctccctcgcgtcaaccgcaccgccgctatctctggatacagcttcaaacagtgctctcatcagatctccgcttgtaacaaggacatctacgtcgacctcgatatgaagggtatcaactataactcatcagttgcaaaatcagctcaggagtgtcaggaaagatgcacagacgacgtgcactgtcatttcttcacatacgctacacgccagtttccttcactggagcaccgcaatatttgtttgctgaaacacactcagacgggcaccccaaccaggatcactaaactggataaagtagtgtcaggattctcactgaagtcttgcgctctgagcaatctcgcctgcattagggatatattccctaacactgtttttgccgactcaaacattgatagcgtgatggcccctgacgccttcgtgtgcggtcgcatctgcacacaccatcccggctgcctgtttttcaccttcttctctcaggagtggcctaaggaaagtcagagaaacctgtgcctgctcaagacctctgagagcggactcccatcaacaaggatcaaaaaatccaaagcactctctggcttttcccttcagtcatgtaggcattcaattccggtcttctgccactcctctttctaccacgacaccgactttctcggcgaggagctggacatcgttgcagctaaatcccacgaagcatgtcagaagctgtgcactaacgccgttaggtgccagttctttacctatacccctgctcaggcctcttgcaacgagggcaaaggaaagtgttacctgaagctctcaagcaacggctcacccacaaaaattctccatggtagaggaggaatatccggatacacccttaggctttgtaagatggacaatgagtgtacaaccaagattaagcctagaatcgttggcggtacggccagtgtgcgcggcgagtggccttggcaggtcaccctgcatactaccagccctactcaacgccatctctgcggcggctccatcatcggaaatcagtggattctcaccgcggcgcactgcttctacggcgttgagtctccaaagatacttagagtctattctggtattttgaatcaatctgagatcaaagaggacacgagcttctttggtgtgcaagaaattattattcatgaccaatataagatggccgagtcaggctacgatatcgccctgctgaagttggaaaccactgtaaactacacggattcccaaagacccatctgcctgccgtctaagggagacaggaatgtgatctatacagattgctgggtcaccggctggggctacagaaagctgagggacaagatacaaaacactctgcagaaggccaaaatcccactggtgactaacgaagagtgccagaaacgctaccgcggccacaaaatcacccacaaaatgatttgcgccggttatcgcgagggtggcaaagatgcctgcaagggcgacagcggcggaccgctgtcctgcaagcataatgaggtgtggcacctcgtgggcatcacttcctggggcgagggttgcgctcaacgcgagaggccgggtgtgtacaccaacgtcgttgagtacgttgactggatcctggaaaagacccaagctgta

SEQ ID NO: 2063 - DNA, 1875 bp, Artificial Sequence
  derived and/or modified sequence
atgattttcctttaccaagtggtgcactttattctcttcacgtcggtgtccggggaatgtgtgacgcagttgctgaaagatacttgttttgaaggtggtgatattacgaccgtgtttactcctagcgctaagtactgccaagtcgtgtgcacttaccaccccagatgtctgctctttacgttcactgcagagtccccctccgaagatcctaccaggtggttcacgtgtgttctgaaagattcggtgactgaaacccttccaagagtgaatcggaccgcagcaatttcaggatactcattcaagcagtgttcgcatcagatctcagcgtgcaataaggacatttacgtggaccttgatatgaaggggatcaattacaactcctccgtggcaaagtcggcacaagagtgccaagaacgctgcactgacgacgtgcactgtcatttcttcacttacgcaactcgacaatttccaagccttgaacatagaaatatctgtctgctgaagcatactcaaaccggcacccctaccaggattacgaagctggataaggtggtgtcgggcttcagcctcaaatcctgtgcactctcaaaccttgcctgtattagggacatattcccaaacaccgtgttcgcagattccaatattgatagcgtgatggcgcctgatgcatttgtgtgtggacgaatttgcactcatcatccaggatgtctcttctttactttcttttcacaggaatggcctaaggagagccaaaggaacctttgtctgttgaaaacgtccgaatccggccttccgtccacccgaatcaagaaatcgaaggcgctttcgggcttttcacttcaatcgtgtcgtcattccatacctgttttctgccattcctccttctatcatgatactgactttctgggagaagagctcgatatagtggcggcaaaatctcatgaagcatgtcagaagctgtgtactaacgcagtgcgctgccaattctttacctacactcctgcacaagccagctgtaacgaaggtaagggcaagtgttaccttaaactgagctcaaacggtagccctaccaagattttgcacggaagaggagggatttcggggtacactctgcgcctgtgtaagatggataatgaatgtaccaccaagataaagcctagaatcgtgggaggaactgcatccgtcagaggtgagtggccatggcaggtcactctgcacaccacctcgcctacccaaagacacctgtgcggaggatccatcattgggaaccagtggatactgaccgcagcgcattgtttctatggtgtcgagtcgcccaaaattctccgtgtgtactcaggtatactgaaccagtcagaaatcaaagaggatacctcattctttggagtgcaagagattatcattcacgatcagtacaagatggccgaaagcggctacgatattgctctgctgaagctggaaaccacggttaactacactgactcccagcgaccaatttgtctgccctcgaaaggagacaggaacgtgatttacactgattgctgggtgaccggttgggggtacagaaagctgcgcgataagatccaaaataccctgcagaaggccaagatccctcttgtcactaatgaagagtgtcaaaagcgttaccgcggacataagataactcacaaaatgatctgtgcgggttaccgggaggggggaaaagatgcatgtaagggagattccggaggtcctctctcatgtaagcataatgaagtgtggcatcttgtcgggatcacttcgtggggagagggttgcgcacaacgagaaagacctggagtttatactaacgttgtggagtatgtggattggatcctggaaaagactcaggcagtg

SEQ ID NO: 2064 - DNA, 1875 bp, Artificial Sequence
  derived and/or modified sequence
atgatctttctgtatcaggtcgtacattttattctgtttacttctgtctctggggagtgtgtcacacagcttcttaaggacacgtgtttcgagggcggggacattacaacagttttcacacctagcgccaagtattgccaagtcgtgtgcacatatcatccgagatgtctgctgttcacctttactgccgaaagtccaagcgaggacccgacacggtggttcacctgtgtcttgaaagacagtgtgaccgagactctcccgagagtgaatcggacagccgccatctctggatacagctttaagcagtgtagtcaccagatctctgcctgtaacaaggatatttacgtcgacctagacatgaaaggaatcaactacaactcttctgtggccaagtcagctcaggaatgccaggagaggtgcaccgacgacgtgcattgtcattttttcacttacgctacgcgacagttcccatctctcgaacaccgaaacatatgtttgcttaagcatactcagaccggaacacctactcggattactaagttagataaagtcgtgtctggcttctccttgaaatcctgtgcactttccaacctggcttgcatccgggatatcttccccaatactgtgttcgctgattcgaatatcgacagcgtgatggccccggatgcattcgtctgtggccgcatctgtacacaccatcccggctgtctcttttttacctttttttctcaggaatggccaaaagagagccagcggaacctgtgcttgcttaagacaagtgagtcagggcttccctccaccagaatcaaaaaatcaaaggccctgagtgggttctcgctacagtcgtgccggcactccattcctgtgttttgccacagttcgttttaccacgatacagattttttaggcgaggagctcgacatcgtagcggccaagtcccatgaagcttgtcaaaaactttgcacgaacgccgtcaggtgccagttcttcacatataccccagcgcaagccagctgcaacgaaggcaaaggaaagtgttacctgaaactgtccagtaacgggtcacctacaaaaattctgcacggtaggggagggattagcggttacactctgcggctgtgtaagatggataatgagtgtacaactaaaattaaaccccgcatcgttggggggacagcaagcgttaggggtgagtggccatggcaggtgacgctgcacacgacaagcccaacccaaagacacctgtgcggagggagcataatcgggaaccagtggattttgaccgctgctcactgcttctacggagtagaaagccctaagatactccgggtttattcaggcattctcaatcaatcggagatcaaggaggacacctcatttttcggcgtgcaggagattataattcatgaccaatacaaaatggccgaatccggctatgatatcgcgctgctcaagttagagaccacagtcaactacacagactcccagcgccccatctgtctgccctctaagggggacaggaacgtgatctacaccgattgttgggtgaccggctgggggtatcggaagttacgggataaaatccagaataccctccagaaagcaaaaatccccctggttacaaatgaagaatgccagaaacgataccggggccataaaatcacgcataaaatgatctgcgctggctacagagaaggagggaaggacgcgtgcaagggagacagtggagggcccctaagctgtaaacacaacgaggtgtggcacctggttggtatcactagctggggagagggctgtgcccaaagggagcggcctggcgtctataccaacgtcgtcgaatatgtcgattggattctggagaagacccaggcagtg

SEQ ID NO: 2065 - DNA, 1875 bp, Artificial Sequence
  derived and/or modified sequence
atgatcttcctctatcaggtggtgcatttcatcctgtttacttcggtgtcgggcgaatgcgtgacccagctgctgaaggacacttgtttcgaaggcggagacatcacgaccgtgttcaccccctccgccaaatactgccaggtcgtctgtacgtaccatccgcggtgcttgctgttcaccttcaccgccgaatcaccgtccgaagatcccacccggtggtttacctgtgtcctcaaggactccgttaccgaaaccctgccgcgggtcaataggactgccgcgatctcaggatactcgttcaagcaatgcagccatcagatttccgcctgcaacaaggatatctacgtggacctggacatgaaggggatcaactacaatagctcagtcgccaagagcgcccaggagtgccaggaacgctgtaccgatgatgtgcactgccacttcttcacttatgcgacccgccagttcccttcgctggaacaccgcaacatttgtctgctgaaacacacgcaaaccggaaccccaaccagaattactaaactggataaggtcgtgagcggtttttcgttgaaatcgtgcgccctgtccaacctcgcatgtattcgcgacatcttcccaaacacggtctttgccgactcgaacatcgattcggtcatggccccggatgcattcgtgtgtggacggatctgcacgcatcatccgggatgcctcttctttaccttctttagccaggagtggccaaaggagtcccagaggaatctttgtctcctcaagactagcgagtcgggcctcccttcgacccgcatcaagaagtcgaaggccctctcgggtttttccctccagtcatgccggcactcgattccggtcttttgccattccagcttctaccacgacaccgattttctcggagaggaattggacatcgttgcggccaagagccatgaggcctgccagaagctctgcacgaacgcagtgcggtgccaattctttacttacactcccgcccaggcttcgtgcaacgaggggaagggcaagtgctatctgaagctctcgtccaatgggtcaccgactaagattctccacggcaggggcggtatctctggatataccctgagactctgtaagatggacaatgaatgcacgaccaaaatcaagccccgtatcgtggggggaaccgcatcagtccgcggcgagtggccgtggcaagtcactctgcacactacctcccctactcagcggcatctgtgcggaggaagcattattggcaaccagtggattctgacggcggctcactgcttctacggagtggagtcgccgaagatcctgcgcgtctactcaggcatcttgaatcagtcagagatcaaggaggatacttcgtttttcggcgtccaggagatcatcatccacgatcagtacaagatggcagaaagcggatacgatatcgcgttgctgaagttggaaaccacggtgaactacaccgatagccaacgcccgatctgtctgccaagcaaaggcgaccggaatgttatctacaccgattgttgggtgaccgggtggggctaccggaagctcagagacaaaatccagaacactctgcagaaggccaaaattcccctggtcacgaacgaggaatgccagaagcgataccggggccacaagatcacccacaagatgatttgcgctggataccgagaaggtggaaaggacgcgtgcaagggagattcaggcggaccgctgagctgtaaacataacgaggtgtggcaccttgtgggcattacttcctggggcgagggctgcgctcaaagagaaaggccgggcgtgtacaccaatgtggttgaatacgtcgactggatcctggagaaaacccaggccgtg

SEQ ID NO: 2066 - DNA, 1875 bp, Artificial Sequence
  derived and/or modified sequence
atgatcttcctgtaccaggttgtccattttatcttgttcacctccgtgtctggggaatgtgtaactcagctcttgaaagacacctgcttcgagggtggggacatcacaacagtgttcaccccatcagcaaagtactgtcaggtcgtatgtacctatcatcctagatgtttgctgtttactttcaccgccgagagtccatcagaggaccctactcgctggttcacatgcgtactgaaggattcagtaactgaaacactacccagagtgaatcgcaccgccgcaatttcaggctatagttttaagcaatgtagccaccagatcagcgcttgcaataaagacatctatgtagacctagacatgaaaggcattaattataactcaagcgtcgccaaaagtgctcaagagtgtcaggagagatgtactgatgatgtgcattgtcatttttttacatacgctactcgccagttcccctccctggaacacagaaatatatgtttactgaaacacactcagaccggaaccccgacacgaataacaaagctggacaaagtcgtgagcggattctctctgaagtcgtgtgcccttagcaacctagcgtgcatccgggacatcttccctaatacagtatttgcagattctaacatcgactccgtgatggctcccgacgcgttcgtttgcgggcgcatctgtacgcatcaccccggctgcttgttttttacatttttctcgcaggaatggcccaaagagtctcagagaaacctctgtctcctcaagacctctgagagtggactgccgtccactcggatcaaaaagtccaaggcgctctctggcttttctctgcagagctgtcgccactccatcccagtcttctgccatagctccttctatcacgatactgactttctaggagaagagctcgatattgtggctgctaaatcacacgaagcctgtcaaaagttgtgtaccaacgctgtgcggtgccagttcttcacttatacaccagctcaggcatcgtgcaacgagggcaaaggcaaatgctaccttaaacttagttccaacggatcacctacaaagattttacacggccgcgggggcatctcagggtacaccctgaggctgtgcaagatggacaatgaatgtactactaaaataaaaccaagaattgtcgggggtacggcctcggtcaggggagaatggccctggcaggtgacgctgcacactacatccccgacccaacggcacctctgtgggggctcaatcattggcaaccaatggatcctcacggctgcgcactgtttctatggagtggagtctcccaaaatcctccgcgtgtacagcggcattcttaatcagagcgagataaaggaggatacttctttcttcggggtgcaagagatcatcattcacgatcagtataagatggcagagtcgggctacgatattgcgttactgaaactcgagaccaccgtgaactacacagattctcaaaggcctatctgcttaccaagtaagggcgaccgaaacgtcatatacacggattgctgggtgactggctggggataccggaaactgcgggacaaaatccagaacacacttcaaaaagcgaaaatccccctcgtgaccaacgaagaatgccagaagcgctatcgcggacacaaaattactcataagatgatatgcgcgggctaccgtgagggaggcaaagacgcttgcaaaggcgactctggaggaccgctgtcatgcaaacataacgaagtttggcacctcgtcggcattaccagttggggcgagggttgtgcacaaagggagcggccaggcgtgtatacgaacgtggttgaatacgtagattggattctcgaaaagacccaggccgtg

SEQ ID NO: 2067 - DNA, 1875 bp, Artificial Sequence
  derived and/or modified sequence
atgatctttttgtaccaagtggtccactttatacttttcaccagcgtcagcggagaatgcgtgacccagctgcttaaggatacttgcttcgaaggaggagatattaccactgtctttactccttcagcgaagtactgtcaggtggtgtgtacctatcatcctcgctgtctcctgttcacttttacggcagaatcgccaagcgaggatccgaccagatggttcacctgtgtcttgaaggattcggtcaccgaaaccctgcctcgcgtcaatcggaccgcagccatttctggttactcgttcaagcagtgctcccaccagatctcggcttgtaacaaagatatctacgtcgatcttgacatgaagggaattaactacaattcctccgtggcgaagtcggcgcaagaatgtcaagaaaggtgtactgacgatgtgcattgccatttctttacctacgcaacccgccaatttccgagcctggaacatcgtaacatctgtctgctcaagcatacgcaaaccggtacccctacgagaattaccaaactggataaggttgtgtcgggttttagcctgaagtcgtgtgcactctcgaacctcgcgtgcatccgggacatttttcctaatactgtgtttgctgactccaacatagatagcgtgatggcacctgacgccttcgtgtgtggacggatttgtacccaccatcctggttgcctgttcttcaccttcttttcccaagaatggcctaaagagtcgcagcgtaacctgtgtctcctcaaaacttccgaaagcggtctgccctctacccgaatcaagaagagcaaggccttgtcaggattttcgcttcaatcatgtaggcattcgattccagtcttttgccactcgagcttttaccatgataccgactttctgggagaagaacttgatattgttgcagcaaaatcgcatgaagcctgtcagaagttgtgtactaacgcggttcgttgccagtttttcacctataccccagcccaagcctcatgcaacgaaggaaaggggaagtgttaccttaagctctcctcaaacggtagccccaccaaaattcttcatggccgaggaggcatttccggatacaccctgagactgtgtaagatggataacgaatgtactaccaagattaagccaagaatcgtcggcgggaccgcatcggtccgaggtgaatggccctggcaggtgaccctgcataccacttcacctactcaacgccacttgtgcggaggctcgattattggaaaccagtggattctgaccgcagcccattgtttctacggtgtggagtcgcccaagattctccgtgtgtacagcggtattctgaaccaatcagagataaaggaggacactagcttttttggcgtgcaggagataatcatacatgaccaatacaaaatggcagagtcgggatacgatatcgccttgctgaagctggagacgaccgtgaactacaccgattcacaacggccgatttgtctgcccagcaaaggtgaccgcaatgtgatctacaccgactgttgggtgactggttggggatacagaaaacttcgagacaaaatacaaaacactctgcaaaaggcaaagatccccctcgtcaccaacgaagagtgtcagaagagataccgcggtcacaagatcactcacaagatgatctgtgccggttacagagaaggagggaaagatgcatgtaagggcgattccggaggaccactgtcttgcaaacataatgaggtctggcaccttgtgggtattacgtcctggggcgagggatgcgcccagagagagcgtccaggagtgtacacgaacgtcgtggaatacgtcgactggattcttgaaaagacccaagcagtg

SEQ ID NO: 2068 - DNA, 1875 bp, Artificial Sequence
  derived and/or modified sequence
atgatcttcttgtaccaagtggtgcacttcatcctgttcacgagcgtgtcaggcgagtgtgttacgcagctgctcaaagatacatgtttcgagggcggggatatcaccaccgttttcacaccaagcgcaaaatactgccaagtcgtgtgcacataccacccacgatgcctattattcacatttacggcggagagtccttctgaagacccgacgaggtggttcacctgtgtgctgaaggactctgtgaccgagaccttgccgcgggtgaatcgaaccgccgccatcagtggctattcattcaagcagtgcagccaccaaattagcgcatgtaataaagatatctacgtcgatctggatatgaagggcattaattataactcctcggtcgcgaagagcgcgcaagagtgccaagagcgttgcaccgacgatgttcattgtcactttttcacctacgcgactcgccaattcccgagcctggaacatcgcaacatctgtctgttgaaacacacccagactggtacgcctacccgcatcaccaagcttgacaaggtggtgtctggtttctcccttaagtcctgcgcgctctcaaatttggcctgcattcgcgacatcttccctaacacagtctttgcagacagcaacatcgatagcgttatggcacctgacgcattcgtttgcggaaggatctgtacccaccatccaggctgcttattttttaccttctttagtcaggaatggccgaaggagtcccagagaaatctgtgtctgttaaagaccagcgagagcggcctcccatctacacgcatcaaaaagagcaaagctttgtctggttttagcctgcaaagctgtaggcactcaatccctgtgttctgccactccagcttctatcacgataccgatttcctgggtgaggaacttgacattgtcgcagcaaagagccacgaggcatgtcagaaactttgtaccaatgcggtgcgctgtcagttttttacatacacccctgcccaggcatcgtgcaacgagggtaaggggaagtgctacttaaaactatctagcaacgggtcaccgactaagattctgcacggtcgaggtggcataagcggctacaccctgcgtttgtgtaaaatggataacgaatgtaccaccaagatcaaacctcgtattgtcggaggtactgcgagcgtgcggggtgagtggccatggcaagttacactgcacacaacctctcctacccagcgccacctatgtggtgggtccattatcggtaatcagtggatcctgaccgcggcccattgcttttacggagttgagtctccaaagattctgagggtctacagcggcatcctgaatcagtccgagatcaaagaagatacttctttcttcggcgtccaggagatcatcattcatgaccaatacaagatggcagaatccggctacgacatcgcgctgctgaaactggagacaaccgttaactacaccgacagccaacgcccgatctgcctgccttccaaaggtgaccggaatgtgatctacacggattgctgggttacgggatggggttatcgcaaactgagagataagattcaaaacaccctgcagaaagccaaaatcccgctggtaacgaacgaggaatgccagaagcgttaccgaggccacaagatcacgcataaaatgatctgtgcgggctatcgcgaaggtggtaaggatgcgtgtaagggtgattccggcgggccattgtcttgtaagcacaacgaggtttggcacctggtaggaataacgagttggggggaagggtgtgcccaaagggagcgtccgggtgtgtacacgaacgttgtggaatacgtcgactggattctggagaagacgcaagcggtg

SEQ ID NO: 2069 - DNA, 1875 bp, Artificial Sequence
  derived and/or modified sequence
atgatcttcctctatcaggtcgtccacttcatccttttcacctccgtctcgggcgaatgcgtcactcagcttcttaaggatacgtgtttcgagggcggcgatattactaccgttttcactccctctgccaagtattgtcaggtggtttgcacctatcacccccgttgcctgttgttcacctttaccgccgagagcccctcggaggaccccacgagatggttcacctgcgtcctgaaggatagtgtcaccgaaaccctccctcgtgtgaaccggacggccgctatttcgggctactctttcaagcagtgctcccaccagatctccgcttgcaacaaggacatttacgtcgacctggacatgaagggcatcaactacaacagtagcgtcgcaaagtctgcccaggagtgtcaggagcggtgcactgacgacgtccactgccatttcttcacttatgcaactcggcaattcccctcgctggagcaccggaatatatgcctactgaagcatacccagactggcacccctacccgcatcaccaagctcgataaagtggtgtccggattctcgttgaagtcctgcgctctgagcaacctggcctgtatccgggacatctttcccaacactgtcttcgcggactccaacatcgactcagtaatggcgccggatgcgtttgtctgtggtagaatctgtactcatcaccccggctgccttttcttcaccttcttctctcaggaatggcctaaggagtcccagcgaaacctgtgcctgttgaagacttccgagtccgggctacctagcactcgcattaagaagtccaaggcgctttcgggattctcgcttcagtcctgccggcactccatcccggttttctgtcattcgtccttttaccatgatacggacttcctgggcgaggagcttgatatcgtcgccgccaagtctcatgaggcctgccagaagctgtgtaccaacgccgtacgttgccaattctttacttacactccagcacaggctagctgtaacgagggcaaaggcaagtgctatctaaaactctccagcaacggcagccctacgaagatcctgcacggtcggggcggcatctcaggttacactctgcgtctttgcaagatggataacgagtgcacaactaagatcaagccccgtatcgtcggcggaactgcctcggtccgtggtgagtggccctggcaggtgactctgcacaccacaagccctacccaacgacatctgtgcggtggatccatcattggaaaccagtggatcctcaccgcagcgcactgcttctacggcgtcgagtcccccaaaatactccgcgtttactccggtatcctgaatcagtctgagatcaaggaggacacctcgttcttcggtgtgcaggagataatcatccacgatcaatacaaaatggccgagagcgggtatgatatcgcacttttgaagttggagacgaccgtaaactacacggacagccagcgccccatctgccttccgtccaagggagatcgaaacgtcatctacactgattgctgggtgaccgggtggggatacaggaagctgcgagataagatccaaaacacactgcagaaggccaagatcccccttgttactaacgaggaatgtcagaagcgctaccgaggccataagatcacgcacaagatgatctgcgccggctaccgtgagggaggtaaggatgcctgcaagggagactccggtggccctctgtcctgtaaacataacgaggtgtggcatcttgtcggtatcacttcctggggcgaaggttgtgcccagcgtgagcgccccggtgtgtacaccaacgtggtcgagtacgttgattggattctcgagaagacccaggccgtc

SEQ ID NO: 2070 - DNA, 1875 bp, Artificial Sequence
  derived and/or modified sequence
atgatttttttatatcaagttgtccattttatccttttcacaagtgtcagtggagaatgtgttactcaacttctcaaggatacatgttttgaaggaggagatattacaaccgtgtttacaccttcagcaaaatattgtcaggttgtgtgtacgtaccacccacggtgtttactttttacattcaccgcagagagtccctcggaagacccaactcgttggttcacgtgtgttcttaaagattcggttacagagactctaccccgagttaaccgtaccgcggctatttcgggatactcattcaagcagtgctctcaccagattagtgcatgtaataaggatatttacgtggaccttgatatgaaaggaattaattacaacagctcagtcgcaaagtcagcacaagagtgtcaagaaagatgcactgatgacgttcattgccacttcttcacttatgctactaggcaatttccttcattagaacaccgtaatatctgtttgctcaagcatacgcagaccggaacacccacaagaattactaagcttgacaaggtcgtttctggattttctttgaagtcatgcgcactatcaaatttagcgtgtattcgagatatctttccaaatactgtattcgccgattcgaatattgattctgttatggcaccagatgccttcgtttgtggtagaatttgtacgcaccatccagggtgcttgttctttactttcttttcacaagaatggcctaaagagtcgcagaggaatctctgcttacttaaaactagcgaatctggtctcccatcaacccgtataaaaaagtcaaaagccttatccgggttttcgttgcaatcgtgccggcattcaatcccagttttttgccactcatcattttatcatgacaccgattttcttggagaagaacttgatattgtagcagcaaaatcgcacgaagcatgtcaaaaactatgtacaaacgctgtcagatgtcagttttttacctatacccccgcgcaagcatcttgtaatgaaggaaaaggaaaatgctatctaaagttatcgtcaaatggatcgccaacaaagatcttacatggcagaggaggtatttctgggtacaccctacgtctttgtaaaatggacaacgagtgcacgacaaagattaagccaagaatcgttggaggaactgctagcgttcgcggagaatggccatggcaggttacattacacacaaccagcccgactcaaagacatctttgtggtggttctattattggaaaccaatggatcctcacggccgctcattgtttttatggagtcgagagtccgaaaatcttgcgtgtttattcaggtatccttaatcaatctgagatcaaggaagatacttcattctttggagtacaagaaattattattcacgatcagtacaaaatggcagaatcgggttatgacattgcattacttaagctcgaaacaacggttaactatacggattcgcaacgaccgatatgtctcccaagtaagggcgatagaaatgtcatatacactgactgttgggttacaggttggggttataggaagcttcgagataaaattcagaatactcttcaaaaggccaaaatccctcttgtgactaatgaagaatgtcaaaaacgatacagagggcataagattacccataaaatgatttgtgccggctatcgcgaaggaggaaaggatgcatgtaaaggagactccggcggtcctttatcctgtaaacacaatgaagtctggcacttggttggaataacttcctggggagaaggatgtgcgcaacgagaacgaccaggtgtttacactaatgttgtagaatacgtagattggattctcgagaaaacccaagcagtg

SEQ ID NO: 2071 - DNA, 1875 bp, Artificial Sequence
  derived and/or modified sequence
atgatttttctgtaccaggtggtgcatttcatcctgtttacctccgtgtcgggcgaatgcgtgacccagctgcttaaggacacctgcttcgagggcggagatatcactaccgtgttcaccccgtcagccaagtactgccaggtggtctgtacttaccatcctcgttgtctcttgttcaccttcacggcggagtcgccgtcggaagatccaactcggtggttcacgtgcgtgctgaaggactccgtgactgaaacgctgccgcgcgtgaacaggactgcagcgatctctggttacagcttcaagcaatgttcacatcagatctcggcttgcaataaagatatctacgtggacctcgatatgaagggaatcaactacaactcgagcgtcgccaaatcggctcaggagtgccaggaacgctgcaccgatgatgtgcattgtcatttctttacgtacgccacccggcaattccccagcctggagcatcggaacatttgcttgctgaagcacactcaaacgggcactcctaccagaatcaccaagctcgataaggtcgtgtccggattctcactgaagtcctgtgccttgtcaaacctcgcgtgtatccgggacattttcccgaacaccgtgttcgctgactctaacattgactcagtcatggccccggacgccttcgtctgcggcagaatttgtacccaccatccgggctgccttttctttacctttttctcacaagaatggccaaaagagtcccaacggaacctctgcctcttgaaaacgtccgagtcgggactgccaagcactagaatcaagaagtcaaaagccctgtccgggttttcgctccagtcatgccgccactccatccccgtgttctgccactcatccttctaccacgacaccgacttcctgggggaggaattggatatcgtggcagccaagtcgcacgaagcatgccaaaagctctgcaccaacgccgtgcgctgccagttcttcacgtataccccggcccaggcaagttgcaacgaagggaaaggaaagtgctatctgaagctgtcaagcaatggaagcccaaccaaaatcttgcacggacgcgggggaatctcgggttataccctccgcctctgcaaaatggataatgaatgtacgaccaagatcaagccacgcatcgtgggaggcaccgctagcgttagaggagagtggccgtggcaagtgacgttgcacaccacctcacctactcaacgtcatctttgcggtggatccatcatagggaaccagtggatcctgaccgctgcgcattgcttctacggggtcgaatcgcccaagatcctccgggtctatagcggtattttgaatcagagcgagattaaggaggatacttcctttttcggcgtgcaggaaatcattatccacgaccagtacaagatggcagaatctggctacgatatcgcccttcttaagctcgaaaccactgtgaactacactgatagtcaaagacccatctgtctgcctagcaaaggagacagaaacgttatctatactgactgctgggtgactggatggggctataggaagttgagggacaagattcaaaacaccttgcaaaaggcgaagatcccactcgtgaccaacgaggaatgtcagaagagataccgaggccacaaaatcactcacaagatgatttgtgcgggatatcgggaaggaggaaaagacgcctgcaagggtgactctggtggaccgctgtcttgcaagcataatgaggtatggcacctggtcggcatcacttcgtggggcgaaggatgcgcgcagcgggagcgcccgggggtgtacaccaacgtggtcgagtacgtcgactggatcctggagaaaacccaggctgtg

SEQ ID NO: 2072 - DNA, 1875 bp, Artificial Sequence
  derived and/or modified sequence
atgatttttctttaccaggttgtgcactttatcttattcacctccgtgagtggcgagtgcgtcacccaactgctaaaggacacttgctttgagggtggggacattactacagtgtttaccccaagtgccaaatattgccaagtagtatgcacctatcacccccggtgtctcctattcacgttcactgccgagagcccctcggaagaccccacacgatggtttacttgtgtactgaaagactctgtgaccgagaccttgccaagagtaaatcggactgcggcaattagcggctactctttcaagcagtgcagtcatcaaatcagtgcctgtaataaagacatttatgtggacctcgatatgaaggggatcaactacaattcttcagtggcaaaatccgcacaggaatgtcaggaaaggtgtacggatgatgtgcactgtcacttctttacctatgccaccaggcagtttcctagtcttgaacacaggaacatctgtcttctgaagcacacacagaccggtacgccaacaagaataactaagttggataaggttgtaagtggtttcagtctcaaatcctgcgccctgtccaatttggcttgcatccgcgacatattcccaaatacagtctttgcagattccaatatcgattctgtgatggctcccgatgcttttgtgtgcggccgaatatgcacacaccacccaggatgtctgttttttaccttcttcagccaggagtggcccaaggagagtcaacgtaatttgtgcctgctcaagacaagcgaatcaggcctacccagtacccggattaaaaaatccaaagccttgtccggcttctcactgcagagttgtcgccacagtattcccgtgttctgtcactcttcattctaccatgacaccgacttcctaggagaagaactcgatatcgtcgccgctaagtcccatgaagcatgccagaaactctgtactaatgctgtgcgttgccaattttttacatacacaccggcgcaggcatcatgcaatgagggcaagggcaagtgctacctcaaactatcttcgaacggaagccctactaaaatcctgcatggtcgaggaggaatctctggttataccttaagactgtgcaagatggacaatgaatgtacaactaaaatcaagccccgaatcgtcgggggtacggcttctgtccgaggagagtggccatggcaagtaacattgcacacgaccagccctacacagagacacctctgcggaggatcaatcattgggaaccaatggatcctgacggccgcgcactgtttttacggcgtggaaagtccgaagatcctacgggtctattccggtattttgaatcagagcgaaataaaagaagacacgtctttcttcggagtccaggagatcatcatacacgaccagtataaaatggccgaaagcggatacgacatagcactgctgaagctcgaaactactgtgaactataccgattcccagagacccatttgtctgccgagcaagggagacaggaacgttatttataccgactgttgggtcaccggctgggggtatcgaaagctgagagataagatccagaatacccttcagaaggctaaaatcccattggtgactaatgaagagtgccagaaacgttatcggggacacaaaataacccataaaatgatctgtgcgggatacagggaaggcggcaaagatgcttgcaagggggacagcggcggacccctttcttgcaaacacaatgaagtgtggcatctggtcggtataacctcatggggcgaggggtgtgcccagagagaacgtcccggcgtttacaccaacgtggtggagtacgtcgactggatcctggagaagacccaggctgta

SEQ ID NO: 2073 - DNA, 1875 bp, Artificial Sequence
  derived and/or modified sequence
atgattttcctgtatcaagtggtacattttatacttttcacatctgtgtctggagaatgtgttactcagctcctaaaagatacatgtttcgaaggaggagatataacaacagtgtttacgccttcagctaaatactgtcaagtggtctgcacatatcatccaagatgtcttttattcacatttactgcagaatctcccagtgaagatccaactaggtggtttacatgtgttctgaaagatagtgttacagaaactctcccacgcgtcaacaggactgcagcaatctcgggatattcatttaaacagtgctctcatcagatttccgcctgtaacaaagatatatatgtggacctcgacatgaaaggaataaactataactcctctgtggcaaaatccgctcaggaatgtcaggaacgttgcacagatgacgttcattgtcattttttcacttatgccacaaggcagtttccctccctggagcatcggaacatctgtctcctgaaacatacacagactgggacaccaacaaggatcactaagcttgataaagtggtgtctggattctcgctgaagtcgtgtgcactgtctaaccttgcttgtatcagggatatcttccccaatacagtatttgcagattccaatatcgacagtgtgatggctccagatgcttttgtctgcggacgaatctgtactcaccaccccggatgtctattttttacgtttttctcacaggaatggcctaaagagtctcagcggaacctctgtttgctgaaaacatcagaaagtggactgccttccacaaggataaaaaaatcgaaagcactgagtggattctctcttcagtcttgccgccattcaatcccggtgttttgtcactcctctttctaccatgatacagacttcttaggggaggaactagatatagtcgcagccaaatcccacgaagcgtgccagaaactctgtacaaacgcggtaaggtgccagttcttcacttacactcccgcacaggcctcatgtaacgaagggaaggggaaatgttatctgaaactctcttctaatggatccccaactaaaatcctacacgggcggggggggataagtgggtacactcttaggctttgtaaaatggataacgagtgtacgacaaaaatcaaacctagaatagtgggaggaactgcatcggttcggggagaatggccatggcaggtcacacttcatacaacttctcctactcagcgccatctctgtggaggatctataatcgggaaccaatggattctcacagcagctcattgtttctacggggtcgaaagtcccaagatcctgcgggtgtatagtggaatactaaaccagtctgagataaaagaagacacttctttttttggggttcaagaaattatcatccatgatcagtacaaaatggctgaatccgggtatgatatcgccctactaaaactggaaactacagtcaactatactgactcccaacggccaatctgtctcccatcgaaaggagatagaaatgttatttatacagattgctgggtgacagggtgggggtatcgcaaactgagagataaaatccagaatactctacagaaagccaaaatacccctcgtgacaaacgaagagtgtcagaaaaggtatagaggacacaagatcacacataagatgatctgtgcaggatatagagaagggggaaaagatgcatgcaaaggagattcaggaggacccctgtcatgtaaacacaatgaggtgtggcatttagtgggaataacttcttggggggaagggtgcgctcagagggaacgaccaggagtctacactaacgttgtcgagtatgtcgattggattctggaaaaaactcaggcagtg

SEQ ID NO: 2074 - DNA, 1875 bp, Artificial Sequence
  derived and/or modified sequence
atgatctttctgtaccaggtggtgcactttattctgtttacctctgtgagcggcgaatgtgttacccagctcctcaaggatacctgcttcgaggggggcgatattacgaccgtgttcactccatccgccaagtactgtcaggtggtgtgcacgtaccatcctagatgcctgctgtttactttcaccgcagaatcgccctccgaggaccctactcgttggtttacctgcgtgctgaaggactcggtgactgaaaccttgcccagagtcaaccggactgcagcaatctcgggatactcctttaaacaatgtagccatcagatcagcgcctgtaacaaagatatctacgttgatttggacatgaagggaatcaattacaattcgtccgtggcaaagtccgcgcaggagtgccaggaaaggtgcaccgatgatgtccattgccactttttcacttacgcaaccaggcaatttccgtcgttggagcacaggaacatttgtctgcttaagcatacccagaccggaacccccaccagaatcactaaactcgataaggtggtgtccggattttcacttaaatcatgtgcacttagcaacctcgcatgtattcgagatatcttccctaacactgtgtttgcggactccaacatcgatagcgtcatggcgcctgacgctttcgtgtgcggaaggatctgtactcatcatccaggttgcctgtttttcacttttttctcgcaggaatggcctaaggaatcgcagaggaacctttgtctgctcaagacttcggaatccggcctcccctccacccgaattaagaagtcgaaggccctgtcaggattttcactgcagtcatgtcgacattcgatcccagtcttttgtcattcgtcattttaccatgacaccgactttcttggagaagaactggatatagtcgctgcaaagtctcatgaggcctgccagaagctgtgtaccaatgcggtgagatgtcagttctttacttacacccctgcccaggcctcctgcaacgaaggaaaaggtaaatgctaccttaaactttcgtcgaacggttcgccaactaagattcttcatggccgcgggggtataagcggatacaccctgcgcctctgtaagatggataacgaatgtaccaccaagattaaaccacgcatcgttggagggaccgcgtcagtccggggggaatggccctggcaggtgaccctccatacgacctcgccaactcaacgccatctgtgcggtggatccattataggtaaccagtggattcttactgcagcccactgcttttacggagtggagtccccgaagatacttagggtgtactccggcatccttaaccaatcggaaatcaaggaagatacctcgttcttcggagtccaggaaatcatcattcatgaccaatacaagatggcagaatcaggttatgatattgcactcctcaaacttgaaacgactgtgaactacaccgatagccaacgcccgatctgcctgccctctaaaggagacagaaacgtgatatacacggactgttgggtgactgggtggggctaccgcaagctgcgtgacaaaattcaaaacaccctccaaaaggctaagataccgttggtgaccaatgaagaatgtcagaagcgatatcgtggacacaagattactcacaagatgatttgtgcaggctaccgcgaaggaggtaaggacgcatgcaagggtgactcgggcggcccattgtcctgtaaacataacgaagtgtggcatcttgtgggcattacttcgtggggtgagggctgcgcacaacgcgaaagaccaggcgtgtacaccaacgtggtggaatacgtcgactggatcctggaaaaaacccaggctgtg

SEQ ID NO: 2075 - DNA, 1875 bp, Artificial Sequence
  derived and/or modified sequence
atgatttttctgtaccaagttgtgcacttcattctgtttacctcggtcagcggagaatgcgtcactcaactcctgaaggacacttgttttgaaggtggcgacataactaccgtctttactccatctgcgaaatactgtcaagtggtgtgtacctaccaccctagatgtctgttgttcacctttacggcagagagcccttcggaggacccaacccgatggtttacgtgtgtgctgaaggattctgtgacggagacgttgcctcgtgtgaaccggaccgccgctatctccgggtactcattcaagcagtgttcgcaccaaatttccgcatgtaacaaggacatctacgtcgatcttgatatgaagggcataaactacaactcctccgtggcaaagagtgcacaagagtgtcaggagcgctgcactgatgacgtgcattgccacttctttacctacgcaaccagacagtttccatccttggaacacagaaacatctgcctgcttaagcatacccaaaccgggactccaacccgcattaccaaacttgataaggtggtgtctggattctcgcttaagtcgtgtgcgctctccaatcttgcatgtattcgagacattttcccaaatactgttttcgcagactctaatatcgactcggtgatggcaccagatgcatttgtctgtggacgtatttgcacccatcatccagggtgtctgttctttacctttttcagccaggagtggcctaaggaaagccaacgcaacctgtgtctgctcaagacgagcgaatcaggcctcccttccacccgcataaagaaatcgaaagcccttagcgggttctcgcttcaatcatgtcgccacagcattcctgtgttctgtcattcctcattctaccatgacactgactttctgggcgaagagcttgatattgtggccgcaaagtcacatgaagcctgccaaaaactctgtactaatgcggtgaggtgtcagtttttcacctatactcccgcacaggccagctgtaatgaaggaaagggaaaatgttaccttaaacttagcagcaacggatccccgaccaaaatcctccatgggcggggtggcatttccggatacactctgagactgtgtaagatggacaacgagtgtactactaaaatcaagccaagaattgtgggagggaccgcatccgtgagaggcgaatggccatggcaagtgacgcttcacactactagcccgacgcaaagacatctgtgtggtggatccatcattgggaaccaatggatcctgactgcagcgcactgtttttacggggtggaatcaccaaagatccttcgcgtgtacagcggaatcctgaaccagtccgaaatcaaggaggacacttcattctttggagtgcaagaaatcattatccatgatcagtacaagatggcagagtcaggatatgacatcgcactgctcaagctcgagactaccgtgaactatactgattcgcagcgccctatttgcctccctagcaagggagatcggaacgtgatctataccgattgttgggtgactggttggggttacaggaagctccgggataagattcaaaataccctgcaaaaggcgaagattccgttggtgaccaacgaggaatgtcagaagagataccggggtcacaagatcactcataagatgatctgtgcaggctaccgggagggaggaaaggacgcgtgcaagggtgattccggtggtcctctgagctgtaaacacaatgaagtgtggcatctggtaggaattacttcctggggggagggatgtgcacagagggagcgtccgggtgtctacacgaatgtcgtcgaatatgtggactggattctggaaaagactcaggcggtg

SEQ ID NO: 2076 - DNA, 1875 bp, Artificial Sequence
  derived and/or modified sequence
atgatctttctgtatcaagtggtgcactttatcttattcacttctgtaagtggggagtgtgtgacccagttactgaaggatacatgttttgaaggtggcgatatcaccaccgtattcacgcctagtgccaagtactgccaagtggtgtgtacttaccacccaaggtgtctcttgttcacctttactgccgagtccccctcggaagaccccactcgctggtttacttgtgtactgaaggatagcgtaaccgagaccctcccacgcgtaaatagaactgcagctatttctgggtatagtttcaagcagtgtagccaccagatttcagcttgcaataaggatatttacgtggatttagatatgaagggaatcaattataatagtagcgttgccaagtccgctcaagagtgtcaagagcgttgtacggatgacgtgcactgccatttttttacatatgctacaagacaatttccctccctagagcacaggaacatctgtctcctcaaacacacgcaaacagggaccccaaccaggatcaccaaactggacaaagttgtatcgggcttctccctgaaaagctgtgccttgtccaacctcgcttgcatccgggacatctttccaaacaccgtgtttgcagattcaaatatcgattccgtgatggcgccagatgctttcgtgtgtggtcggatttgcacacaccaccccgggtgtctgttttttacgttcttctctcaagaatggcccaaagagtcacagcgcaatctttgcctactcaagacctccgagtccggcttaccaagcacccgtattaaaaagtcgaaggccctatccggcttcagcctgcaatcatgcaggcacagcatcccagtgttctgccacagcagcttttaccatgataccgactttcttggcgaagagttggatatcgtggccgccaaatcccacgaggcctgccagaaactttgcaccaatgcggtgcggtgtcagttcttcacatatactcccgcccaggcatcttgtaacgaggggaagggcaagtgctatttgaaattatctagtaatgggagtcccactaaaatattgcacggcagaggcggaataagtggctacactcttagattgtgtaagatggacaatgagtgtacaacaaagatcaaacccaggatcgtgggtgggacagccagcgtgcggggcgagtggccttggcaggtgacactgcacacaacttcaccaacccagagacatttgtgtggcggttctataattggaaaccaatggattctgacagccgcacactgcttttatggcgtggaaagtcccaagattctcagggtgtactctgggattctcaaccaaagcgagataaaagaggacacgagcttttttggagtccaggaaatcattatacacgaccagtacaagatggccgaatcgggttatgacatcgccctgttgaagctggagaccaccgtgaattacacagatagccagagaccaatctgtctgccctctaagggggacagaaacgtaatctatacagattgctgggtgaccgggtggggctacaggaaactccgtgacaagatccagaacaccctgcagaaggccaaaatcccattggtgacaaatgaagaatgtcagaagcgttatagaggacacaaaatcacacacaaaatgatctgtgctgggtatagggagggtggtaaagatgcatgcaagggcgattctggtgggcctttatcctgtaagcacaacgaagtttggcatctggtggggataacatcgtggggtgaggggtgtgcccaaagggagagacccggcgtgtataccaacgtcgtcgagtatgtggactggatactggaaaaaacacaggctgta

SEQ ID NO: 2077 - DNA, 1875 bp, Artificial Sequence
  derived and/or modified sequence
atgatttttctctaccaggtggtacactttatcctgttcacttcagtctcgggtgagtgcgtgacacagctcctcaaggatacttgttttgagggcggagacatcactactgtgttcactcctagtgctaaatactgccaggtggtgtgcacttatcacccacggtgtctgcttttcacattcacagcagagtctccttctgaggacccaaccaggtggttcacctgcgtgctaaaagacagcgtcaccgagacgcttccccgtgtgaatagaactgccgccatcagcggctattcgttcaaacagtgcagccaccaaatatctgcctgtaataaagatatttacgttgatctggacatgaaagggataaactacaattcttccgtggcaaaatccgcccaagagtgccaggagcgttgtaccgacgacgtgcattgtcatttctttacatacgcaaccaggcagtttccctccctagagcatcggaatatttgtctgctcaagcacacacagacaggcacaccaacaaggattacgaaactagacaaagttgtctcgggtttctctcttaagagctgtgcccttagcaaccttgcatgcattcgcgacatcttcccgaacaccgttttcgctgacagtaacatcgattcagtcatggcgccagatgcctttgtctgtggacgaatttgcacccatcatccgggctgcctcttcttcacattcttttcccaggagtggcccaaggaatctcagcgcaacctttgtctgctcaaaacaagcgagagtggcctaccctctacccgcatcaagaagtctaaggccctgagcggatttagtctacagtcatgcaggcactctatcccggttttttgccactcatcattctaccacgacactgacttccttggcgaagagctggacattgtagcagctaagagccacgaagcttgtcaaaagctgtgtacgaacgctgtaagatgccaattcttcacttacactcctgcacaagctagttgcaacgaagggaaggggaagtgttatttaaagctgagctctaatgggtctcctactaagatactgcatggccgcggaggaatttcaggatacacgttacggttgtgcaagatggacaacgaatgcacaacgaagattaaaccaagaattgtggggggaacagcatctgtgcggggcgagtggccttggcaggtaactctccatacaactagtcctacccaaaggcatctgtgtggaggaagcatcatcggtaaccagtggatcctgacagctgcacattgcttttacggtgtggagtcacccaaaatccttcgagtctattctggaatcctgaatcagtccgagataaaggaggacacttctttcttcggggtacaggagatcataatccacgaccagtacaagatggccgagtcgggctacgacattgcgctgttgaaactggaaacgacagtgaactacaccgattcacagaggcccatatgtctgccctcaaagggggaccgcaatgtcatctacaccgactgttgggtcaccggatggggctaccgtaaattgcgcgataagattcaaaacacgcttcaaaaggctaaaatcccactcgttacaaacgaggaatgtcaaaaaaggtaccgcggccataaaatcacgcacaagatgatctgtgcaggctatagagaagggggaaaggacgcgtgcaaaggcgattctggaggcccattgtcttgcaagcacaatgaggtttggcatttggtgggaatcacatcctggggggagggctgcgcccagcgcgagaggcctggggtatacaccaatgttgtcgaatacgtagattggattctggaaaaaactcaggccgtg

SEQ ID NO: 2078 - DNA, 1875 bp, Artificial Sequence
  derived and/or modified sequence
atgatctttctgtaccaggtggtgcatttcatcctgttcaccagtgtgtcaggagagtgcgtgacccagctgctcaaagacacctgtttcgaaggaggcgatatcactactgtctttactccgtcagcgaagtactgtcaagtcgtttgtacttaccacccgcggtgtttgctcttcactttcactgcagaatccccgtcggaagatccaacccgctggtttacttgcgtgctcaaggattccgtgactgaaaccctcccgcgcgtgaaccgcaccgccgccatctccggttactcattcaagcagtgctcgcatcagatcagcgcctgcaacaaagatatctacgtggacctggacatgaaaggcatcaattacaatagcagcgtcgccaaaagcgcccaagaatgccaggagagatgtactgatgacgtccactgccatttctttacctacgcaacgcgccagttcccgtccctcgaacatagaaacatctgcctgctgaagcatactcagacggggactccgacgcgcatcaccaagctcgacaaggtggtcagtggattcagtctgaagtcctgcgctctcagcaatctggcctgcatccgggacattttcccaaataccgtgttcgcagacagcaacatcgactccgtcatggctccagacgcattcgtgtgcggacgcatctgcacccaccacccggggtgtctgttctttaccttcttttctcaggagtggccgaaggaatcacaacggaatctctgcctgctcaagacttccgagtcggggctcccgagcacccgcattaagaagagcaaagccctttcaggattctcgctgcagagctgtagacattcgatcccggtgttttgtcactcatcgttctaccacgacaccgacttcctcggggaagaactggacatcgtggccgcgaagtcgcacgaggcttgccagaaattgtgtactaacgctgtgcggtgccagtttttcacttatactcctgcgcaggcgtcatgcaatgaaggaaaggggaagtgctacctgaagctctcgtcaaatggcagcccgactaaaatcctgcacggacgtgggggaatttcgggatacaccctgagattgtgcaaaatggataacgagtgcacgacgaagattaagcccagaatcgtgggcggaactgcgtcggtgcgcggcgaatggccttggcaggtcactttgcacaccacctcgccaactcaacgccatctgtgcggtgggtccatcatcggtaaccagtggatcctgaccgcggcgcactgcttctatggcgtggagtccccaaaaatcttgcgggtgtacagcggaattctcaatcagtccgaaatcaaggaggatacgagcttcttcggtgtgcaagagatcatcatacatgaccaatacaagatggcagaatcaggatacgacatcgcactcctcaagctcgaaaccaccgtgaactacaccgattcgcagcgacctatctgcctgccgtccaaaggggaccgaaatgtgatctacactgactgttgggtgactgggtggggttaccgcaagttgagggataagatccaaaataccctccaaaaggcaaagatcccactggtgactaatgaagagtgccaaaagcggtaccgagggcacaagattacccataagatgatctgcgctggataccgggaaggaggaaaggatgcgtgcaagggcgactcggggggaccacttagctgcaaacataatgaggtgtggcacctcgtcggcatcaccagctggggggaaggatgtgcgcagagggagcgcccaggagtttacactaatgttgtggagtacgtggattggattctggaaaagacccaggccgtc

SEQ ID NO: 2079 - DNA, 1875 bp, Artificial Sequence
  derived and/or modified sequence
atgatattcctgtatcaagtcgttcactttattctcttcacatccgtgtctggggaatgcgttacccagttacttaaagatacgtgtttcgaaggtggtgatatcactaccgtcttcactccctctgccaaatactgtcaggtcgtatgcacctaccatcctcgatgtcttctgttcacatttaccgccgaaagcccttccgaagaccccactcggtggttcacctgcgtactaaaggactctgtcacggaaaccttgcctcgtgtcaaccgcaccgccgccattagcggttatagtttcaagcagtgtagccaccagatcagcgcttgtaacaaggacatttatgtggatctcgacatgaagggcatcaattataactcctccgtggctaagagcgcccaggagtgtcaggaacgctgtacagacgacgtacattgccattttttcacgtacgcaactaggcagttcccgtccctggagcacagaaacatttgtctactgaaacacacgcagacggggacccccacaaggataaccaagctggataaggtggtcagtggcttttcccttaaaagctgcgccctctccaatttggcgtgtattcgggacatatttccaaataccgttttcgctgattctaacattgacagcgtgatggcacctgatgcctttgtctgtggcaggatttgtacccatcacccagggtgtctgttttttaccttttttagccaggaatggcctaaggaaagtcagagaaacctatgcttgcttaaaactagcgagtcaggcctcccctcgactaggatcaagaagtcaaaggctctctcaggattctctctccagagttgccgacacagcattcctgtcttctgccatagttccttttaccacgatacagacttcctgggggaggagttggatatcgtggcggcgaagtctcatgaggcctgccagaagctctgtacaaatgcagttagatgtcagttttttacttatacgccagcccaggcaagctgtaacgagggcaaaggcaaatgttacttaaagctgtctagtaatgggagccctacgaaaattttgcatggccgcggcgggattagtgggtatactttgagattgtgcaagatggacaatgaatgcacgacaaaaattaaaccgcgaatcgttggcggcaccgctagcgtgcgaggagagtggccttggcaagtgacactgcacactacctctccgacacagagacacctttgcggcggatcaatcatcggaaaccagtggattctcaccgccgctcactgtttctacggagtggaaagccccaagatactgagggtgtactcgggcattctcaaccagagtgagataaaagaggatacttctttcttcggcgtgcaagagattatcatacacgatcagtataaaatggcggagtctgggtatgatattgcacttctgaagctggaaactacagtaaattacacagacagccaacgcccaatatgcctcccaagtaaaggggatcgcaacgttatttacacagactgctgggtaactgggtggggctatcgaaagctgcgggacaagatccagaataccctgcagaaggccaaaatccccctggttacaaacgaggaatgccagaaacgatatcgtggccataagattacccataagatgatatgcgcgggttaccgcgaaggtggtaaggacgcatgtaagggcgattcaggcggtcccctttcttgcaaacacaacgaggtctggcatctagtaggcattacttcgtggggggagggttgtgcccagcgcgaaagacccggggtttatacaaacgtggttgagtatgtcgactggatccttgagaaaacccaggctgtt

SEQ ID NO: 2080 - DNA, 1875 bp, Artificial Sequence
  derived and/or modified sequence
atgatcttcctgtaccaagtggtccatttcatcctgttcaccagtgtgtccggagagtgtgtgacccagttgctgaaggatacctgtttcgagggaggagacattactaccgtgttcactccgtcagcgaaatactgccaagttgtgtgtacctaccatccgcgctgtctcttgtttacttttactgccgagtcgccttcggaggacccgactcggtggttcacctgcgtgcttaaggattcggtcactgaaaccctgccgcgcgtcaatagaaccgccgcgattagcggttattcgttcaaacaatgctcacatcagatttctgcctgcaacaaggacatctacgtcgatttggatatgaagggaatcaactacaactcctcagtggccaagtcggctcaagaatgccaggaacgctgtactgacgacgtgcattgccatttctttacctacgctacgcgtcaatttccctcactggagcatcgaaacatctgccttctcaaacacacccaaactggaactcccacccgcatcaccaaactcgacaaagtcgtctcaggattctcgctcaagtcatgcgccctcagcaaccttgcatgcatccgggacatttttccgaataccgtgttcgcggactcaaatatcgatagcgttatggccccagatgctttcgtgtgcggcagaatctgcacgcaccacccgggctgcctcttcttcactttcttttcgcaggaatggcctaaagaatcgcagcgtaatctctgcctcctgaaaacctcggagtcaggattgccaagtactcgcatcaagaagtcaaaagcgctttccggcttcagcctgcaatcctgtcgccactcgatcccggtcttttgccattccagcttctaccacgacactgactttctgggcgaggaactggatattgtggcggcgaaatcgcacgaagcctgccagaagttgtgtaccaacgccgtgagatgccagttctttacgtatactcctgcccaggcgtcatgcaatgagggcaagggtaagtgctacctgaaactctcttccaatggttcgccgaccaagatactgcatggccgcggagggatctccggatacaccttgcggctgtgcaagatggacaacgagtgtactactaagatcaagccacggatcgttggagggactgcctccgtcaggggagaatggccgtggcaggtgacccttcataccacctccccaacccagcggcacctgtgtggagggtcgatcattggtaatcagtggatccttactgcagcccattgcttctacggagtcgaaagcccaaagatcttgcgcgtttactcggggatcctgaaccagagcgaaatcaaggaggatacgtcgttcttcggagtccaggaaatcattattcatgaccaatacaagatggcggaatcgggttacgatatcgcactgctgaaactggaaactactgtgaactataccgattcgcagcgcccgatctgcctcccgagtaagggcgaccggaatgtgatttacaccgactgctgggtcaccggatggggatacagaaaacttagggacaagatccaaaataccttgcagaaggcaaagatcccacttgtgaccaacgaggaatgccagaaaaggtaccgcgggcacaagatcacccataagatgatttgcgcaggctatcgcgagggaggaaaggacgcttgcaagggcgactccggcggtccactttcctgcaagcataacgaggtgtggcatctggtgggaatcacttcatggggagaaggttgtgctcagcgggaaagaccgggagtctacaccaacgtggtggagtacgtggattggatccttgaaaagacgcaagccgtg

SEQ ID NO: 2081 - DNA, 1875 bp, Artificial Sequence
  derived and/or modified sequence
atgatatttctttaccaggtggtgcactttattctctttacttccgtgagcggggagtgtgtgacgcagctgttgaaggatacctgttttgagggaggagacattaccactgtgtttaccccttcggcaaagtattgccaggtcgtgtgtacctaccatcctcgttgcttgctgtttacgtttaccgctgaatctcccagcgaagatccaactcggtggttcacttgcgtcctgaaagacagcgttactgaaacgctgccacgtgtgaacagaaccgcggcaatttccggatactcgttcaagcaatgctcgcaccaaatttctgcatgcaacaaagacatatatgtggacctggacatgaaggggattaactataactcctccgtcgcaaagtcggcacaggagtgtcaagagcggtgtactgatgatgtccattgccatttctttacttacgcgactcggcaattcccttcccttgaacataggaacatatgtctgctgaagcatactcagaccggtactcctacccggattaccaaattggacaaggtcgtgtcgggatttagccttaagtcgtgtgctctgtctaacctggcatgtattcgagatatcttcccaaataccgtgttcgcggattcaaacattgactcagtaatggcgcctgatgcctttgtgtgtggaagaatctgtactcatcaccccggctgtttgtttttcaccttcttttcgcaagaatggccgaaggaatcgcagcgcaacttgtgccttcttaagactagcgaatccggacttccatcaactcgcattaagaagtctaaggccctttcaggctttagccttcagtcgtgtagacattcgattcctgtgttttgccactcatccttttaccatgacactgactttctgggtgaggaactggacatcgttgcagctaaaagtcacgaggcatgtcagaaactgtgcaccaacgcagtgcgctgccaattcttcacttacaccccagcacaggcatcatgtaacgaaggaaaagggaagtgctatcttaagctcagctcaaatggatcgcccaccaagattctgcatgggagaggtggcatctcgggttacacgctgcgattgtgcaagatggataatgaatgtaccactaaaatcaagcctcggatcgtgggaggaactgcctccgtaagaggagaatggccctggcaggtcaccttgcatacgactagccctactcaaagacacctctgtggcgggtccattattggaaatcaatggatactgacggcagctcattgtttctacggcgtggagagcccgaaaatactccgtgtgtactcggggatcttgaaccaatcggagattaaagaggatacttcgttcttcggtgtccaagagataatcatccatgatcagtacaaaatggccgagagcggttacgatattgccctgctcaaactcgaaactactgtcaattacacggattcccaacgccccatctgcttgcctagcaaaggagataggaacgtcatatacacggactgctgggtgactggttggggctaccgtaaacttagagataagatacaaaatactctgcaaaaggcgaaaattccacttgtcaccaatgaagaatgtcagaagcggtaccgaggacataagattactcacaagatgatctgtgcaggatacagagagggaggtaaggatgcatgcaagggagactcaggggggccactcagctgtaagcacaatgaagtgtggcatctcgtgggcatcacttcttggggcgagggatgcgcgcaaagggaacggcccggagtgtacaccaacgtggtggaatacgtcgattggatcctggaaaagacccaggcagtg

SEQ ID NO: 2082 - RNA, 2021 nt, Artificial Sequence
  derived and/or modified sequence
gggaaauaagagagaaaagaagaguaagaagaaauauaagagccaccaugaucuuccucuaucaggucguccauuucaucuuguucacgucgguguccggcgaaugcgucacgcaguuguugaaggacacgugcuuugaaggaggagacauuacaacgguguuuacgccauccgcgaaauacugucagguggucuguaccuaccauccccggugucugcuguuuacauucacugccgaauccccuagcgaggaccccacucggugguucacgugugugcuuaaggauuccgucaccgaaacacuuccucgggucaaucggacagcggcgaucucgggguacucguucaagcaaugcucacaccagauuuccgccugcaacaaagacaucuacgucgaucucgauaugaaaggcaucaacuacaacuccucgguggcaaagagcgcacaagagugucaagagcgaugcacagacgacgugcacugccacuucuucacauacgcgaccaggcaguucccaucgcuggaacacagaaacaucugccuccucaagcauacucagacgggaacucccaccaggauuacgaagcuggauaaggugguaucgggauuuucccuuaagucaugcgcccuuagcaaccuggcguguaucagggacaucuuucccaauacaguauuugccgauuccaauauugacucagugauggccccugacgccuucguguguggccgcaucugcacacaucaccccggaugucucuucuucaccuucuuuagccaggaguggcccaaggagagccagaggaaccucugccuucucaaaacgucggagucaggauugcccucgacgcggaucaagaaaucaaaggcgcuuucgggguucucguugcagagcugucgccauagcauuccagucuuuugucacucaucguuuuaucacgacacugauuuucucggggaagaguuggacaucguggcagcaaagucgcaugaagcgugccagaaguuguguaccaacgccguccgcugccaguuuuucacauacacuccggcccaggcuucgugcaacgaggggaagggaaagugcuauuugaagcucagcuccaauggcucgccuaccaaaauucuucacggacgaggcggaaucucaggguacaccuugagauuguguaagauggacaacgaauguacuacaaagaucaaaccgcgaauuguaggcggaacggcgucgguccggggagaauggccguggcagguaacauugcauacgaccucccccacccagagacacuugugcggugggucaauuaucgggaaucaguggaucuugaccgcagcccacugcuuuuauggaguggaguccccgaaaaucuugaggguguacucagggaucuugaaccagucggaaaucaaggaggacacaucauucuucgggguccaagagaucaucauucacgaucaguacaagauggcggagucgggguacgauauugcgcuucugaaauuggaaaccaccgucaacuacacugauucgcagcggccgaucugccugccuagcaaaggggaccggaaugucaucuacacagauuguuggguaacggguugggguuaucgcaagcugcgagacaaaauccagaauacacugcaaaaagcgaaaauuccguuggugacuaacgaggagugucagaagagauauagaggucacaaaaucacccacaagaugaucugcgccggauaccgggaaggggguaaagacgcauguaaaggagauagcgguggcccguugagcugcaagcauaacgagguauggcaccucguggguauuacuucauggggagaaggcugugcgcagcgcgagaggccgggugucuauacuaauguaguagaguauguggacuggaucuuggagaaaacucaagcagucugaagcgcugccuucugcggggcuugccuucuggccaugcccuucuucucucccuugcaccuguaccucuuggucuuugaauaaagccugaguaggaag

SEQ ID NO: 2083 - RNA, 1722 nt, Artificial Sequence
  derived and/or modified sequence
augauauuucucuaucaaguggugcacuucauucucuucacauccgugucaggcgagugcgugacgcaauugcugaaagacacaugcuucgaaggcggcgauauaacaaccguguucacccccuccgccaaauauugucaaguggucuguaccuaucauccucggugccugcuauucaccuucacagccgagagucccucagaggauccaacgagaugguucacuugcgucuugaaagacuccguuacugagacacugccaaggguaaaccguacagcagcaauaagcgguuacucuuucaaacaguguagucaccagauaucagucaauaauauuugcuugcucaagcauacccagacaggcacaccaacccggauaaccaaguuagacaaaguugugagcgguuucagcuugaagucuugugcacuuuccaauuuggcuuguauacgugauauuuuuccgaacaccguuuuugccgacagcaacauugacucuguaauggcccccgaugcauuugugugcggucgaauuuguacgcaccauccuggcugucuauucuuuacuuucuucagucaggaguggccaaaggagucucagaggaaucugugcuugcuuaaaacuucggaguccggacuaccauccacuaggauaaagaagucgaaggcccucaguggguucucccugcaauccugucggcacuccaucccagucuuuugccauagcuccuucuaccacgauacugacuuucugggcgaagaacuugacauuguggccgccaagucacacgaagccugccaaaaacuuuguaccaacgcugugcguugucaguucuuuacguacacgccugcacaggcaucauguaacgagggaaaaggaaaauguuauuuaaaacuuagcucaaauggcagcccaacgaaaaucuuacacggaaggggcggcaucucaggguacacucugagacuuugcaaaauggauaaugaaugcacaacgaagaucaaaccaaggauagucggaggaacagccaguguccgaggagaauggccguggcaagugacucuacauacgacuagcccuacgcagcgccaucugugcgggggcuccauuauuggcaaucaauggaucuugacagcugcccacugcuucuacggcguggagucgcccaaaauucuucggguguauagcggaauccuuaaucagucagagauaaaggaggauacuagcuucuuuggcgugcaggagaucauaauucaugaccaguauaagauggcagaaucaggauaugauauagcccugcuaaaauuggagaccacugugaauuacacugauagccagcggcccauuugccugccgucuaaaggagaucguaacgugaucuauacugauuguugggucacgggauggggcuacagaaaacuucgggacaagauccagaacacucugcagaaggccaaaauuccccucgugaccaacgaagagugucaaaagcgcuaccgggggcacaaaaucacccauaagaugaucugugccggauacagggaggggggaaaggacgcauguaagggagauucuggcgggccacugucuuguaaacacaaugaaguauggcaucugguggggaucacuagcuggggggaaggcugcgcccagcgcgaacgcccuggaguuuacacuaacgugguagaauacguugauuggauuuuagaaaagacucaggcuguauag

SEQ ID NO: 2084 - RNA, 1878 nt, Artificial Sequence
  derived and/or modified sequence
augauauuuuuauaccaaguugugcauuuuaucuuguucacaucagugucaggagagugugucacccagcugcugaaagacacuugcuuugaaggaggugacaucaccaccgucuucaccccuucagcaaaguauugccaggugguguguaccuaccacccucggugucugcuguuuaccuuuacugccgaauccccuucagaagauccuacgagaugguucacauguguacuuaaagacuccgucacugagaccuugccaagaguuaaccgcacagcagcgauauccggcuacuccuucaaacagugcagccaucagauauccgccuguaacaaagauauuuacgucgaucuggacaugaaaggaauuaacuacaauaguagcguugccaaauccgcccaggagugccaagagcgcugcacugaugauguccacugccacuucuucacuuacgccacacgccaauuucccucacuggaacacagaaacaucugucugcugaagcacacucagacuggcacccccacacguauaaccaaacucgauaagguuguuuccggcuucucacuuaaaucuugugcccucucgaaccuggccuguauaagggacaucuucccaaauaccguguucgccgacucuaacaucgauagcgugauggcacccgacgccuucguuuguggacgaauuugcacccaccacccuggaugucuguucuuuaccuuuuucagccaggaguggcccaaggagucgcagcggaaccugugccugcugaagacaucagagucuggccugccaagcacccgcaucaagaaaagcaaagcccucagcggguuuucauuacagucaugccgacacucaauucccgucuuuugucauagcucuuuuuaccaugauacugacuuccugggagaggaacuggacaucguggcagcuaaaagucacgaagcuugucaaaaauuauguaccaaugccgugcgcugccaguuuuucacauacacaccggcucaggcguccugcaacgaggggaaaggaaaguguuaccuuaagcuuagcaguaacggcuccccaaccaaaauacugcacggacgcgguggcauuucuggcuacacgcuucgccuguguaaaauggacaaugagugcaccacaaagaucaaaccacggaucgugggcggcaccgccucgguccgcggcgaguggccguggcaggugacacuccacacaaccucgcccacucaaagacauuugugcgggggcagcaucauaggcaaccaguggauucucacagcugcacacuguuucuacggcgucgagucaccaaaaauacuccgugucuauagugggauucugaaucaguccgagauaaaggaagauacaaguuuuuuugggguccaggagaucauuauucaugaucaguacaaaauggccgaauccggauaugacauugcauuacugaaacuugaaaccacggucaauuacacagauucccagaggccuauuuguuugccaaguaagggcgauagaaaugugauuuacacagacugcugggugaccggauggggauacagaaaacugagggauaagauccagaauacucugcagaaggcgaagauaccccuagugacuaacgaagagugccagaagcgguaccgcggacauaaaaucacacauaaaaugauuugcgcaggauacagggaggguggcaaagaugccugcaagggugacaguggcggcccccucucuuguaagcacaacgaaguguggcaccugguuggcaucacaucguggggagaaggaugcgcccaaagggagaggccuggggucuacacaaauguaguggaguacguugacuggauccuugagaagacacaagcuguguag

SEQ ID NO: 2085 - RNA, 633 nt, Artificial Sequence
  derived and/or modified sequence
uaaucuggauucucucugaaaucuugugcucugucaaaucuugcuugcauacgcgauaucuuccccaauacugucuucgccgacucuaacaucgauucuguaauggcccccgaugcuuucgucuguggacggauauguacccaucaccccgggugucuuuucuuuacauucuuuagucaggaguggcccaaagaaucccagcguaaucugugcuugcugaagacaucugaaucaggcuuacccucgacgcggauaaagaaauccaaagcacuuaguggauucucgcugcagucuugucggcauucuaucccugucuucugucauagcagcuuuuaucacgauacggauuuucugggcgaggaacuggacaucguggccgcaaagucccacgaagcgugucagaaguuaugcacaaacgcagugcggugccaguucuuuacguauacccccgcccaagcaucgugcaacgagggaaaggggaaguguuauuugaagcuguccucuaauggcucaccaaccaagauccugcacgguagagguggcauaucaggcuauacacuccgccucuguaaaauggacaaugaacugaggggagcaccaaugaaaauaucuggcuggcuuaaaacaucguag

SEQ ID NO: 2086 - RNA, 1722 nt, Artificial Sequence
  derived and/or modified sequence
augaucuucuuguaccaggucguucacuucauccuguuuacuucugucucuggcgagugcguuacucagcuucugaaagacacaugcuuugaaggcggagacauuacuacuguguuuaccccgucugcuaaguauugucaggugguguguacuuaucauccccgcuguuugcuguucacguucaccgcagaaucaccuucagaagaucccacacguugguuuacuuguguucuaaaagauagcgugacugagacccucccccgugucaauagaacugcugcuauuucuggguauuccuucaagcaauguucucaucagauuuccgugaacaacaucugucuucugaaacacacacagacuggaacacccacucgcauuaccaagcuugacaaaguggugagcggcuuuagccuuaaguccugcgcucugucuaaccuggcauguauaagagacaucuuccccaauaccgucuucgccgacucgaauaucgauuccguuauggcgccugacgcguuugucugcggucgcauaugcacucaucaccccggauguuuauuuuucacauuuuucucacaggaguggccaaaggagucccaaagaaaucugugcuugcuuaaaacuucggaguccggacuaccauccacuaggauaaagaagucgaaggcccucaguggguucucccugcaauccugucggcacuccaucccagucuuuugccauagcuccuucuaccacgauacugacuuucugggcgaagaacuugacauuguggccgccaagucacacgaagccugccaaaaacuuuguaccaacgcugugcguugucaguucuuuacguacacgccugcacaggcaucauguaacgagggaaaaggaaaauguuauuuaaaacuuagcucaaacggauccccaacuaaaauccuacacggcagaggcggcaucagcggauacacucuccgacucugcaaaauggacaacgaguguaccacaaagaucaaaccgagaauugucggcggaacggcaucugugagaggggaguggccauggcaggugacgcuccauacuacgucuccaacucagaggcaucuaugcggaggaucaaucauaggcaaccaauggauccuuacugcugcccauuguuuuuacggaguggaaagucccaaaauccugagaguuuauagcgguauacugaaccagagcgagaucaaggaggauacaagcuuuuucggagugcaggaaauaaucauacaugaucaguauaagauggccgaguccggcuacgacauugccuugcucaaacuugagacgaccgugaauuauaccgacagccagcgaccgaucugccuacccucgaagggagaccgcaacgucaucuacacugauuguugggugacaggauggggauacagaaaacuacgugacaaaauacagaauacucuacagaaggcuaagauuccgcuaguuacaaacgaggaaugucagaaaagguaccguggccacaaaauuacacacaagaugauaugcgcaggauaucgggaaggcggaaaagacgcuuguaagggagauagcggaggaccacugucuuguaagcacaacgaaguguggcaccuuguggguaucacauccuggggggaaggcugugcgcaaagagaaagaccuggcgucuacacaaacguuguugaauauguugacuggauucuugagaagacucaggcggucuag

SEQ ID NO: 2087 - RNA, 1878 nt, Artificial Sequence
  derived and/or modified sequence
augauuuuuuuguaucagguaguucauuucaucuuauucacauccguaaguggcgaguguguaacucaguugcugaaagacacaugcuucgaggggggggauaucacgacaguauuuacgccaagugccaaauauugccaaguuguaugcacauaccauccccguuguuugcuguucaccuucacugcagagagccccuccgaggaucccacucgcugguuuacaugcgugcuuaaagauucggugacagaaacacuuccaagggucaauaggacagcggccauuucaggguauucauucaaacagugcagccaucagauauccgccuguaacaaagauauuuacgucgaucuggacaugaaaggaauuaacuacaauaguagcguugccaaauccgcccaggagugccaagagcgcugcacugaugauguccacugccacuucuucacuuacgccacacgccaauuucccucacuggaacacagaaacaucugucugcugaagcacacucagacuggcacccccacacguauaaccaaacucgauaagguuguuuccggcuucucacuuaaaucuugugcccucucgaaccuggccuguauccgugacauuuuccccaacacugucuucgcugauucaaacaucgauucuguaauggcuccagaugcuuucguguguggccgaaucugcacucaccaucccggcugucuauucuucacuuucuuuucacaagaguggccaaaagagucacagcguaaucuuugcuuauugaaaaccagcgagaguggauuaccguccacacgcaucaaaaagucuaaagcguuauccgguuucucucugcaaagcuguagacacuccaucccagucuucugccacucaucuuucuaucacgauacugauuuccugggcgaagagcucgauauuguggcagccaaaucacacgaagccugccagaagcucuguaccaacgcagugaggugccaauucuucacuuacacuccagcccaggcaucuuguaaugagggcaaaggaaagugcuaccuuaaacugagcuccaacgguucaccuacuaagauucuccacggacgcggagguauuucaggauacacccuacgguuauguaagauggauaaugaguguacaaccaaaauaaagccuagaaucgugggaggcacagccagcgugagaggggaguggccuuggcaagugacccuccacaccacuuccccuacucagagacaccugugcggcgguucaaucaucggaaaucaguggauucucacagcagcccacugcuucuauggcguagaguccccuaaaauacuuagagucuauucuggaauucugaaccagagcgaaaucaaggaggauaccucauuuuucggaguacaggagaucaucauccaugaccaguacaaaauggcugaguccgguuacgauauagcucugcucaaauuggaaaccacugugaacuauacugauagccagagaccaauuugucugccuucgaaaggggaccgcaauguaaucuauaccgacuguugggugacaggcuggggauacagaaaacugcgagacaagauccagaacacauuacaaaaggccaaaaucccgcuggugacuaaugaggagugccagaaaagauacagaggacacaaaauuacucauaagaugaucugugcaggauaucgggaggggggcaaagaugccugcaagggagauagugggggaccccugagcuguaaacauaaugaaguguggcacuuagucgguauuacuuccuggggugaagggugcgcacaaagggagcgccccgggguauauacgaauguuguagaguacguggacuggaucuuagaaaaaacucaagcuguguag

SEQ ID NO: 2088 - RNA, 633 nt, Artificial Sequence
  derived and/or modified sequence
uaaucuggauucucucugaaaucuugugcucugucaaaucuugcuugcauacgcgauaucuuccccaauacugucuucgccgacucuaacaucgauucuguaauggcccccgaugcuuucgucuguggacggauauguacccaucaccccgggugucuuuucuuuacauucuuuagucaggaguggcccaaagaaucccagcguaaucugugcuugcugaagacaucugaaucaggcuuacccucgacgcggauaaagaaauccaaagcacuuaguggauucucgcugcagucuugucggcacagcauccccguguuuugccauucuuccuucuaccaugacacugacuuucugggcgaggagcuggauauaguggccgcaaaaucccaugaggcaugucaaaaacuuuguaccaaugcaguccgaugccaauuuuucaccuauacaccagcucaggccucaugcaaugaaggcaaggggaaauguuaccucaaacugucaagcaacggaagucccacgaagauccuccacggccgcggcggcauuucuggcuauacacuacggcucugcaagauggacaaugaacugaggggcgcgccaaugaaaauaucuggcuggcuuaaaacaucguag

SEQ ID NO: 2089 - protein, 732 aa, Artificial Sequence
  derived and/or modified sequence
MSETSRTAFGGRRAVPPNNSNAAEDDLPTVELQGVVPRGVNLQEFLNVTSVHLFKERWDTNKVDHHTDKYENNKLIVRRGQSFYVQIDFSRPYDPRRDLFRVEYVIGRYPQENKGTYIPVPIVSELQSGKWGAKIVMREDRSVRLSIQSSPKCIVGKFRMYVAVWTPYGVLRTSRNPETDTYILFNPWCEDDAVYLDNEKEREEYVLNDIGVIFYGEVNDIKTRSWSYGQFEDGILDTCLYVMDRAQMDLSGRGNPIKVSRVGSAMVNAKDDEGVLVGSWDNIYAYGVPPSAWTGSVDILLEYRSSENPVRYGQCWVFAGVFNTFLRCLGIPARIVTNYFSAHDNDANLQMDIFLEEDGNVNSKLTKDSVWNYHCWNEAWMTRPDLPVGFGGWQAVDSTPQENSDGMYRCGPASVQAIKHGHVCFQFDAPFVFAEVNSDLIYITAKKDGTHVVENVDATHIGKLIVTKQIGGDGMMDITDTYKFQEGQEEERLALETALMYGAKKPLNTEGVMKSRSNVDMDFEVENAVLGKDFKLSITFRNNSHNRYTITAYLSANITFYTGVPKAEFKKETFDVTLEPLSFKKEAVLIQAGEYMGQLLEQASLHFFVTARINETRDVLAKQKSTVLTIPEIIIKVRGTQVVGSDMTVTVEFTNPLKETLRNVWVHLDGPGVTRPMKKMFREIRPNSTVQWEEVCRPWVSGHRKLIASMSSDSLRHVYGELDVQIQRRPSM

SEQ ID NO: 2090 - protein, 138 aa, Artificial Sequence
  derived and/or modified sequence
MSETSRTAFGGRRAVPPNNSNAAEDDLPTVELQGVVPRGVNLQEFLNVTSVHLFKERWDTNKVDHHTDKYENNKLIVRRGQSFYVQIDFSRPYDPRRDLFRVEYVIGRYPQENKGTYIPVPIVSELQSGKWGAKIVMR

SEQ ID NO: 2091 - protein, 626 aa, Artificial Sequence
  derived and/or modified sequence
MSETSRTAFGGRRAVPPNNSNAAEDDLPTVELQGVVPRGVNLQGRYPQENKGTYIPVPIVSELQSGKWGAKIVMREDRSVRLSIQSSPKCIVGKFRMYVAVWTPYGVLRTSRNPETDTYILFNPWCEDDAVYLDNEKEREEYVLNDIGVIFYGEVNDIKTRSWSYGQFEDGILDTCLYVMDRAQMDLSGRGNPIKVSRVGSAMVNAKDDEGVLVGSWDNIYAYGVPPSAWTGSVDILLEYRSSENPVRYGQCWVFAGVFNTFLRCLGIPARIVTNYFSAHDNDANLQMDIFLEEDGNVNSKLTKDSVWNYHCWNEAWMTRPDLPVGFGGWQAVDSTPQENSDGMYRCGPASVQAIKHGHVCFQFDAPFVFAEVNSDLIYITAKKDGTHVVENVDATHIGKLIVTKQIGGDGMMDITDTYKFQEGQEEERLALETALMYGAKKPLNTEGVMKSRSNVDMDFEVENAVLGKDFKLSITFRNNSHNRYTITAYLSANITFYTGVPKAEFKKETFDVTLEPLSFKKEAVLIQAGEYMGQLLEQASLHFFVTARINETRDVLAKQKSTVLTIPEIIIKVRGTQVVGSDMTVTEVCRPWVSGHRKLIASMSSDSLRHVYGELDVQIQRRPSM

SEQ ID NO: 2092 - DNA, 2196 bp, Artificial Sequence
  derived and/or modified sequence
atgagcgagaccagccgcaccgccttcggcggccgccgcgccgtgccccccaacaacagcaacgccgccgaggacgacctgcccaccgtggagctgcagggcgtggtgccccgcggcgtgaacctgcaggagttcctgaacgtgaccagcgtgcacctgttcaaggagcgctgggacaccaacaaggtggaccaccacaccgacaagtacgagaacaacaagctgatcgtgcgccgcggccagagcttctacgtgcagatcgacttcagccgcccctacgacccccgccgcgacctgttccgcgtggagtacgtgatcggccgctacccccaggagaacaagggcacctacatccccgtgcccatcgtgagcgagctgcagagcggcaagtggggcgccaagatcgtgatgcgcgaggaccgcagcgtgcgcctgagcatccagagcagccccaagtgcatcgtgggcaagttccgcatgtacgtggccgtgtggaccccctacggcgtgctgcgcaccagccgcaaccccgagaccgacacctacatcctgttcaacccctggtgcgaggacgacgccgtgtacctggacaacgagaaggagcgcgaggagtacgtgctgaacgacatcggcgtgatcttctacggcgaggtgaacgacatcaagacccgcagctggagctacggccagttcgaggacggcatcctggacacctgcctgtacgtgatggaccgcgcccagatggacctgagcggccgcggcaaccccatcaaggtgagccgcgtgggcagcgccatggtgaacgccaaggacgacgagggcgtgctggtgggcagctgggacaacatctacgcctacggcgtgccccccagcgcctggaccggcagcgtggacatcctgctggagtaccgcagcagcgagaaccccgtgcgctacggccagtgctgggtgttcgccggcgtgttcaacaccttcctgcgctgcctgggcatccccgcccgcatcgtgaccaactacttcagcgcccacgacaacgacgccaacctgcagatggacatcttcctggaggaggacggcaacgtgaacagcaagctgaccaaggacagcgtgtggaactaccactgctggaacgaggcctggatgacccgccccgacctgcccgtgggcttcggcggctggcaggccgtggacagcaccccccaggagaacagcgacggcatgtaccgctgcggccccgccagcgtgcaggccatcaagcacggccacgtgtgcttccagttcgacgcccccttcgtgttcgccgaggtgaacagcgacctgatctacatcaccgccaagaaggacggcacccacgtggtggagaacgtggacgccacccacatcggcaagctgatcgtgaccaagcagatcggcggcgacggcatgatggacatcaccgacacctacaagttccaggagggccaggaggaggagcgcctggccctggagaccgccctgatgtacggcgccaagaagcccctgaacaccgagggcgtgatgaagagccgcagcaacgtggacatggacttcgaggtggagaacgccgtgctgggcaaggacttcaagctgagcatcaccttccgcaacaacagccacaaccgctacaccatcaccgcctacctgagcgccaacatcaccttctacaccggcgtgcccaaggccgagttcaagaaggagaccttcgacgtgaccctggagcccctgagcttcaagaaggaggccgtgctgatccaggccggcgagtacatgggccagctgctggagcaggccagcctgcacttcttcgtgaccgcccgcatcaacgagacccgcgacgtgctggccaagcagaagagcaccgtgctgaccatccccgagatcatcatcaaggtgcgcggcacccaggtggtgggcagcgacatgaccgtgaccgtggagttcaccaaccccctgaaggagaccctgcgcaacgtgtgggtgcacctggacggccccggcgtgacccgccccatgaagaagatgttccgcgagatccgccccaacagcaccgtgcagtgggaggaggtgtgccgcccctgggtgagcggccaccgcaagctgatcgccagcatgagcagcgacagcctgcgccacgtgtacggcgagctggacgtgcagatccagcgccgccccagcatg

SEQ ID NO: 2093 - DNA, 414 bp, Artificial Sequence
  derived and/or modified sequence
atgagcgagaccagccgcaccgccttcggcggccgccgcgccgtgccccccaacaacagcaacgccgccgaggacgacctgcccaccgtggagctgcagggcgtggtgccccgcggcgtgaacctgcaggagttcctgaacgtgaccagcgtgcacctgttcaaggagcgctgggacaccaacaaggtggaccaccacaccgacaagtacgagaacaacaagctgatcgtgcgccgcggccagagcttctacgtgcagatcgacttcagccgcccctacgacccccgccgcgacctgttccgcgtggagtacgtgatcggccgctacccccaggagaacaagggcacctacatccccgtgcccatcgtgagcgagctgcagagcggcaagtggggcgccaagatcgtgatgcgc

SEQ ID NO: 2094 - DNA, 2199 bp, Artificial Sequence
  derived and/or modified sequence
atgagcgagaccagcagaaccgccttcggcggcagaagagccgtgccccccaacaacagcaacgccgccgaggacgacctgcccaccgtggagctgcagggcgtggtgcccagaggcgtgaacctgcaggagttcctgaacgtgaccagcgtgcacctgttcaaggagagatgggacaccaacaaggtggaccaccacaccgacaagtacgagaacaacaagctgatcgtgagaagaggccagagcttctacgtgcagatcgacttcagcagaccctacgaccccagaagagacctgttcagagtggagtacgtgatcggcagatacccccaggagaacaagggcacctacatccccgtgcccatcgtgagcgagctgcagagcggcaagtggggcgccaagatcgtgatgagagaggacagaagcgtgagactgagcatccagagcagccccaagtgcatcgtgggcaagttcagaatgtacgtggccgtgtggaccccctacggcgtgctgagaaccagcagaaaccccgagaccgacacctacatcctgttcaacccctggtgcgaggacgacgccgtgtacctggacaacgagaaggagagagaggagtacgtgctgaacgacatcggcgtgatcttctacggcgaggtgaacgacatcaagaccagaagctggagctacggccagttcgaggacggcatcctggacacctgcctgtacgtgatggacagagcccagatggacctgagcggcagaggcaaccccatcaaggtgagcagagtgggcagcgccatggtgaacgccaaggacgacgagggcgtgctggtgggcagctgggacaacatctacgcctacggcgtgccccccagcgcctggaccggcagcgtggacatcctgctggagtacagaagcagcgagaaccccgtgagatacggccagtgctgggtgttcgccggcgtgttcaacaccttcctgagatgcctgggcatccccgccagaatcgtgaccaactacttcagcgcccacgacaacgacgccaacctgcagatggacatcttcctggaggaggacggcaacgtgaacagcaagctgaccaaggacagcgtgtggaactaccactgctggaacgaggcctggatgaccagacccgacctgcccgtgggcttcggcggctggcaggccgtggacagcaccccccaggagaacagcgacggcatgtacagatgcggccccgccagcgtgcaggccatcaagcacggccacgtgtgcttccagttcgacgcccccttcgtgttcgccgaggtgaacagcgacctgatctacatcaccgccaagaaggacggcacccacgtggtggagaacgtggacgccacccacatcggcaagctgatcgtgaccaagcagatcggcggcgacggcatgatggacatcaccgacacctacaagttccaggagggccaggaggaggagagactggccctggagaccgccctgatgtacggcgccaagaagcccctgaacaccgagggcgtgatgaagagcagaagcaacgtggacatggacttcgaggtggagaacgccgtgctgggcaaggacttcaagctgagcatcaccttcagaaacaacagccacaacagatacaccatcaccgcctacctgagcgccaacatcaccttctacaccggcgtgcccaaggccgagttcaagaaggagaccttcgacgtgaccctggagcccctgagcttcaagaaggaggccgtgctgatccaggccggcgagtacatgggccagctgctggagcaggccagcctgcacttcttcgtgaccgccagaatcaacgagaccagagacgtgctggccaagcagaagagcaccgtgctgaccatccccgagatcatcatcaaggtgagaggcacccaggtggtgggcagcgacatgaccgtgaccgtggagttcaccaaccccctgaaggagaccctgagaaacgtgtgggtgcacctggacggccccggcgtgaccagacccatgaagaagatgttcagagagatcagacccaacagcaccgtgcagtgggaggaggtgtgcagaccctgggtgagcggccacagaaagctgatcgccagcatgagcagcgacagcctgagacacgtgtacggcgagctggacgtgcagatccagagaagacccagcatgtag

SEQ ID NO: 2095 - DNA, 417 bp, Artificial Sequence
  derived and/or modified sequence
atgagcgagaccagcagaaccgccttcggcggcagaagagccgtgccccccaacaacagcaacgccgccgaggacgacctgcccaccgtggagctgcagggcgtggtgcccagaggcgtgaacctgcaggagttcctgaacgtgaccagcgtgcacctgttcaaggagagatgggacaccaacaaggtggaccaccacaccgacaagtacgagaacaacaagctgatcgtgagaagaggccagagcttctacgtgcagatcgacttcagcagaccctacgaccccagaagagacctgttcagagtggagtacgtgatcggcagatacccccaggagaacaagggcacctacatccccgtgcccatcgtgagcgagctgcagagcggcaagtggggcgccaagatcgtgatgagatag

SEQ ID NO: 2096 - DNA, 1881 bp, Artificial Sequence
  derived and/or modified sequence
atgagcgagaccagcagaaccgccttcggcggcagaagagccgtgccccccaacaacagcaacgccgccgaggacgacctgcccaccgtggagctgcagggcgtggtgcccagaggcgtgaacctgcagggcagatacccccaggagaacaagggcacctacatccccgtgcccatcgtgagcgagctgcagagcggcaagtggggcgccaagatcgtgatgagagaggacagaagcgtgagactgagcatccagagcagccccaagtgcatcgtgggcaagttcagaatgtacgtggccgtgtggaccccctacggcgtgctgagaaccagcagaaaccccgagaccgacacctacatcctgttcaacccctggtgcgaggacgacgccgtgtacctggacaacgagaaggagagagaggagtacgtgctgaacgacatcggcgtgatcttctacggcgaggtgaacgacatcaagaccagaagctggagctacggccagttcgaggacggcatcctggacacctgcctgtacgtgatggacagagcccagatggacctgagcggcagaggcaaccccatcaaggtgagcagagtgggcagcgccatggtgaacgccaaggacgacgagggcgtgctggtgggcagctgggacaacatctacgcctacggcgtgccccccagcgcctggaccggcagcgtggacatcctgctggagtacagaagcagcgagaaccccgtgagatacggccagtgctgggtgttcgccggcgtgttcaacaccttcctgagatgcctgggcatccccgccagaatcgtgaccaactacttcagcgcccacgacaacgacgccaacctgcagatggacatcttcctggaggaggacggcaacgtgaacagcaagctgaccaaggacagcgtgtggaactaccactgctggaacgaggcctggatgaccagacccgacctgcccgtgggcttcggcggctggcaggccgtggacagcaccccccaggagaacagcgacggcatgtacagatgcggccccgccagcgtgcaggccatcaagcacggccacgtgtgcttccagttcgacgcccccttcgtgttcgccgaggtgaacagcgacctgatctacatcaccgccaagaaggacggcacccacgtggtggagaacgtggacgccacccacatcggcaagctgatcgtgaccaagcagatcggcggcgacggcatgatggacatcaccgacacctacaagttccaggagggccaggaggaggagagactggccctggagaccgccctgatgtacggcgccaagaagcccctgaacaccgagggcgtgatgaagagcagaagcaacgtggacatggacttcgaggtggagaacgccgtgctgggcaaggacttcaagctgagcatcaccttcagaaacaacagccacaacagatacaccatcaccgcctacctgagcgccaacatcaccttctacaccggcgtgcccaaggccgagttcaagaaggagaccttcgacgtgaccctggagcccctgagcttcaagaaggaggccgtgctgatccaggccggcgagtacatgggccagctgctggagcaggccagcctgcacttcttcgtgaccgccagaatcaacgagaccagagacgtgctggccaagcagaagagcaccgtgctgaccatccccgagatcatcatcaaggtgagaggcacccaggtggtgggcagcgacatgaccgtgaccgaggtgtgcagaccctgggtgagcggccacagaaagctgatcgccagcatgagcagcgacagcctgagacacgtgtacggcgagctggacgtgcagatccagagaagacccagcatgtag

SEQ ID NO: 2097 - DNA, 2342 bp, Artificial Sequence
  derived and/or modified sequence
gggaaataagagagaaaagaagagtaagaagaaatataagagccaccatgagcgagacttcgcggacggcctttggtggacggagggccgtgcctccgaacaattcaaatgcagccgaggacgatctgccgacggtcgaattgcagggcgtcgtaccacgcggagtgaatctccaagagttccttaacgtgacctcggtacatctgtttaaggagcggtgggacacgaataaggtggatcatcacaccgacaaatatgaaaacaacaagctcatcgtcagacgcgggcagagcttttatgtccagattgacttctcgcgaccttacgatcccagacgagacttgttccgggtggagtatgtgatcgggaggtatccgcaagagaacaagggaacttacatcccggtccccattgtatcggagcttcagtccgggaagtggggtgcaaagatcgtaatgcgcgaggaccggtcggtgcggttgtccattcagtccagcccaaaatgcatcgtcgggaaatttcggatgtacgtagcggtgtggactccctatggtgtgcttagaacaagccggaaccccgaaactgatacgtacattctctttaacccgtggtgcgaggatgacgcggtctatctggacaacgagaaggagcgcgaggagtacgtgctcaatgacatcggagtgattttctacggagaggtgaatgacatcaagacgcggtcgtggtcgtatgggcagtttgaagatgggattctcgacacctgtctctatgtcatggatagggcgcagatggacctgtcgggaaggggaaaccccatcaaagtctcgcgagtgggtagcgcgatggtaaacgcgaaggacgatgaaggggtcctcgtcggatcatgggacaacatctacgcttacggcgtgccaccgtcggcctggaccgggagcgtcgacatcctgctggaataccggtcaagcgagaacccggtgcgctacgggcagtgttgggtctttgctggtgtctttaacactttccttcgctgtctcgggattcccgcgagaattgtcacgaactacttttcggcacatgataatgatgcgaatcttcaaatggacatctttttggaggaggacggtaatgtcaattcaaaattgacgaaggactccgtgtggaattatcactgttggaatgaggcctggatgactcggcctgatctcccggtgggcttcggtggttggcaggctgtagactcaacaccccaagaaaactccgatggtatgtacagatgcgggcctgcgtcagtgcaggcgattaagcatggacacgtatgcttccagttcgatgcaccctttgtctttgcggaagtgaatagcgaccttatctacatcacagccaaaaaggacgggactcatgtagtggagaacgtcgatgccacacatattggaaagttgattgtaacgaagcagatcggcggtgatggaatgatggacattactgacacatacaagttccaggaggggcaggaagaagaacgccttgcattggaaacggcgttgatgtatggggcgaagaaaccccttaacacagaaggagtgatgaagtcgagaagcaatgtggacatggatttcgaggtggagaatgcagtgctgggaaaagatttcaagttgtcaatcacctttcgcaacaattcccacaatcgatatacaatcacagcatatctctcggccaatatcacattctacacgggcgtgcctaaagcggagttcaagaaagaaacgtttgacgtgacgctcgaacctttgtcgttcaaaaaggaggcagtactcattcaggcgggagagtacatgggccagcttcttgagcaagcgagcctccacttcttcgtaactgcacgcatcaacgaaacccgcgacgtactcgcaaaacagaaatcgacggtgttgacgatccccgaaatcatcatcaaagtgagaggtacacaagtcgtaggctcagatatgaccgtgacagtccagttcactaatcccttgaaagagacactgcggaacgtctgggtccaccttgatggacccggggtcacaaggcccatgaagaaaatgttcagagaaatccgacctaactcgacggtgcaatgggaggaggtatgcaggccgtgggtatccggacaccgaaagctgattgcctcgatgtcgagcgattccctgcggcacgtatacggggagctcgacgtgcagatccagaggcgcccatcaatgtgataagctgccttctgcggggcttgccttctggccatgcccttcttctctcccttgcacctgtacctcttggtctttgaataaagcctgagtaggaag

SEQ ID NO: 2098 - DNA, 2199 bp, Artificial Sequence
  derived and/or modified sequence
atgagcgagacatctagaacagcgttcggtgggcgcagggctgtgcctcctaataactctaacgctgcagaggatgaccttccaacagttgaactccagggcgtagttccacgtggtgtaaacctgcaggagtttctgaacgtgactagcgtgcacttgttcaaggaacgctgggatacgaataaggtcgatcatcacactgacaagtacgagaacaacaagctaattgtgcgcaggggccagagtttctacgtgcagatcgacttctcgcgaccttacgaccctcgccgagacctgtttcgggtggaatatgtgattggcagatatcctcaggaaaataaagggacatatattccagttccgatcgtgtctgagctgcagtctggaaagtggggcgctaaaatagtgatgagggaggaccggtctgtcaggctaagcatccagagtagtcccaagtgcatcgtgggtaaattcaggatgtacgtggctgtctggactccgtatggtgttcttaggacttctagaaacccagagacagacacctacattctgtttaatccttggtgtgaggacgacgccgtttatcttgataacgagaaggaacgggaggaatacgtcttgaacgatataggcgtgatcttttatggcgaggttaacgatattaagacgaggagttggtcgtacggtcagttcgaagatgggatcttagatacatgtttatacgttatggacagagcccagatggacctgtccggccgcggcaacccaatcaaagtaagtcgagtaggcagcgctatggtgaacgctaaggacgacgagggcgtgcttgttggctcatgggacaatatttatgcatacggagtacctccatctgcctggaccggaagtgttgatatcctgctggagtaccgtagtagcgagaatccagtgcgctacggtcagtgttgggtgttcgcaggtgtgtttaacacgtttcttagatgtttgggtatcccagcacgcatcgtcacaaattatttcagtgcacacgataacgatgctaatctccaaatggacatcttcctggaggaagacggtaatgtgaattcaaagctgaccaaagattctgtgtggaattaccactgttggaacgaggcttggatgacaagaccagacctgcccgtgggatttggaggatggcaagcagtggatagcactccccaagaaaacagcgacggcatgtatcgctgcggtccagctagcgtgcaggctattaagcacgggcacgtttgcttccagttcgacgcaccctttgtgttcgcagaggttaattcagatttgatttatattaccgcaaaaaaagacggaacccacgtggtggaaaatgtcgatgccacacacataggcaagttgatagtaacaaagcagatcggcggcgacggcatgatggacatcaccgatacttataaatttcaagagggtcaagaggaagaaaggctagcgctggagactgcgctgatgtatggcgccaagaaaccactgaatacggagggagtgatgaagagcagatccaacgtggacatggactttgaggtcgaaaacgcagtcttgggcaaggatttcaagctgtccattacgtttcgcaataattcgcacaatcgctacacaatcaccgcgtacctctctgctaacattacgttctacactggcgtgccgaaggcagaattcaaaaaagaaacttttgatgtaaccctggaaccactctctttcaagaaggaggctgtgctgatccaagcaggcgaatacatgggccagttactggagcaggcatccctccactttttcgttaccgctcgaatcaatgaaacccgcgacgtgcttgctaagcagaaatccaccgtgcttaccattccagagattatcatcaaggtcaggggcactcaagttgtggggagcgacatgaccgtcactgtggagtttaccaatcccctgaaggagacattgagaaacgtatgggtgcacttagacggtcctggggtcacccgtccaatgaagaaaatgttccgcgagatcagaccaaatagcaccgtgcaatgggaggaggtatgccggccttgggtctctgggcaccgcaagttgatcgcttccatgtcttctgactctctgaggcacgtctatggtgagttggatgttcagatccagagacgtcccagcatgtag

SEQ ID NO: 2099 - DNA, 417 bp, Artificial Sequence
  derived and/or modified sequence
atgtcggagacctcccgaaccgcctttgggggacggcgcgccgtcccgcctaacaattcaaacgcagctgaggatgacctgcctaccgtcgagctgcaaggagttgtgccacgcggtgtgaacttacaggaatttctcaacgtcacttccgtgcatctgttcaaggagagatgggataccaataaagtggaccatcatactgacaaatacgagaataacaagttgatcgtgcgtcgtggtcagtccttctacgtacagatcgactttagtaggccttacgaccctaggcgagacttgtttagagtggagtacgtgatcggcagataccctcaggagaacaaaggaacttacatccccgtgcccattgtctccgagttacaaagcggcaaatggggcgccaagatcgtgatgagatag

SEQ ID NO: 2100 - DNA, 1881 bp, Artificial Sequence
  derived and/or modified sequence
atgagcgagacctctagaacagcctttggcggcagacgcgccgtccccccaaacaactctaacgccgcagaggatgatcttcctactgttgaattacagggggtggtgccacggggagttaacctccagggcagatacccccaagagaataaaggcacatacattccagttcccattgtgtccgagctacagagtggtaagtggggtgccaagatcgttatgagagaggatcgcagcgttaggctgtccattcagtcttcccctaagtgtatcgtgggaaagtttcgcatgtacgtagctgtgtggacaccctacggcgtgttgcggaccagtaggaacccagagactgacacatacattctgttcaatccatggtgtgaagacgatgcggtctacttggacaacgaaaaagaaagggaggaatacgtcttaaacgacattggcgttatcttctatggggaggtaaatgatatcaaaacacggagctggtcctatgggcagttcgaggacggcatcttggacacctgtctgtatgttatggatagggcacaaatggatctctccgggcgaggaaaccctattaaggtttctcgcgtgggaagcgccatggtcaacgcgaaagacgacgaaggcgtgctggtagggagctgggacaatatttacgcctatggagtgcccccatctgcctggacaggatccgtggatatcttgctcgagtatcggtcatctgagaatccagttcggtatggacagtgttgggtttttgccggtgttttcaatacgtttttgaggtgtcttggcattccggcgagaattgtgacgaactattttagtgcccatgataatgatgccaacttgcagatggacatatttctggaagaggatggaaatgtgaactctaagctgacaaaggacagtgtctggaactaccactgttggaacgaggcctggatgacgagacctgatctgcccgtggggtttggcggatggcaagctgtcgatagcacacctcaggagaatagcgacggtatgtatcggtgcggcccagcctctgtccaggcaataaagcatgggcacgtctgcttccagtttgatgcaccttttgtatttgctgaggtgaatagcgatctgatttacattaccgcgaagaaagatggaacacatgtggtggagaacgtggatgctactcacatcggtaagctcatcgtgacaaagcaaattggcggggacggcatgatggacataaccgatacctacaagtttcaggaggggcaggaggaagaacgcctggccttagaaaccgcccttatgtacggtgccaaaaagcccctaaacaccgaaggcgtgatgaagtcccggagcaacgttgacatggattttgaagtggagaacgctgtcctcggaaaagactttaaactgagcatcactttccggaataactcgcataacaggtacacaatcaccgcgtacttatccgccaacatcacgttctatacaggagttccgaaggccgagtttaaaaaggaaacttttgatgtgacactcgaaccgttgagcttcaaaaaggaggcagtactgatacaagccggcgaatatatggggcagctgctggagcaggctagcttacatttttttgttaccgcacgcattaatgaaacccgggatgttttagccaaacagaaatctacggtcttgacaattccagagatcattattaaggttaggggcacgcaagtggtcggatccgacatgacggttactgaagtgtgtcgtccctgggtgtccgggcatagaaaattgatagcatcgatgtcctcagattccctgcgacatgtatatggagagttagacgtgcagattcagaggagacccagcatgtag

SEQ ID NO: 2101 - DNA, 2068 bp, Artificial Sequence
  derived and/or modified sequence
gagtccgtttgaggaagtccccgaggcgcacagagcaagcccacgcgagggcacctctggaggggagcgcctgcaggaccttgtaaagtcaaaaatgtcagaaacttccaggaccgcctttggaggcagaagagcagttccacccaataactctaatgcagcggaagatgacctgcccacagtggagcttcagggcgtggtgccccggggcgtcaacctgcaaggtcgctacccacaggagaacaagggaacctacatcccagtgcctatagtctcagagttacaaagtggaaagtggggggccaagattgtcatgagagaggacaggtctgtgcggctgtccatccagtcttcccccaaatgtattgtggggaaattccgcatgtatgttgctgtctggactccctatggcgtacttcgaaccagtcgaaacccagaaacagacacgtacattctcttcaatccttggtgtgaagatgatgctgtgtatctggacaatgagaaagaaagagaagagtatgtcctgaatgacatcggggtaattttttatggagaggtcaatgacatcaagaccagaagctggagctatggtcagtttgaagatggcatcctggacacttgcctgtatgtgatggacagagcacaaatggacctctctggaagagggaatcccatcaaagtcagccgtgtggggtctgcaatggtgaatgccaaagatgacgaaggtgtcctcgttggatcctgggacaatatctatgcctatggcgtccccccatcggcctggactggaagcgttgacattctattggaataccggagctctgagaatccagtccggtatggccaatgctgggtttttgctggtgtctttaacacatttttacgatgccttggaataccagcaagaattgttaccaattatttctctgcccatgataatgatgccaatttgcaaatggacatcttcctggaagaagatgggaacgtgaattccaaactcaccaaggattcagtgtggaactaccactgctggaatgaagcatggatgacaaggcctgaccttcctgttggatttggaggctggcaagctgtggacagcaccccccaggaaaatagcgatggcatgtatcggtgtggccccgcctcggttcaagccatcaagcacggccatgtctgcttccaatttgatgcaccttttgtttttgcagaggtcaacagcgacctcatttacattacagctaagaaagatggcactcatgtggtggaaaatgtggatgccacccacattgggaaattaattgtgaccaaacaaattggaggagatggcatgatggatattactgatacttacaaattccaagaaggtcaagaagaagagagattggccctagaaactgccctgatgtacggagctaaaaagcccctcaacacagaaggtgtcatgaaatcaaggtccaacgttgacatggactttgaagtggaaaatgctgtgctgggaaaagacttcaagctctccatcaccttccggaacaacagccacaaccgttacaccatcacagcttatctctcagccaacatcaccttctacaccggggtcccgaaggcagaattcaagaaggagacgttcgacgtgacgctggagcccttgtccttcaagaaagaggcggtgctgatccaagccggcgagtacatgggtcagctgctggaacaagcgtccctgcacttctttgtcacagctcgcatcaatgagaccagggatgttctggccaagcaaaagtccaccgtgctaaccatccctgagatcatcatcaaggtccgtggcactcaggtagttggttctgacatgactgtgacagaagtgtgccggccctgggtctctgggcatcggaagctgatagccagcatgagcagtgactccctgagacatgtgtatggcgagctggacgtgcagattcaaagacgaccttccatgtgaatgcacaggaagctgagatgaaccctggcatttggcctcttgtagtcttggctaaggaaattctaacgcaaaaatagctcttgctttgactta

SEQ ID NO: 2102 - DNA, 2199 bp, Artificial Sequence
  derived and/or modified sequence
atgtctgagaccagcaggacagcctttggaggccggcgggctgtgccccccaacaacagcaatgctgctgaagatgacctgcccaccgtggagctgcagggcgtggtgccccggggcgtgaacctgcaggagttcctgaatgtgacctctgtgcacctgttcaaggagcgctgggacaccaacaaggtggaccaccacacagacaagtatgagaacaacaagctgattgtgcggcggggccagagcttctacgtgcagattgacttcagccggccctatgacccccggcgggacctcttccgggtggagtatgtgattggccgctacccccaggagaacaagggcacctacatccctgtgcccatcgtgtctgagctgcagagcggcaagtggggcgccaagatcgtgatgagagaagatagatctgtgcggctgagcatccagagcagccccaagtgcatcgtgggcaagttcaggatgtatgtggccgtgtggaccccctacggcgtgctgcggaccagcagaaatcctgagacagacacctacatcctcttcaacccctggtgtgaagatgatgctgtgtacctggacaatgagaaggagcgggaggagtatgtgctgaatgacatcggggtcatcttctatggagaggtgaatgacatcaagaccaggtcctggagctatggccagtttgaagatggcatcctggacacctgcctgtatgtgatggaccgggcccagatggacctgagcggccggggcaaccccatcaaggtgtcccgggtgggcagcgccatggtgaatgccaaggatgatgagggcgtgctggtgggctcctgggacaacatctatgcctacggcgtgcccccatctgcctggacaggctctgtggacatcctgctggagtaccgcagcagtgaaaatcctgtgcgctatggccagtgctgggtgtttgctggggtcttcaacaccttcctgcgctgcctgggcatcccagccagaattgtgaccaactacttcagcgcccatgacaatgatgccaacctgcagatggacatcttcctggaggaggatggaaatgtgaacagcaagctgaccaaggacagcgtgtggaactaccactgctggaatgaggcctggatgaccaggccagacctgcctgtgggctttggaggctggcaggccgtggacagcaccccccaggagaacagtgatggcatgtaccgctgtggccctgcctctgtgcaggccatcaagcacggccacgtgtgcttccagtttgatgccccctttgtgtttgctgaggtgaacagcgacctgatctacatcacagccaagaaggatggcacccacgtggtggagaatgtggatgccacccacatcggcaagctgattgtgaccaagcagattggaggagatggcatgatggacatcacagacacctacaagttccaggagggccaggaggaggagcggctggccctggagacagccctgatgtatggagccaagaagcccctgaacacagaaggagtgatgaagagccgcagcaatgtggacatggactttgaggtggagaatgctgtgctgggcaaggacttcaagctgagcatcaccttcaggaacaacagccacaaccgctacaccatcacagcctacctgagcgccaacatcaccttctacacaggagtgcccaaggccgagttcaagaaggagacctttgatgtgaccctggagcccctgtccttcaagaaggaggccgtgctgatccaggccggggagtacatgggccagctgctggagcaggccagcctgcacttctttgtgacagcccgcatcaatgagaccagagatgtgctggccaagcagaagagcacagtgctgaccatccctgagatcatcatcaaggtgcggggcacccaggtggtgggcagtgacatgacagtgacagtggagttcaccaaccccctgaaggagaccctgagaaatgtgtgggtgcacctggatggccctggggtgacccggcccatgaagaagatgttccgggagatccggcccaacagcacagtgcagtgggaggaggtgtgccggccctgggtgtctggccacaggaagctgattgcctccatgagcagtgacagcctgcggcacgtgtatggagagctggatgtgcagatccagaggcggcccagcatgtag

SEQ ID NO: 2103 - DNA, 417 bp, Artificial Sequence
  derived and/or modified sequence
atgtctgagaccagcaggacagcctttggaggccggcgggctgtgccccccaacaacagcaatgctgctgaagatgacctgcccaccgtggagctgcagggcgtggtgccccggggcgtgaacctgcaggagttcctgaatgtgacctctgtgcacctgttcaaggagcgctgggacaccaacaaggtggaccaccacacagacaagtatgagaacaacaagctgattgtgcggcggggccagagcttctacgtgcagattgacttcagccggccctatgacccccggcgggacctcttccgggtggagtatgtgattggccgctacccccaggagaacaagggcacctacatccctgtgcccatcgtgtctgagctgcagagcggcaagtggggcgccaagatcgtgatgaggtag

SEQ ID NO: 2104 - DNA, 1881 bp, Artificial Sequence
  derived and/or modified sequence
atgtctgagaccagcaggacagcctttggaggccggcgggctgtgccccccaacaacagcaatgctgctgaagatgacctgcccaccgtggagctgcagggcgtggtgccccggggcgtgaacctgcagggccgctacccccaggagaacaagggcacctacatccctgtgcccatcgtgtctgagctgcagagcggcaagtggggcgccaagatcgtgatgagggaggacagatctgtgcggctgagcatccagagcagccccaagtgcatcgtgggcaagttcaggatgtatgtggccgtgtggaccccctatggagtgctgcggaccagcaggaaccctgagacagacacctacatcctcttcaacccctggtgtgaagatgatgctgtgtacctggacaatgagaaggagcgggaggagtatgtgctgaatgacattggagtcatcttctacggggaggtgaatgacatcaagaccaggtcctggagctatggccagtttgaagatggcatcctggacacctgcctgtatgtgatggaccgggcccagatggacctgagcggccggggcaaccccatcaaggtgtcccgggtgggcagcgccatggtgaatgccaaggatgatgaaggagtgctggtgggctcctgggacaacatctatgcctatggagtgccccccagcgcctggacaggctctgtggacatcctgctggagtaccgcagcagcgagaaccctgtgcgctatggccagtgctgggtgtttgctggggtcttcaacaccttcctgcgctgcctgggcatcccagcccgcatcgtgaccaactacttcagcgcccatgacaatgatgccaacctgcagatggacatcttcctggaggaggatggaaatgtgaacagcaagctgaccaaggacagcgtgtggaactaccactgctggaatgaggcctggatgaccaggccagacctgcctgtgggctttggaggctggcaggccgtggacagcaccccccaggagaacagtgatggcatgtaccgctgtggccctgcctctgtgcaggccatcaagcacggccacgtgtgcttccagtttgatgccccctttgtgtttgctgaggtgaacagcgacctgatctacatcacagccaagaaggatggcacccacgtggtggagaatgtggatgccacccacatcggcaagctgattgtgaccaagcagattggaggagatggcatgatggacatcacagacacctacaagttccaggagggccaggaggaggagcggctggccctggagacagccctgatgtacggggccaagaagcccctgaacacagagggcgtgatgaagagccgcagcaatgtggacatggactttgaggtggagaatgctgtgctgggcaaggacttcaagctgagcatcaccttcaggaacaacagccacaaccgctacaccatcacagcctacctgagcgccaacatcaccttctacacaggagtgcccaaggccgagttcaagaaggagacctttgatgtgaccctggagcccctgtccttcaagaaggaggccgtgctgatccaggccggggagtacatgggccagctgctggagcaggccagcctgcacttctttgtgacagcccgcatcaatgagaccagagatgtgctggccaagcagaagagcacagtgctgaccatccctgagatcatcatcaaggtgcggggcacccaggtggtgggcagtgacatgacagtgacagaggtgtgccggccctgggtgtctggccacaggaagctgattgcctccatgagcagtgacagcctgcggcacgtgtatggagagctggatgtgcagatccagaggcggcccagcatgtag

SEQ ID NO: 2105 - DNA, 2199 bp, Artificial Sequence
  derived and/or modified sequence
atgagcgagaccagccggaccgccttcggcggccggcgggccgtgcccccaaacaattctaacgccgccgaagatgaccttcccaccgtggaactccaaggtgttgtacctcggggagtgaacctccaggagtttctcaatgtgacttctgtgcatctttttaaagaacgctgggatacaaataaagtggaccaccacacagacaaatatgagaataataaattgattgtgcgaagaggccagtccttttatgtgcagatcgacttctcacggccgtacgatcctaggagggatctttttcgcgtcgagtatgtaataggccgctatcctcaggaaaacaaagggacctatattcccgtcccaatcgtgtctgaactccagagcgggaaatggggtgcaaagatcgttatgcgggaggacagatcagtgcggctgagcattcagtccagccctaaatgtatcgtgggcaagttccgaatgtacgtcgcggtgtggaccccttacggagtattgcggaccagcagaaatccagagacagacacatacatcctgtttaatccctggtgtgaggatgacgctgtctatctggacaacgaaaaagagagggaagagtacgttttaaacgacattggcgtgattttctatggggaagttaacgacattaaaacccggagttggtcctatggccagttcgaggatggcatcctggacacgtgcctttacgtgatggatagggcccagatggatttgtctgggagggggaacccaatcaaggtatctagggtcggtagcgcgatggttaatgcaaaagacgatgaaggtgtgctcgttgggagctgggataatatttacgcgtacggcgtgcccccatcagcttggacgggatcggtcgacatcctcctggaatatcgctctagtgagaatcccgtgcggtatggacagtgctgggtattcgccggtgtgttcaatacatttttaaggtgcttgggcatacctgcccgaattgtaaccaattacttcagcgcacacgacaacgacgccaatctgcaaatggatatcttcctggaagaagacgggaacgtgaattccaaactcaccaaagatagcgtgtggaactatcactgctggaacgaggcctggatgacccgccccgatctgcctgttggattcggcggatggcaggccgtcgattctactcctcaagaaaattctgacgggatgtatagatgtggtccagctagtgtgcaagccataaaacatggtcacgtctgctttcaatttgatgccccttttgtgttcgcagaagtaaattccgacctcatctacattaccgccaaaaaggacgggactcacgtggtggagaacgtggacgccacccatatcgggaagctgatcgttacaaagcagattggcggcgacggcatgatggacatcaccgatacctacaagttccaggaaggccaggaggaagaaaggttagccctggagactgcactaatgtatggcgcaaaaaagcccttaaataccgagggagtcatgaaatcaaggtccaacgtggacatggacttcgaagtcgagaacgcggtgctaggaaaagattttaagctgtctatcacctttaggaataactcccataatcggtacaccattaccgcctacctgtctgctaacattaccttctatacaggggtacccaaagcagagttcaaaaaggaaacctttgatgtcaccctcgaacccctctccttcaagaaagaagcagtgttgatacaggcgggggaatatatgggccagctgcttgagcaagcgtccctacacttcttcgtgaccgcccggatcaatgagaccagagacgtgctggccaagcagaagtcgaccgtgttgacaattcctgaaatcatcattaaggtacggggaacacaggtggtgggatctgatatgacagtgaccgtagagtttaccaatccactgaaggaaacactcaggaatgtgtgggtacatcttgatgggcccggggttacccggcctatgaaaaagatgtttcgagagatccggccgaacagtacggtccagtgggaagaagtgtgcagaccttgggtaagcggccaccgcaaacttatcgccagcatgtcgagcgactcactgagacatgtctatggcgaattggacgttcagatccaacggcggccctccatgtag

SEQ ID NO: 2106 - DNA, 417 bp, Artificial Sequence
  derived and/or modified sequence
atgagcgagaccagccggaccgccttcggcggccggcgggccgtgccaccaaataactctaatgccgcggaagatgacctacccaccgtggaactgcagggtgtggtgccacggggagtgaaccttcaggagtttctaaatgtgaccagcgtgcatctgtttaaggagagatgggatacgaacaaggttgaccatcatacagacaagtatgaaaataacaagctcattgtgagaaggggccaatctttctacgttcagattgatttctctaggccttacgacccaagacgggatttatttcgagtcgagtacgtgattggccgctacccccaggaaaacaaggggacctacatacccgttccaatcgtgtccgaactgcaaagtggcaaatggggtgcgaagatcgtgatgcgctag

SEQ ID NO: 2107 - DNA, 1881 bp, Artificial Sequence
  derived and/or modified sequence
atgagcgagaccagccggaccgccttcggcggccggcgggccgtgccccctaacaactccaacgctgccgaggatgatctgcccactgtcgaactgcaaggagtggtgccccggggggtgaatcttcaaggtaggtaccctcaagagaacaagggcacttacataccagttcctattgtttctgagctacagtccggcaagtggggggcaaagatcgtgatgagagaagatagatcggtgcgcctttcaatacagagctcccctaagtgcatcgttggaaaattccgaatgtatgtggccgtctggactccgtatggcgtactccgtacatcccgcaaccccgagactgatacatatatcttattcaacccttggtgcgaagatgatgctgtgtacctagataacgaaaaagagagagaagaatatgtgctgaatgatattggtgtaatcttttacggggaggtaaacgacattaaaacaagatcttggagttatgggcagtttgaagatggcatactggatacatgcttgtatgtgatggaccgggcacaaatggaccttagcggtcgggggaaccctatcaaagtgtcccgtgtggggagtgctatggtgaatgctaaggatgacgaaggagtcctcgtaggtagctgggacaatatttacgcctatggtgttccgcctagtgcctggacaggaagcgtagacattctcctggaataccgtagctccgaaaaccctgtaaggtatgggcagtgttgggtgttcgctggtgtcttcaatactttcctgcgctgtctcggcatacccgctcggattgtcacaaattacttttccgcgcacgacaatgatgcgaacctgcagatggacatctttctcgaagaggacggtaatgttaatagtaaattgacaaaagattcagtgtggaactaccactgctggaacgaggcttggatgacccgtccggatctccccgtcggcttcggcggctggcaggccgtggacagcacgccccaagagaactccgacggcatgtaccggtgtggccctgccagcgtgcaagccattaaacacggacatgtctgttttcagtttgatgcaccattcgtgttcgccgaggtcaattctgaccttatctatatcaccgctaagaaagacggaactcacgtggtggaaaacgtagatgccacacacattggtaagttaattgtgaccaagcagatcggcggggatggaatgatggatataactgacacgtataagtttcaggaagggcaagaggaggaaaggctagctctcgaaaccgctctgatgtatggggcgaagaagccactgaacaccgagggtgttatgaagagccggtccaacgtcgatatggactttgaggtggagaacgccgtcctcggaaaggactttaaactctcaattacatttcggaataattcccataacaggtatactattaccgcttaccttagtgcaaatatcaccttctacactggagtgccgaaggccgagtttaagaaggaaaccttcgatgtaactcttgaacctctctcttttaagaaggaagctgtactgattcaggcaggcgagtacatgggccagctcctcgaacaggccagtctgcatttctttgtgacagctcgaattaacgaaaccagagatgttctcgctaagcaaaaatccacagtgctcactatccccgaaattatcattaaggtgagaggaacccaagtggtgggcagcgacatgaccgtcactgaagtgtgtagaccttgggtgagtgggcatcgaaagctgatagccagtatgtcctctgactccctgaggcacgtgtatggcgagctggacgtgcagatccagcgccgcccctccatgtag

SEQ ID NO: 2108 - DNA, 2199 bp, Artificial Sequence
  derived and/or modified sequence
atgagcgaaacaagtagaaccgccttcggcggacggcgagcagtgcccccaaataacagcaacgcggctgaggatgatctgcccacggtagagctgcagggcgtggtgccccgaggagttaatcttcaggagtttcttaatgtgacatctgttcacctttttaaagagcggtgggacaccaacaaagtggaccaccacactgacaagtatgagaacaataaattgattgttaggcggggacagtccttctacgttcagatcgacttttccagaccctacgacccgcgaagggacctgttcagagtggaatacgtgatcggccgatatccacaggagaataagggtacttacattcccgttccaatcgtatcagagctgcaaagcgggaaatggggagccaagattgttatgcgtgaggatcggtctgtgcggctctctatccaatctagccccaagtgcattgtcggcaaattccggatgtacgttgcagtttggactccctatggggtgctgcggactagtaggaacccggagactgacacctatattctattcaacccctggtgtgaagatgatgccgtgtacctcgataatgaaaaggaaagggaagaatatgtacttaatgatattggcgtgatcttctacggtgaggtgaacgacataaagacccgttcttggtcatacgggcagtttgaagatggtattttggacacttgcctctatgttatggatcgggctcagatggatctctctggtcggggaaatccaatcaaggtttctcgggtgggctctgccatggtgaatgccaaggatgacgagggcgtcctcgtggggtcttgggataatatttacgcttacggagtccccccatctgcctggacagggtctgtcgacatcctgctagagtaccgctcttctgaaaatcccgtacgctacgggcagtgctgggtgttcgcaggagtatttaacacatttttgagatgtctcgggatcccagcacgcatcgtgaccaattactttagcgctcatgacaatgatgcaaatttgcagatggacatatttctggaggaggacggcaatgtcaattcgaagctgaccaaagattccgtctggaattaccactgttggaacgaggcgtggatgactcgccctgatcttcctgtgggttttggtggctggcaggcggtcgactcaacgccacaggaaaattcagatggaatgtaccgttgcggccctgcatcagtgcaggctattaagcatggccatgtgtgtttccagttcgacgcacctttcgtgttcgccgaggtcaactcagacctgatatacattacagctaagaaggatgggacccacgtggtggaaaatgtcgatgccacacatatcggaaaactgatcgtgactaagcagatcggcggagatggcatgatggatattaccgacacttacaagttccaggagggccaggaggaagaacgacttgccttagaaaccgcgcttatgtatggggctaagaagccactgaacacagaaggtgtgatgaagtctcgatcaaatgttgacatggacttcgaggttgaaaatgctgtgttgggaaaggatttcaaactgagcattacctttaggaataacagccacaatcggtacaccattactgcttacctatcggctaacatcactttctataccggggtccccaaggccgaattcaagaaggaaacattcgacgttacattggagccactgagcttcaagaaagaagcagttctgatccaggccggagaatacatgggtcagctcctggagcaggccagtcttcacttttttgtgactgctaggatcaacgagacacgcgatgtgctggctaagcagaaatctaccgttcttactatccccgagattattatcaaggtgagagggacccaggtagtcggatccgacatgacagttacggtggaattcaccaaccccctgaaggagacattgcgcaacgtttgggtccatctggacggccctggggtgactcgccctatgaaaaaaatgtttcgcgagatccgccctaacagcaccgtgcagtgggaagaggtgtgcaggccctgggtgagcggccacagaaagctgatcgcaagtatgtctagtgactctctcagacatgtctatggtgagctcgacgtacagatccaaagacgcccttctatgtag

SEQ ID NO: 2109 - DNA, 417 bp, Artificial Sequence
  derived and/or modified sequence
atgtcagagactagcaggacagctttcggaggacgcagggccgtccctcctaataactctaacgcggctgaggacgacttaccgaccgtggagttacaaggtgtggtgccccgaggggtcaacctgcaagagtttctgaacgtcacctcggtgcatctgttcaaagaacggtgggacaccaacaaggtggaccatcacacagacaaatacgagaacaataaactgattgttcgtcggggtcagagcttttatgtccagatcgacttctcacggccatacgatccaaggcgggacttgtttcgtgtggaatatgttatcggcaggtacccccaggaaaacaaaggcacatacatccccgtgcccatcgtgtccgaactccagagtgggaagtggggggcaaagattgtcatgcgctag

SEQ ID NO: 2110 - DNA, 1881 bp, Artificial Sequence
  derived and/or modified sequence
atgtcagagacatctcgtaccgcgttcggagggagacgagccgtgcctcccaacaatagcaatgcagcggaagacgacttgcccacagtggagttacaaggcgtggttccacgaggtgtgaatttacaggggcgatacccccaggagaataagggcacgtatatcccagtaccaattgtatctgaactgcagagtggaaagtggggggctaagatcgtgatgagggaagatcggagcgtccgcttgtctatccagagcagcccaaaatgtattgtgggcaagttccgcatgtacgttgccgtatggacaccatacggcgtcttgagaacctcgagaaaccccgagactgacacatatattttgttcaatccctggtgtgaagatgatgctgtgtacctggacaatgagaaagagcgtgaggagtacgtgttaaacgacatcggagtgatcttctatggcgaggtcaatgatataaagacgcgatcatggtcctatggccagtttgaggacgggatcctggacacttgcctttacgtaatggaccgcgctcagatggacctgagcgggaggggaaatcccataaaagtaagccgcgtgggatccgcaatggtgaacgcgaaggatgatgaaggcgtgctggtaggctcttgggacaatatctatgcttacggcgtcccaccctctgcgtggaccggttccgtcgacattctgttggaataccgcagcagcgagaatccggtgaggtatggacagtgttgggtgtttgccggtgttttcaatactttcctgcgatgtctaggtattcccgcaaggatcgtgacgaactactttagcgcccatgacaacgacgccaaccttcagatggatatattcctggaagaagatggaaatgttaatagcaaactcaccaaggattctgtctggaactatcactgttggaacgaggcgtggatgacacggccagacctgccggtgggattcggtggctggcaggccgtcgattccacccctcaggaaaacagtgacgggatgtatcgctgcggacctgccagcgtacaggctattaaacacggccacgtctgctttcagttcgatgctcccttcgtgtttgccgaagtcaattcagatctgatatacatcaccgcgaagaaggacgggacccatgtagtggaaaacgtcgatgccacccacatcggaaagctcattgtgaccaagcagatagggggagatggaatgatggacatcaccgacacctataagttccaggaagggcaagaggaggaaagacttgcgttggaaactgccctcatgtacggggcaaagaagccccttaatacggagggggttatgaaaagccggagcaacgtggacatggatttcgaagtggaaaatgccgtactgggcaaagacttcaaactttctatcacgtttcgaaacaatagccacaaccggtacaccataacagcttatttgagcgccaacatcacattttatactggcgtacctaaggcagagttcaagaaggagacatttgacgtgacactggagcctttaagctttaaaaaggaagccgtgctcatacaggccggagagtacatggggcagctgctggaacaggcatccctgcacttttttgttaccgctcgcatcaatgaaactagagatgtgctggctaaacagaaatccacggtcctgactattcctgaaatcattattaaggtgcgcggaacacaagtggtgggttccgatatgaccgtcactgaagtttgccgaccctgggtttccgggcatcggaaattgattgctagcatgagcagcgatagcctgagacacgtctatggagaattagatgtgcagatacagcgcaggcccagcatgtag

SEQ ID NO: 2111 - DNA, 2196 bp, Artificial Sequence
  derived and/or modified sequence
atgtcagagacttctcgcacagcttttggtgggcgacgtgcagtgcctccaaataacagcaacgccgcagaggatgacttgccaactgtcgagctgcaaggcgtcgtcccccggggcgtgaacctgcaggagttcctgaacgtcacatctgtgcatctgttcaaagagcgctgggataccaataaagtcgaccaccatacagataagtacgaaaacaataagctgattgtgcgccgaggtcagtctttctacgtgcagatagatttctctaggccttacgatccgagaagggatctgttccgtgtcgagtatgtgatcgggcgttatccccaagagaataaaggcacctatataccagtgcccatcgtctctgagcttcaaagcggaaaatggggtgcgaagattgttatgcgggaagaccgcagtgtcagactctctattcagagtagccctaagtgcatcgtggggaagtttcgaatgtatgtagctgtgtggactccctatggcgtgcttcggacatcaaggaatccggagaccgacacatatatactcttcaacccgtggtgcgaggatgacgctgtttatctcgataatgagaaggaaagggaggagtatgttttgaatgacatcggcgttatcttctacggagaggtgaacgacattaaaaccaggtcatggtcctacggtcagttcgaggatggcattctggacacatgtctctatgtcatggacagagcccagatggacctgtcaggtcggggtaacccgataaaggtgtccagggttgggagcgctatggttaacgccaaggacgacgagggcgtcctggtggggagctgggacaatatctatgcttatggcgtgccacccagcgcctggacgggatctgtcgacattctcctggagtataggtcgtctgagaacccagtccggtatggccaatgttgggtcttcgccggcgtgtttaatacctttttgcgctgcctgggtatcccagctagaatagtcacgaactattttagtgctcacgacaatgacgcaaatctgcagatggacatttttcttgaggaagatggaaatgtcaattctaaactgacgaaagattccgtgtggaactatcattgttggaatgaagcctggatgactagaccggatctgcccgtgggttttggtggatggcaggcagtcgactctacaccccaagaaaactcagacggcatgtatcgctgtggacccgcctccgtgcaagccatcaaacacggtcacgtatgtttccagttcgacgctccgttcgtttttgctgaggtgaacagcgacctgatctatattacagcgaaaaaagacgggacacatgtcgtagagaacgtggacgccacacacatcggaaaattgattgtgacgaagcagatcgggggggacggcatgatggacattaccgacacatacaagtttcaagaaggccaagaagaggaaaggcttgcactggagacagctcttatgtatggtgcaaaaaagccactgaacacggaaggcgtgatgaagtctagaagcaacgtggacatggatttcgaggtagagaacgccgtacttggcaaggacttcaagctttcaattacatttcgaaataatagccacaacaggtatacaattaccgcgtacctgtctgccaatattacattttacaccggtgtgccaaaagcagaatttaagaaggaaactttcgacgtgactctggaaccgctcagcttcaagaaagaggcagtcctgatccaggcaggcgaatatatggggcagctgttggaacaggctagtttacatttctttgtgaccgccaggatcaacgagactagggatgtcctggctaagcagaaaagtactgttcttactattcctgagattatcatcaaggtgcgggggacccaggtggtagggagcgacatgacggtgacagtacagttcactaacccactgaaagaaaccctcagaaacgtttgggtccatctagacggccccggcgttacacggcccatgaaaaaaatgtttcgtgaaattcggcctaattcaaccgtgcaatgggaggaggtatgcaggccctgggtgagtggtcacaggaagcttattgcgtccatgtcttcggattcactaagacatgtctacggagagttggacgtccaaattcagagacggcctagtatg

SEQ ID NO: 2112 - DNA, 2196 bp, Artificial Sequence
  derived and/or modified sequence
atgagcgagacctcaaggaccgccttcggtggccgtcgtgctgtgccgcctaataattcaaacgccgccgaagatgatttgccgacagtggagctacaaggtgtggtcccccgaggagtgaatctgcaagagttcctgaatgtgacgtcggtacatctgttcaaggaacgttgggatacaaacaaggtggatcatcacacggataaatatgagaacaacaagctgatcgtccgtcgcggccaatcattctacgtgcaaattgacttttctcgaccgtacgatccccgtcgagacttgtttcgggtggagtacgtcattggacgctatccacaggagaacaaaggaacgtacattcccgtccccattgtgagtgagctacagtcgggaaaatggggcgcaaagattgtaatgcgcgaggaccgctcagttcggctgtcgatacagtcctcaccgaaatgcatcgtgggcaagtttcgcatgtacgttgccgtgtggaccccgtacggtgttttgcgcaccagccgaaatcccgagacagatacttacattctgtttaatccttggtgcgaagatgacgcggtctatctagacaacgagaaggagcgagaagaatacgtcttgaatgacatcggtgtgattttctacggcgaagtcaatgacatcaagaccagatcgtggtcgtatgggcagtttgaggacggcattctggacacttgtctgtatgtcatggaccgtgcccagatggacttatcgggaagaggtaatccaatcaaggttagtcgcgtgggcagcgcgatggtgaatgcaaaagacgatgagggtgtgctggtgggtagctgggacaatatctacgcgtatggagttcctccaagtgcttggaccggctcggttgacattttgctagagtaccgttcatccgagaatcctgtgaggtacgggcagtgctgggtttttgccggcgtgttcaatacgtttttgcgatgcctgggcatacccgctcgtattgttactaattacttctccgcccacgataatgacgccaatcttcaaatggatatatttctcgaggaggacggtaacgtgaattccaaactaaccaaagactccgtctggaactaccactgctggaatgaggcctggatgacgcgtcccgacttaccggtgggattcggcggatggcaggccgtggattcaacaccgcaggagaactccgatggcatgtaccgctgcggcccagccagtgtgcaggccattaagcatggccatgtgtgcttccagtttgacgctccgtttgttttcgcagaagtgaattctgatctcatatacattaccgcgaagaaggatggtacccacgtggtggagaacgtggacgccacccatataggaaagctgatcgtgacaaagcaaatcggaggggacgggatgatggatattacagacacatacaagttccaagagggtcaggaggaagagcgactagccctcgagaccgcgctgatgtatggcgctaaaaagccacttaacaccgagggcgtgatgaaaagtcgaagtaatgtcgatatggattttgaagtggaaaatgccgtgctcggaaaggatttcaagctctcgattacctttagaaacaactcccataaccgttatacgattaccgcgtacctgtcggctaatatcactttttacaccggcgtcccaaaggcagagtttaagaaggagacttttgacgtgacattggaaccgctttcctttaagaaggaggctgtgctgattcaggcgggtgagtatatgggccaattgctcgagcaagcctccctgcattttttcgttacagcccgcatcaatgagacaagggatgtattggctaagcaaaagtccacagttctaacgattcccgagattattataaaggttcgcggcacgcaggtcgtgggatcggatatgacagtgaccgtccagttcactaatccactgaaggagacgctgcgtaacgtatgggtgcatctggatggcccgggcgttacacgacccatgaaaaagatgttcagggaaattcggcccaactctacggtgcagtgggaagaggtgtgccgaccgtgggtctcgggacaccgcaagttgatcgcgtctatgtcttccgactccttacgtcacgtttacggggaactggatgtccaaatccagcgtcggcccagcatg

SEQ ID NO: 2113 - DNA, 2196 bp, Artificial Sequence
  derived and/or modified sequence
atgagtgagacctccagaaccgcttttggtgggagacgcgccgtcccaccgaacaactctaatgcggctgaggacgatctgccaactgtggagctgcagggagtcgtgccacgaggcgtgaatctgcaggaattcctgaacgtcactagcgtgcatcttttcaaagagaggtgggacaccaacaaagtcgaccaccatactgacaagtatgagaacaataaacttatcgttaggcgcgggcaaagcttctacgtccaaatagacttttcaaggccgtacgacccgcgcagagatctcttcagagtggagtatgtgattggacgctacccccaggagaacaaggggacttatatacccgtaccaatcgtgtcagagctgcaaagtggaaaatggggcgcgaaaatagtgatgcgcgaagaccgatccgtgcggctcagcattcagagcagtccaaagtgcatagtagggaagttcaggatgtacgttgccgtgtggacaccatatggggtgctgaggacaagtcgcaacccagagacagatacttacattttgtttaatccctggtgtgaggacgacgctgtatacctcgacaatgaaaaggagagggaagaatatgtgctgaacgatatcggcgtgatattctatggcgaagtgaacgatatcaagaccaggtcttggagctacgggcagttcgaggacggaatcctggacacctgtctgtatgtgatggatagggctcagatggatctctcagggcggggcaaccctattaaagttagtagagttggaagtgctatggttaacgcgaaggatgatgaaggtgtgctcgtgggatcatgggacaacatctacgcctacggagtcccacctagtgcttggactggatccgtggacattttgcttgagtataggagcagcgaaaacccggtgagatatggacagtgctgggtgtttgccggagtcttcaatactttcctcagatgcctcggcattcctgctagaattgttacaaactatttctcagcccatgataacgacgctaacctgcagatggatatctttttggaggaggacgggaacgtcaacagcaagcttaccaaagactcagtgtggaactatcattgttggaatgaggcctggatgacgagacccgacctgccagtcggttttggtgggtggcaggcagtggacagcacaccccaggagaatagtgatggaatgtacaggtgcgggcctgccagcgtgcaggcaatcaagcatggtcatgtgtgtttccaattcgatgctccatttgtgtttgccgaggtaaattccgatctgatctacattaccgctaagaaagatggaactcacgtggttgagaatgtggacgctactcacattggtaagctgatagtgacaaagcagattggtggtgacggaatgatggatatcaccgacacatataagttccaggagggacaggaggaggagcgactcgctctggagactgccctgatgtatggtgcgaagaaacctttgaacaccgagggggtaatgaagtctaggagtaatgtggatatggactttgaggtggagaacgcagtactcggtaaggatttcaagctcagcatcacatttcgcaacaactcacacaaccgctatactatcacagcctatctttcagccaacataacattttacactggcgtgcctaaagcggagttcaagaaggagacgttcgacgtgactttggagccccttagctttaagaaggaggcggtgctcatccaggctggcgagtatatgggtcagttgctcgaacaggccagtctccatttctttgttactgctagaattaacgaaacaagggacgttctggctaaacagaaatcaacagttctgactattcccgaaatcatcataaaggttcgaggcacccaggtggtgggctccgatatgacagtaactgtgcagttcacgaacccgctgaaggaaactttgcgaaacgtgtgggtgcatctggacggccccggagttactcggccaatgaaaaagatgttcagagagatcagacccaattcaactgtgcagtgggaagaagtatgtcggccgtgggtttcaggacacaggaaactcatcgcgagcatgtcttccgactctttgcgccacgtgtacggcgagctcgatgtccagattcaaaggcgaccatccatg

SEQ ID NO: 2114 - DNA, 2196 bp, Artificial Sequence
  derived and/or modified sequence
atgagcgagactagccgcacggctttcggaggtcgccgcgccgttccacctaacaatagcaacgcagctgaagacgatctacctaccgttgaactgcaaggagtcgtccctcgtggcgttaacctgcaagaatttctgaatgtgacatccgtgcacctgtttaaggaaaggtgggacaccaataaggtggatcaccatacggacaagtacgagaacaataagctgattgtccgtcgcggtcaatcgttttatgtccagatcgatttcagccgcccttatgacccacggcgcgacctgttcagagttgaatacgtgattggccgctacccacaggaaaataagggcacttatatccccgttccaatagtgtctgagctgcagagcggaaaatggggcgccaagatcgtcatgcgcgaagacagatcggttcggctgtcaattcaatcgagcccgaaatgtattgttggcaaattccgtatgtatgtagccgtttggacgccgtatggtgtcctacgaactagccgcaaccctgagaccgacacctatattctattcaatccttggtgtgaagacgacgcagtttacctggataatgagaaggaacgtgaggaatatgtgctgaatgacattggcgtcatcttttacggcgaggtcaacgatatcaaaacgagaagctggagctacggtcagttcgaggacggcattctggacacctgcctgtatgtaatggatcgtgcacagatggacttaagcgggagggggaatccgattaaggtgagcagagttggttccgccatggtaaatgctaaagacgatgaaggcgtgctagttggtagctgggataatatttacgcatatggggtgccaccatctgcatggaccggctcagttgatatcctgttagagtaccgtagcagcgaaaatcctgttcgttacggccagtgttgggtgttcgcgggtgtcttcaacacattcctgcgttgcctgggcatacccgcgcgaatagtgaccaactattttagcgcgcatgacaatgatgccaacttacagatggacatcttcctggaggaagacggtaatgtgaacagcaaactgacgaaagactctgtgtggaactatcattgttggaatgaggcttggatgaccagaccagatttgccggtgggttttggcggttggcaggcagtggattcaactccacaagagaatagcgatggcatgtaccggtgcggccctgctagcgttcaagcgatcaagcacggtcatgtgtgttttcaatttgatgcacctttcgtttttgctgaggtgaatagcgacctgatctatattaccgcgaagaaagacggtacgcacgttgttgagaacgtcgacgccacacacatcggtaaattgattgttaccaagcagatcggtggcgacggaatgatggacattacggacacctacaagtttcaggagggtcaagaagaggagcgcctggcactggagaccgcactgatgtacggcgcgaagaagccgctaaataccgagggggtgatgaaaagccgctccaatgttgacatggactttgaggtcgaaaacgcagttttgggaaaagactttaagctcagcatcaccttccggaacaacagccacaaccgttacaccattacagcgtatctgtcggccaatatcactttctatacgggtgtccccaaggctgagttcaagaaggaaacctttgacgtgaccttagaaccgcttagttttaaaaaggaagcagttctaatccaagccggggagtatatggggcaactgttggagcaggccagcctgcatttctttgtcacggctagaattaacgaaacccgcgacgtgctggcaaagcagaaatcgaccgtgctcaccatcccggaaatcatcattaaggtgcgcggcactcaggttgtgggtagcgatatgacggtgactgtccaattcactaacccactgaaagaaaccttgagaaacgtttgggttcatctggacggccctggtgtcacgcgcccaatgaagaaaatgtttcgcgaaattcgcccgaactctactgttcaatgggaggaggtctgccgtccatgggtgtccggccaccgaaaattgatcgcatctatgagctctgattccctgagacatgtttacggcgagctggatgtgcagatccaacgcaggccaagcatg

SEQ ID NO: 2115 - DNA, 2196 bp, Artificial Sequence
  derived and/or modified sequence
atgtcagagacttcgaggactgccttcggcggtcgcagagccgtgccgcccaataacagcaacgctgccgaggatgacctgccaactgtggaactgcaaggagtggtgccgcggggagtgaacctgcaggagtttctgaacgttacctccgtccacctcttcaaagagcgctgggataccaacaaagtggaccatcacaccgacaaatacgagaacaataagctgatcgtgcggcggggccagtcattctacgtgcaaatagacttctcacgaccttacgatcccagacgcgacctctttcgcgtcgagtacgtcatcggacggtaccctcaagaaaacaaggggacctacatcccagtgccaatcgttagcgaactgcaaagcggaaagtggggagccaagatcgtgatgcgcgaagatcggtccgtgagattgtcgatccaatcttccccgaagtgtatcgtgggtaagtttcgcatgtatgtggccgtctggactccttacggcgttcttcgcacgtcgagaaacccggaaaccgacacttatatcctcttcaatccatggtgcgaggacgatgctgtctacctcgacaatgagaaggaacgggaagaatacgtgctcaatgacatcggcgtgatcttctatggggaggtcaatgatatcaaaactcgcagctggtcctacgggcagttcgaggacggaattctcgacacctgcctgtacgtcatggacagagctcagatggacctgagtggtagaggtaaccctattaaggtgtcccgggtcggatcggccatggtcaatgcgaaggacgacgagggagtgctcgtgggatcatgggataacatatacgcctacggagtccctccgtcggcatggacgggctccgtggacatcctgctcgagtaccggtcgtccgaaaacccagtccgctacggccagtgctgggtgttcgccggcgtgttcaatacgttcctcaggtgccttggaatccctgcccggatagttaccaattacttcagcgcacacgacaacgatgcaaatctgcaaatggacatcttcctggaggaggacggaaacgtcaactccaagctgaccaaagattcggtctggaattaccactgttggaacgaagcctggatgactaggcccgatctgccagtcggatttgggggatggcaggcagtggactcgacccctcaggagaactccgacggcatgtaccggtgcggcccagcgtccgtgcaagcaattaagcacggacacgtgtgcttccagtttgatgccccattcgtgttcgcggaagtgaactccgacctgatctacatcacggccaagaaggatggaacccacgtggtggaaaacgtggatgcgacccatatcggcaaactgattgtaacgaagcagatcggcggagacggaatgatggacatcactgatacctacaagttccaggaaggacaggaggaagagagactggcactcgaaaccgccctcatgtatggagcgaagaagcctctcaacaccgaaggtgtcatgaagtcgagatccaacgtggacatggactttgaagtcgaaaacgcggtcctcggaaaggacttcaagctgagcatcactttccggaacaacagccacaatcgatatactatcaccgcatacctgtcggcgaacattacgttctacacgggcgttccaaaggccgagtttaagaaggaaaccttcgatgtgactttggaacctctgtccttcaagaaggaagcggtcctgatccaggcaggtgaatacatgggtcaactgctcgaacaagcatcactgcacttcttcgttaccgcgcggatcaacgaaactcgcgatgttctggctaagcagaagtcaactgtccttaccattccggaaatcatcatcaaggtgcgcggaactcaggtggtggggagcgacatgaccgtgaccgtgcagttcactaacccgctcaaggagactctgcggaacgtctgggtccacctggatgggccaggcgtgactagacctatgaagaagatgttccgcgagatccggccgaacagcaccgtgcagtgggaggaagtctgcagaccatgggtcagtggacataggaagctcatcgcgtccatgtcgtccgattcgttgcgccatgtatacggagagcttgatgtccagatccaaaggcgcccatccatg

SEQ ID NO: 2116 - DNA, 2196 bp, Artificial Sequence
  derived and/or modified sequence
atgtcggagacttcccggactgcgttcggagggcgccgggctgtgcccccgaacaactcaaacgcggcggaggacgacctgcctaccgtggagctgcagggagtcgtgccccggggagtgaatctgcaggagtttctgaatgtgacttccgtgcaccttttcaaggaacggtgggataccaataaagtcgaccatcacactgacaaatacgaaaacaataagctgatcgttcggaggggccaatccttctatgtgcagatcgactttagccgcccgtatgatccgcgcagggacctcttccgcgtggagtacgtgatcggacgctaccctcaggagaataaaggaacttatatcccggtccccattgtctccgaacttcaatccggaaagtggggggctaagatcgtcatgcgcgaggaccggtcggtgaggctgtcaattcagtcctcgccaaaatgcatcgtggggaaatttcgcatgtacgttgccgtctggaccccgtacggcgtgctgcggactagcagaaatcctgagactgacacttacatcctgtttaatccatggtgcgaggacgatgccgtgtacttggacaatgagaaagaaagggaggaatacgtgttgaacgatatcggagtgatcttttacggtgaagtcaacgacatcaagactagatcgtggagctacggacagttcgaggacggcattctggacacctgcctgtacgtcatggaccgggctcagatggacctgtcgggaaggggcaacccaatcaaagtgtccagggtcggatccgccatggtgaacgctaaggacgacgaaggtgttctggtgggatcatgggacaatatctacgcatacggtgtgccaccgtccgcgtggacgggctcagtggacatcctcctggaatacagatcgagcgagaacccagtccggtacgggcagtgctgggtgttcgcaggagtgttcaatactttcctgagatgtttgggaatcccggcccggatcgtgactaactactttagcgcacacgataacgatgccaaccttcagatggacatttttctggaggaagatggaaatgtgaattcgaagctcactaaggactcagtgtggaactaccactgctggaatgaagcgtggatgacgcgcccagaccttccagtgggatttggaggttggcaagccgtcgacagtaccccgcaggagaactcggacggcatgtaccgctgcggacctgcttccgtgcaagccatcaagcatggacatgtctgtttccagttcgatgcacctttcgtgtttgccgaagtgaactccgacctgatctacatcaccgccaaaaaggatggaacccacgtggttgagaatgtggacgccacccacatcgggaagctgatcgtgaccaaacagatcggcggagatggcatgatggacatcaccgacacttacaagttccaggaaggccaggaagaggaaaggttggcattggaaaccgcactcatgtacggcgcgaagaaaccgctgaacactgaaggcgtgatgaagtcgcgatccaacgtggatatggacttcgaagttgagaacgcagtcctgggtaaggactttaagctgtccatcaccttccgcaataactcccataacaggtacaccatcacggcctacctttcggcaaacattaccttttacacgggagtgccgaaggccgaattcaagaaggaaaccttcgatgtcactctggaaccattgagctttaagaaggaggccgtgctgatacaagctggagaatacatggggcagcttttggaacaggcttcgttgcacttcttcgtgaccgcgcggatcaatgaaacccgcgatgtcttggccaagcagaagtcgaccgtgctcactatcccagagattatcatcaaggtgcgcggtacccaggtcgtcggaagcgacatgactgtgactgtgcaatttactaacccacttaaagaaactttgaggaacgtgtgggttcacctcgacggaccaggagtcaccaggccaatgaagaagatgttccgggagatcagaccgaatagcacggtgcagtgggaagaagtgtgccggccgtgggtgtcaggacaccggaaacttatcgcctcaatgagctcggattcgctgcgccatgtgtacggtgaattggacgtgcagatccaacgtcgcccttcgatg

SEQ ID NO: 2117 - DNA, 2196 bp, Artificial Sequence
  derived and/or modified sequence
atgtcagaaacctcacggaccgcgtttggcgggagacgagccgtgccaccgaacaattccaacgcggctgaggatgatctgcccaccgtggagctgcagggtgtcgttccccgcggagtgaacttgcaagagttcctcaacgtgactagcgtgcacctcttcaaggaaaggtgggacaccaacaaagtcgatcatcataccgacaagtacgagaacaataagctcatcgtgcgccgggggcagtccttctacgtccagatcgatttctcacggccgtatgatcccaggcgcgacctgttccgcgtggagtacgtgatcggacgctacccccaggagaacaagggaacctatataccggtcccgattgtcagcgagttgcaatctggcaagtggggcgctaagattgtgatgcgcgaggaccggtccgtcagattgagcatccaatcttcacccaagtgcattgtggggaagttcagaatgtacgtcgccgtgtggactccgtacggcgtcttgagaacctcaagaaacccagaaaccgacacctacatcctgtttaatccttggtgcgaggacgacgccgtgtacctggacaacgaaaaagaaagagaagagtacgtgctcaatgacatcggtgtgatcttctacggagaagtgaatgacattaagactcggtcatggagctatggccaattcgaggatgggatcctggacacttgtctgtatgtgatggatcgggcacagatggatttgtcgggcagaggcaacccaatcaaagtgtcgcgggtgggatccgcaatggtgaacgcgaaggatgatgaaggagtgcttgtggggtcctgggacaacatctacgcatacggtgtgccgccgtcagcctggacgggctcggtcgatatcctgctggaatacagaagctcagaaaatcctgtccggtacggacagtgctgggtctttgctggggtgttcaacacctttctgcgctgtctggggatcccggctcgcatcgtgactaattactttagcgcccacgataatgatgcaaacctgcagatggatatctttcttgaagaagatgggaacgtgaactcgaagctgactaaggactcggtctggaattaccactgttggaacgaggcgtggatgactcggccagacctgccggtgggattcggaggatggcaggccgtggattcgactccccaagagaattcggatggaatgtaccgatgcggaccggcctccgtccaggccatcaagcacggccatgtctgcttccaattcgacgccccgttcgtgttcgctgaggtgaatagcgacttgatctacatcactgcaaagaaagatggaacccatgtggtcgaaaacgtggatgccacccacattggaaagctgattgtgactaaacagatcgggggagacggtatgatggacatcactgacacttacaagttccaggagggtcaggaggaagagcgcttggcgctcgaaaccgccctgatgtacggcgccaagaaaccgcttaacactgagggagtcatgaagtctcggagcaacgtggatatggacttcgaagttgagaacgcggtgctcggaaaggatttcaaactgtccatcaccttccggaacaacagccacaatcgctacactattactgcgtacctgagcgcgaatatcaccttctataccggagtgccgaaggcggagttcaaaaaagaaaccttcgacgtgactcttgagccattgagcttcaagaaggaagcagtgctgatccaggcaggggagtacatgggacaacttctggagcaagcaagcctgcatttctttgtgactgcgcgcattaatgaaactcgagatgttctcgccaagcagaaatcgaccgtcctcactatcccggagatcattatcaaggtgcgtggcacgcaggtcgtggggtccgatatgactgtgaccgtccagttcactaacccactgaaagagactctgcgcaacgtctgggtgcaccttgacggacctggcgtgactaggcctatgaagaagatgttcagagagatccggcctaatagcactgtccagtgggaggaagtctgccgcccatgggtgtcgggtcataggaagctgatcgcctccatgtcctcagactccctgaggcacgtctatggagaacttgacgtccagattcagcggcggccgtcaatg

SEQ ID NO: 2118 - DNA, 2196 bp, Artificial Sequence
  derived and/or modified sequence
atgagtgagacaagccgaactgcattcggaggcaggcgtgccgtgccaccaaacaattccaacgccgctgaagacgatctgccaactgtcgagctacagggagtggtaccgaggggcgttaatctgcaagagttcctaaacgtgacatcagtgcatctgttcaaggagagatgggacactaacaaggtagaccatcatacagacaagtatgagaataacaagctcattgttcggaggggccagagtttctatgtccaaatcgacttcagccgaccttacgatcccaggcgggatcttttccgagttgagtacgtgatcggcaggtacccccaggagaataagggaacttacattcccgtgccaatagtctcggaacttcagagcggaaagtggggtgccaagatcgtgatgcgggaagatcggtctgtgaggctgagcatccagtccagtcccaaatgtatcgtggggaagtttcgcatgtacgtggcagtgtggaccccctatggggtcctgaggaccagccgcaatcccgagactgacacctacatcctattcaatccttggtgcgaagatgatgctgtatacctagacaacgagaaagagcgggaagagtatgtcctcaacgacatcggagtcatcttctacggggaagttaacgacatcaagacgcggtcctggagctatggccagttcgaggatgggattctggacacatgtctctacgtgatggaccgggcgcagatggacctgagcggcaggggaaatcccatcaaagtgagccgggtcggatcagccatggtcaatgctaaggatgacgagggcgtgctggtgggaagctgggataacatatacgcctatggagtgcccccatccgcttggaccggaagtgtggacatcctgctcgagtataggtccagcgaaaacccagtgcgctacgggcagtgttgggtgttcgctggcgtgttcaatacctttttaaggtgtctcggaattcccgcccgcattgtgacaaactacttcagcgcccacgacaacgatgccaacctgcagatggacatcttcctggaagaggatggtaacgttaattcaaagcttacgaaggactcagtgtggaactatcactgttggaacgaagcatggatgactagacctgacctgcccgtgggatttgggggttggcaggccgtggattctaccccccaggagaactccgatgggatgtacaggtgtggccctgcctctgtgcaggccattaagcatgggcacgtgtgctttcaatttgacgcacccttcgtgttcgctgaggttaacagcgacttaatttatatcaccgcgaagaaggacggtactcacgtggtcgagaatgtggatgccactcacataggaaagctcattgttacgaaacagatcgggggcgatggcatgatggacattaccgatacgtacaagttccaggagggccaagaggaggagcgtcttgcattggagacagcattaatgtacggcgctaaaaaaccgctgaacacagagggagtaatgaagagtagatccaacgtggatatggacttcgaggtggaaaatgctgtgcttggaaaggacttcaaactgagtatcacctttcgcaataacagccataatcggtacaccattactgcctatctgagtgccaacataaccttctacactggcgttcccaaggctgaattcaaaaaggaaacctttgacgttaccttagagccgctttcctttaagaaagaggcggtgcttattcaggctggagagtacatgggacagctgctggagcaggcaagcttgcatttcttcgtgacagcccggatcaacgaaactagggatgtcctggcgaagcagaagagtacagtcctcacaattccagaaatcattatcaaggttagggggacccaggtcgttgggtctgacatgacagtaacagtgcaatttactaacccgttaaaagaaaccctccggaacgtctgggtacacctcgacggacccggtgtgacccgcccgatgaagaagatgtttcgcgaaatcaggcctaatagtacggtgcagtgggaggaggtctgtaggccatgggtgtcagggcataggaagctgatcgcctccatgtcctccgacagtctcagacacgtgtacggggagttggatgtgcagattcaaagaagacctagcatg

SEQ ID NO: 2119 - DNA, 2196 bp, Artificial Sequence
  derived and/or modified sequence
atgtcagaaactagcaggaccgctttcggagggaggcgagccgtgccacccaataactccaatgcagccgaggatgacttaccaaccgtagagcttcagggtgtcgtgccgagaggagtcaatctgcaagagttcctgaacgttaccagcgtccacttgttcaaagagcgttgggacacgaataaagtggaccaccacacagataagtatgagaataacaaactcatcgtgagacggggtcagagtttttacgtgcagattgatttctcccgcccctacgacccgagacgcgacctatttcgcgttgagtacgtcattggacgctacccccaggagaacaaaggcacttatatccccgtcccaattgtttcagagctgcagagcggcaagtggggagcaaaaatcgtgatgcgggaagacagaagtgtgcggttgagtatccagtcttctcccaagtgcattgtagggaaatttaggatgtatgtcgcagtttggaccccatacggggtcctacggactagccgtaatcccgaaactgacacgtacatcctgttcaacccttggtgcgaggacgacgccgtgtacctcgataacgagaaggagagggaagaatatgtgctcaacgatataggtgtaatattttacggggaggttaatgatataaagacccggtcatggtcctacggtcaattcgaggatggaatcctagatacttgtctgtacgtgatggatagggctcagatggacctatccggacgggggaatcccattaaggttagccgtgtgggatcggccatggtcaacgccaaagacgatgaaggggtgctggttgggtcttgggacaacatctatgcttatggtgttccaccttctgcatggactggttctgtggatatcctactggagtatcgctcttctgagaaccccgtccgttacggtcagtgctgggtgttcgcgggagtgtttaacacatttttgcggtgtctgggtatcccggcacgaatcgtgactaactattttagcgctcacgataatgacgcaaatctccagatggatatttttctagaagaagacggaaacgtgaattccaaattgaccaaggactctgtgtggaattatcactgttggaatgaagcctggatgacccgaccagaccttcccgtcgggtttggtggttggcaggccgtagacagcactccacaggagaacagtgacggcatgtacaggtgcggtcctgcgagcgttcaggcaataaagcacggccacgtgtgttttcagttcgatgctcccttcgtgttcgctgaggttaactcggatctgatatacattaccgcaaagaaagacggtacacacgtggtagaaaacgtggacgccacccacatagggaagctgattgtcaccaaacagattgggggcgatggtatgatggatattacggacacttataagtttcaggaggggcaggaagaagaaaggctggcgcttgagactgccctcatgtacggggcaaaaaaaccactgaacaccgaaggagttatgaaatctcgcagcaacgttgatatggatttcgaagtggagaacgctgtattaggaaaggatttcaagttgtctattacttttcgcaataactcgcataataggtacacaataactgcttacctgagtgcaaatataaccttttacacgggggtaccaaaggcagagtttaagaaagagaccttcgatgttaccttggaaccactgtcattcaagaaagaggcagttctaatccaagccggcgagtacatgggccagttgctggagcaggctagcctgcacttcttcgtcaccgcaaggattaacgagacgagggatgttctggccaaacaaaagtctactgtcttaactattcctgagataatcattaaggtcagagggacacaggttgtcggatcagacatgacagtcactgtgcagttcaccaaccccctgaaggagacgctgagaaatgtgtgggtgcatcttgacggccctggagtgacgcggccgatgaagaaaatgttcagggaaatacgcccaaactccacggtgcagtgggaggaagtatgtcggccatgggtcagtggacaccgcaagctgattgcatccatgtctagcgactccttaaggcacgtgtacggcgaactggacgtacaaatccagaggagaccttcgatg

SEQ ID NO: 2120 - DNA, 2196 bp, Artificial Sequence
  derived and/or modified sequence
atgtctgaaacttccaggactgcgtttggaggcagacgagctgtcccaccaaacaattccaacgccgccgaggacgacttgcctactgtggagctgcagggggtggtacctcgaggtgtgaacctccaggagttcctcaatgtaacctccgtacatttgttcaaggagcgctgggatacaaataaggtggaccaccacaccgataaatacgaaaataacaaactaattgttaggaggggacagtcattctacgtccagatcgacttttctcgcccatacgaccctcgacgcgatctattccgggtcgaatacgttattggccgttacccccaggagaataaggggacatacatccctgtgcccatcgtctcagagttgcagtctggtaaatggggcgccaaaatcgtaatgcgcgaggacaggagcgtgaggctgagcatccaatctagccccaagtgcatcgtggggaaatttcgtatgtacgttgcagtgtggaccccttacggagtgctgaggacttctcggaaccccgaaacagacacatacattctgttcaatccctggtgcgaagacgatgctgtctaccttgacaatgagaaagagcgcgaggagtatgtgctgaatgacatcggcgtaattttttatggcgaagtgaacgatatcaagacgcgctcttggagctatggccaattcgaggatggaatacttgatacctgcttatacgttatggaccgagcacagatggacctctcaggccgtggaaatcccatcaaagttagtcgcgttggctcagctatggtcaacgcaaaggatgacgagggagtgttggtgggtagctgggataacatctatgcctacggggtgcccccatcagcatggaccggatcggtagatatactcctcgaatatcggtccagcgagaatccagtacgatatgggcagtgttgggtattcgccggcgttttcaacaccttcctcagatgtctcggcatcccggcccgcattgtaaccaactattttagtgctcacgacaacgacgccaatttgcagatggatatcttccttgaagaagacggcaatgtgaattcaaaactgactaaggactcagtgtggaattaccattgttggaacgaggcctggatgaccaggcctgatttgcctgtggggtttgggggatggcaggcagttgactccactccccaggaaaacagtgacgggatgtacagatgcgggcccgcgtctgtgcaagccatcaagcacgggcatgtatgctttcagttcgacgccccctttgtcttcgcagaagttaatagcgatcttatttacatcactgcgaaaaaggatgggacacatgtggttgaaaacgtggacgcaacacatatcggaaaactcattgtgaccaagcaaattggaggcgatggtatgatggatatcacggacacgtacaagttccaagaaggccaagaagaggaaagactggccctagaaactgcgcttatgtatggcgcaaagaagcccctgaacacggaaggagtcatgaagtcccgcagcaacgttgatatggactttgaagttgagaatgcggttcttggaaaagacttcaaactcagtatcacttttcggaacaattcacacaatagatacaccattactgcgtatttgtcagctaatattactttttataccggtgttccaaaggcggaatttaagaaagagacgttcgacgtcacactcgaaccactgagcttcaaaaaagaggcggtactcatccaagccggcgagtatatgggtcagctgcttgaacaggctagtctccatttttttgtgactgccagaattaatgagacccgcgacgtattggctaagcagaaatcaaccgtgctcacaatacctgaaattatcatcaaagtccgcggtacacaggtagtaggtagtgatatgacagtcaccgtccagtttacaaacccactgaaggaaactttgcggaacgtgtgggtgcacctggatggacccggtgttacccgccccatgaaaaaaatgtttagagaaatacggccaaactcaacagtgcagtgggaagaggtgtgccgaccctgggtctcagggcatagaaagctgattgcctccatgtcttctgatagtctgaggcatgtctacggagagcttgacgtccaaattcagcggagaccttctatg

SEQ ID NO: 2121 - DNA, 2196 bp, Artificial Sequence
  derived and/or modified sequence
atgtctgagactagtcgcaccgcctttggcggccgcagagcagtgcctcccaacaactcaaacgccgccgaggatgaccttcctacagttgagctgcaaggtgtagtgccaaggggtgtgaatctgcaggagttcctgaatgtcacctcagttcacttgttcaaggagcgctgggacaccaacaaggtagaccaccatactgataaatacgagaataacaagctaattgtgcgaagaggacagtccttttatgttcagatcgatttcagccgcccctacgatccccgccgagacctgttcagagtggaatatgtaattggcaggtacccccaggaaaacaagggcacctatattccagtgcctattgtgtccgaactgcagtctggaaaatggggcgccaagatagtgatgagagaagacaggtctgtgcggctttctattcaatcttctcctaagtgcatagtgggtaaattcaggatgtatgtagccgtgtggaccccctacggagtcttgagaactagtcgaaaccctgagactgatacttatatactgtttaatccctggtgtgaggacgacgctgtttatctagataacgaaaaagagcgtgaagagtatgtgctgaacgatattggtgtgatcttttacggcgaagttaacgatattaaaacaagatcctggtcctatggacaattcgaggacggtatactggacacctgtctgtacgtcatggatcgtgcccagatggacctttccgggaggggaaacccaattaaagtgagccgagtcgggtccgctatggtgaacgctaaagatgatgagggagtattagtgggaagttgggataacatatacgcctacggcgttcccccaagcgcttggacaggctctgtagacatcctgctagagtacagaagtagtgaaaatcccgtgcgctacggacagtgctgggtgttcgctggcgtcttcaatactttcttacgatgcctgggaatccccgcccggattgtgactaactacttctctgctcacgacaatgacgccaatctgcagatggacattttcctggaggaagatggtaatgttaacagcaagctaactaaggatagcgtttggaactaccactgctggaacgaagcatggatgacacgtcctgatctgcccgtcggattcggcggctggcaggccgtggactctaccccccaggagaactctgatggcatgtaccgatgcggcccagcatccgtgcaagccataaaacacggtcatgtttgcttccagttcgatgctcccttcgtcttcgccgaggtgaatagtgacctgatctacataacagcaaagaaggacgggacacatgtggtggagaatgttgatgccacacacataggaaagcttatcgttacaaaacagataggcggggatgggatgatggatatcactgacacttataaattccaggagggtcaggaggaggagcgactggctctggagaccgctctgatgtatggagccaagaaacccctgaatactgagggcgtgatgaaaagccggtctaatgtcgacatggatttcgaagttgagaatgccgttctaggcaaagattttaagctctctatcacattcaggaacaatagccacaaccggtacactattaccgcctacctgtctgcaaacattactttctacaccggggttcctaaagccgagttcaaaaaggagaccttcgatgtgacactggagccactctcattcaagaaggaggccgtgcttatacaggctggcgaatacatgggccaactgctcgagcaggcaagcctgcacttctttgtgaccgctcgcataaacgagaccagagatgtgcttgcaaagcagaaaagcacagtgttgaccattcccgaaattattattaaggtgcgaggcactcaagttgtgggctctgatatgactgtcaccgtgcagttcaccaatcctctaaaagagaccctgcgaaacgtgtgggtgcacctggacggacctggagtgacacgtcctatgaaaaaaatgtttcgggagatccgccctaactctacagtccagtgggaggaggtttgtcgaccctgggtttctggccaccgtaagctgatcgcctctatgtcctctgatagccttcgtcatgtttacggcgagctggacgtgcagatccagaggaggccctccatg

SEQ ID NO: 2122 - DNA, 2196 bp, Artificial Sequence
  derived and/or modified sequence
atgtcagaaacttcccggactgcatttggtggtagacgtgccgttcctcccaacaattccaacgccgcagaagatgatctgccaactgtggaactgcagggtgtggtgcctagaggagtgaacttgcaagaattcctgaacgtcactagcgtgcatctgtttaaagaacggtgggacaccaataaggtcgatcatcacactgataagtacgaaaacaacaagctcattgtgaggcgcggccagagcttttacgtgcagatcgatttttcaagaccctacgatccgcggagagatctcttccgagtggaatacgtcatcggtcgatacccacaagaaaacaagggcacctacattcccgtccctatcgtttcggaacttcaaagcggaaagtggggagccaaaattgttatgagagaagatcgctcagttcgcctctcgatccaatcctcacctaagtgtatcgtgggaaagttcagaatgtacgtggctgtgtggactccttacggagtgttgcgcacctcgcggaaccccgaaactgatacctacattcttttcaacccatggtgtgaagatgatgcagtctacctggacaatgaaaaggagcgtgaagaatacgtgttgaacgatataggcgtgattttctatggcgaagtgaatgacattaagactcgttcttggtcatacgggcaattcgaggacggcattctggatacttgtctttacgtgatggatagagcacaaatggatctttcgggcagaggcaaccccatcaaggtgtcccgggttggttcggccatggtgaatgcgaaagatgacgaaggggtcctcgtcggttcgtgggacaacatatacgcttatggtgtccctccttcagcctggaccggttcggtggacattctgctcgaataccgttcgtccgagaacccagtgagatacggacagtgttgggtgttcgctggagtgtttaacacttttctgaggtgccttgggatccctgcgcggatcgtgactaactacttctccgcacacgataacgacgcaaacctgcagatggatatctttctcgaagaagatgggaacgtcaattcaaaactgaccaaggattcggtctggaattatcattgttggaatgaagcatggatgactcgacctgaccttcctgtgggatttggaggctggcaagcggtggatagcactcctcaggagaacagcgacggaatgtatagatgcggacctgccagcgtgcaagctatcaaacacggacatgtgtgtttccaattcgatgcaccatttgtctttgccgaagtgaattccgatctcatctacatcactgcaaagaaggacggaactcatgtcgtggagaatgtcgatgcgactcatatcggcaagctcatcgtgactaagcagataggaggcgacggtatgatggatatcaccgatacgtacaagtttcaagaggggcaagaagaagaacgactggcactcgaaactgccctgatgtacggagcaaagaagccactgaatactgagggagtgatgaagtcaagaagcaacgtggatatggactttgaagtggaaaacgcagtgctggggaaggactttaagttgtctattacttttaggaataactctcacaaccgctacaccatcaccgcatacttgtccgcaaatatcacgttttacaccggggtccctaaggctgagtttaagaaagagacttttgacgtgaccctggaacctctttcgtttaagaaggaagccgtcctgattcaagctggagaatacatgggacagctgctcgaacaggcctcgctgcacttctttgtgaccgcaagaataaacgaaacgcgagacgtgcttgcaaagcaaaagagcaccgtgcttaccattccagagattatcattaaggtgcgcggcacccaagtggttggaagcgatatgacggttactgtgcagttcaccaatcccctcaaggaaaccctgagaaacgtgtgggtgcatctggacggacctggagtcacccgccccatgaaaaagatgtttagagaaatcagaccaaactccaccgtccaatgggaagaagtgtgccgaccttgggtgtcaggccataggaagctcattgcttctatgtccagcgactccctgagacacgtgtacggcgagctggatgtgcaaattcaacgcagaccaagtatg

SEQ ID NO: 2123 - DNA, 2196 bp, Artificial Sequence
  derived and/or modified sequence
atgagcgagacgagcaggacggccttcggcggaaggagagcggtccctccaaacaattccaacgccgccgaggatgacctgcctacagtagagctccagggtgtcgtgccaagaggcgtgaacctgcaagagtttttgaacgtaacctctgtgcacttgtttaaggaaaggtgggacacaaataaggtggaccatcacacagacaagtacgagaataacaaactgattgtgagacgcggtcaaagtttctatgttcagatcgacttttctagaccttatgacccgcgccgcgacctctttcgcgtggaatacgtcattggtcgctatccgcaggagaataagggcacctatatcccagtgccaatcgtgtcagagttgcagtcaggtaaatggggagcaaaaatagtgatgagggaggacagaagcgtcaggctcagtatccagtcctctcctaagtgtatcgtgggaaagtttaggatgtacgtggctgtgtggacaccatatggtgtcttgagaactagcaggaatcccgaaacagacacctatatccttttcaatccatggtgcgaagatgacgctgtatacctcgacaacgagaaggagagggaggagtacgttcttaacgatattggcgtcatattctatggcgaagtaaacgatattaagacccgctcttggagttacggccagtttgaggatggaatcctcgatacctgtttgtatgtaatggatagagcccagatggatctgagtggtcgcggcaatcctattaaagttagtcgcgtgggctctgcaatggtgaacgccaaagacgatgaaggcgtgttggtcggttcatgggataatatctatgcatacggagtgccacctagtgcgtggacaggaagcgttgacattctgctcgaatatagatcatccgagaaccccgtaaggtacggtcagtgctgggtgttcgccggcgtgtttaatacctttctccgctgtctcggcatcccagctaggatagtgaccaactactttagcgctcatgacaatgacgccaatctccaaatggacattttcctggaggaagatggcaacgtaaattccaagctcactaaggatagcgtctggaactatcattgttggaacgaggcctggatgacgaggcccgaccttcccgtgggtttcggcggatggcaagctgtcgactctaccccgcaagagaatagcgacggcatgtatagatgcggaccggcctctgtgcaggccatcaagcatggacacgtatgcttccaatttgatgctccctttgttttcgcggaagttaatagtgacctgatctatatcaccgctaagaaagacggcacccacgtggtcgaaaacgtggacgccacccatatcggcaagctgatcgtgacgaagcagataggcggagacggaatgatggacatcacagatacatataagttccaggagggccaggaagaagaacgcctcgcgctcgaaactgccttgatgtacggtgccaagaagccgctcaacaccgagggtgtcatgaagagtaggagcaacgtcgacatggacttcgaggtggaaaacgctgttctgggtaaggactttaagctttctattacgttcagaaacaatagtcacaacagatatactatcacggcatacctttccgccaacatcaccttttatacaggcgtgccaaaagccgaattcaaaaaggagacattcgacgttacactggaaccccttagctttaagaaggaagccgtactgattcaggcaggcgagtacatgggccaattgttggaacaagcaagcctgcatttcttcgtgaccgcacgcatcaacgagaccagagacgtgcttgccaagcagaaaagtactgtgctcacgatacctgagattataataaaggtgcgcggcacccaggtcgtgggcagcgacatgaccgtgacggtccaattcaccaatccgctcaaggagacgctcagaaacgtctgggttcatcttgatggcccaggagttacaagacctatgaagaaaatgttcagggaaatccgcccgaatagcacagtgcagtgggaagaggtatgcagaccttgggtgtccggacatcgcaaacttatcgcatcaatgtcttctgattccctgaggcacgtctatggagaactggacgtacagatccagaggagacccagtatg

SEQ ID NO: 2124 - DNA, 2196 bp, Artificial Sequence
  derived and/or modified sequence
atgtcagaaacctcgagaactgcatttgggggtcgcagagcggtgccacccaataactcgaatgcggctgaagatgacctgccgactgtggagctgcaaggagtggtgccgcggggagtcaacttgcaggagttcctgaacgtaacctctgtccaccttttcaaggagcggtgggatacgaacaaagtcgatcatcatacggacaagtatgagaacaataagctcatcgtgcgccgcggtcaatcgttttacgttcagatcgatttctctcggccgtacgatccgcgcagagatctcttcagggtggaatacgtgatcggaagatacccccaggagaataagggcacttatatccccgtcccaatcgtctcagagctgcagagcggaaagtggggcgcaaagattgttatgcgggaagatcggtcggtgcggctgtctatccagtcctcgccaaaatgcattgttggaaagttcagaatgtatgttgctgtgtggactccttacggagtgttgcgaacttcaagaaatcctgaaaccgatacgtatatcttgttcaatccgtggtgcgaggacgatgctgtctacctcgataacgaaaaggaacgcgaagagtacgtgctgaacgacatcggagtcatcttttacggcgaagtgaatgacataaagactcgctcctggtcatacgggcagttcgaggacggaatcctcgatacgtgcctgtacgtcatggaccgagctcagatggacctcagcggacgcggtaacccaatcaaagtgtccagggtgggttcggccatggtgaatgcgaaagacgacgaaggcgtcctggtgggatcgtgggacaacatttacgcctacggagtcccaccgagcgcttggaccggatccgtggacattctgctggagtacaggtcctcggaaaatccggtgcgctacggccagtgctgggtctttgcaggggtgttcaatactttcctccggtgtctgggtatcccggcaagaattgtgaccaactactttagcgcacatgataacgacgcaaacctgcagatggatatcttcttggaagaggacgggaacgtgaactcgaagctgaccaaagattcagtgtggaactaccattgctggaacgaggcctggatgacccgccctgaccttccggtgggattcggaggctggcaggccgtggactcgactcctcaagaaaacagcgatggaatgtaccggtgtggaccagcttcagtccaggccatcaagcatggacacgtgtgttttcaattcgacgcgccgttcgtgtttgcagaggtgaattcagatctgatctacataaccgctaagaaggatgggactcatgtggtggaaaatgtggatgcgactcacatcggaaagctgatcgtcactaaacagatcggaggcgacggaatgatggacattaccgacacctacaagttccaagagggtcaggaggaagaacgtctcgccctggagacggcgctcatgtacggagccaagaaacccctgaatactgaaggagtcatgaagtcacgcagcaacgtggacatggacttcgaggtggaaaacgcagtactgggcaaggacttcaagttgtcgattaccttcaggaacaactcgcacaaccggtacaccatcaccgcctatctgtccgccaacatcactttctacaccggggtgcctaaggcggagtttaagaaagagacttttgacgtcacgctggaaccgctctccttcaaaaaagaggcggtgctgatccaggccggtgagtacatggggcagctgctcgaacaggcgtccctccatttctttgtgacggccagaatcaacgaaacgcgggatgtgcttgcgaagcaaaagagcacggtgctgaccatcccggaaatcattatcaaagtcagaggaacccaagtggttggatccgacatgaccgtaactgtgcagttcaccaatccgctgaaggaaactctgcggaacgtgtgggtccacctggacggtcccggagtcactagaccaatgaagaagatgttcagggaaattcgcccgaattcgaccgtgcaatgggaggaagtgtgcagaccgtgggtatctggccatcgcaagctcatcgcatcaatgtcgtcggattccctccggcacgtttacggggagcttgacgtacagattcaacgtcgaccttcgatg

SEQ ID NO: 2125 - DNA, 2196 bp, Artificial Sequence
  derived and/or modified sequence
atgagtgagacttcaaggactgcattcggtggacgtagggccgtccctcctaataacagcaacgcagccgaagacgacctgcccactgtcgagctccagggcgttgtcccacgcggcgtcaatctgcaggagttcctgaacgtgactagcgtgcacttgtttaaagaacgctgggataccaacaaggttgaccaccatactgataagtatgagaataataagctcatcgtgaggaggggccagtccttctacgtacaaattgacttcagcagaccctacgatcctcgtcgcgacctgttccgtgttgaatacgtgataggtcgttacccccaggaaaacaagggaacctatattcccgtgcctatcgtgagcgagttgcagagtggcaaatggggtgcaaagatagtgatgcgtgaggatcgtagtgtgagattgagcattcagtcctctcccaagtgcatcgtcggaaagtttcgcatgtacgtagcagtttggactccctacggcgtgctgagaactagtaggaatccagagacagacacctacatcctgttcaacccttggtgcgaggacgacgctgtgtacttggataacgaaaaggaacgtgaggaatatgtactgaacgacatcggagtgatcttctatggagaggtgaacgatatcaaaaccaggtcatggtcatacggccagtttgaggatggaattcttgatacatgtctgtacgtaatggatagggcccagatggatctgtccggtcgtggtaacccaataaaggtctccagggtcggctccgccatggtgaacgctaaagacgacgagggtgtcctggtgggttcttgggataatatctacgcctacggcgttcctccctctgcatggaccggtagcgtcgatatcctgctggaatatcgctcatcagagaacccagtgaggtacggtcagtgctgggtattcgctggtgtattcaatacatttctgcgttgccttggaatcccagcccgcatcgtgactaactacttctctgcacacgacaacgacgccaaccttcagatggacatatttctggaggaagatggaaatgtaaactcaaaattgacaaaggattctgtgtggaactaccattgttggaacgaagcctggatgacaaggccagatctgcctgttggtttcggaggctggcaagccgtggactccaccccccaagagaactccgatggaatgtatcgttgtggccctgcctctgttcaggccatcaagcatggccacgtatgtttccaattcgacgctcccttcgtgttcgctgaggtgaactcagacctcatctatatcactgctaagaaggatggcactcacgtggtggagaacgtcgatgctacacatattggaaaactcattgtcactaagcagatcggtggagacggaatgatggacatcaccgatacctacaagtttcaagagggccaagaagaggagagactggccctggaaaccgccctcatgtacggtgcaaaaaagcccctgaacactgaaggcgtaatgaagtctcgctcaaacgttgatatggattttgaagtggagaatgctgtcctgggcaaagactttaagctgtcaatcaccttccgcaataacagtcacaatcgctatacaataactgcttacctgagtgccaacattaccttttacaccggcgtccctaaggccgaattcaagaaagagacctttgatgtaaccttggaacctctgtcttttaagaaggaggccgtcttgatccaggctggcgaatacatgggtcaattgctcgaacaagcctccctccatttctttgtaactgctaggattaacgagactcgcgatgttttggctaagcaaaaatctacagtattgaccatccctgaaatcatcatcaaagtgagaggcacacaggtcgtgggttccgatatgactgtgaccgttcagttcaccaaccccctgaaagaaactctccgtaacgtatgggtgcacctggacggtccaggtgtcaccaggcccatgaagaagatgttcagggagatccgccccaactccaccgtacagtgggaggaagtttgtagaccttgggtgagcggtcacagaaagctcattgcatccatgagcagtgattcccttaggcacgtatacggtgagctcgatgtccagatccagcgtagaccctccatg

SEQ ID NO: 2126 - DNA, 2196 bp, Artificial Sequence
  derived and/or modified sequence
atgagcgagacttccagaactgcatttggaggccgccgtgcagtgcctcccaacaattcgaacgccgccgaagatgaccttcctactgtcgaactccaaggagtggtgccgagaggtgtcaaccttcaggaatttctcaatgtcacttcagttcatctgttcaaggaacgctgggacaccaacaaagtggatcaccacacggataagtacgagaataacaagctgatcgtaagaagaggacaatccttttacgtgcaaatcgatttttcccggccatacgatccaagacgggatctgttccgagtggaatacgtgattggcagataccctcaagaaaacaaaggcacctacatacctgttccaattgtcagcgagctccagtcgggaaaatggggggcaaagatagtgatgcgcgaggatcgcagcgtcaggctttcaattcaaagctcacctaagtgtattgtgggtaaattcagaatgtacgtagccgtgtggactccgtacggggtgcttcggactagcagaaatcctgaaacggacacctacattttgtttaatccttggtgtgaggacgatgcggtgtacctcgataatgagaaggaaagagaggaatatgtcctcaacgatattggcgtgatcttctacggtgaagtaaacgacatcaagaccaggtcctggtcttacggacaatttgaagatggtattctggatacgtgcctgtacgttatggatcgggcacagatggacctttccggtagggggaaccctattaaggtcagtagggtgggaagtgcaatggtaaatgcaaaggatgacgaaggtgtgttggtagggtcatgggataacatctatgcatacggagtgccaccctcggcttggaccggatcggttgatatcctgcttgaataccgctcgtcggagaacccagtcagatacggacagtgttgggtgtttgcaggagttttcaatacttttctccgatgtttgggaattccggcacgtattgtgaccaactatttctcggcccatgataacgatgctaaccttcaaatggacattttcttggaagaggacggaaacgtgaacagcaagctcaccaaagattccgtgtggaactaccattgctggaacgaagcctggatgactcgaccggaccttccagtcgggttcggcggttggcaagcagtggactcaacgcctcaagagaactcggatggaatgtaccggtgtggtccggcatcggtgcaagcgataaagcacggtcatgtgtgcttccagtttgatgcacctttcgtctttgcggaggtgaatagcgatctgatttacattaccgccaagaaagatggaactcatgtggtcgaaaatgtggacgcaacgcatataggtaagctgattgtcaccaagcagataggcggtgatggaatgatggatattaccgacacgtacaaatttcaagaaggtcaggaggaagaaaggctggcacttgaaaccgctcttatgtacggagctaagaaaccactgaacaccgaaggggtgatgaagtccagatcaaatgtggatatggactttgaagtggagaacgcagtgctgggcaaggatttcaaactttcgattaccttccgcaacaactcacacaaccggtacactattaccgcatacctgtctgccaatatcactttctacactggcgtcccaaaggcagaattcaagaaggagacttttgacgtcaccctcgaaccccttagctttaagaaagaagcggtgctgatccaagcgggtgagtatatgggacaacttctggagcaggcatccctccactttttcgtgactgcacggattaatgaaacccgcgacgtgctggccaagcagaagtcaactgtgctgactatccccgaaatcatcataaaggtgagggggacccaggttgtcggaagcgatatgaccgtcactgtgcaatttaccaatcctcttaaagaaaccttgcgtaatgtctgggtgcatctggacggacctggcgtgactcgcccaatgaagaaaatgtttcgtgaaatcagacctaactcaaccgtccaatgggaagaagtgtgtcgaccatgggtgtccggccatcggaaattgatcgcctccatgtcgtccgactcactccgccatgtctacggggagcttgacgtccagatccagaggcgcccatcgatg

SEQ ID NO: 2127 - DNA, 2196 bp, Artificial Sequence
  derived and/or modified sequence
atgtcagaaactagcagaactgcttttggaggcagacgcgccgtgccacctaacaatagtaacgccgctgaagatgacctcccgactgtggaactgcagggcgtggtcccgcgcggcgtgaacctgcaagagttcctcaacgtcacgtcggtgcacctgttcaaggaacgctgggacactaataaggtcgaccaccacactgacaaatacgagaacaataagctgatcgtccggcggggacagtccttctacgtgcagattgattttagccgaccatacgacccgagaagagatctgttcagggtcgagtacgtgatcggccggtacccgcaagagaataagggaacctacatcccggtgccgatcgtgtcggaacttcaatcggggaaatggggcgccaagattgtgatgcgcgaggatagatcggtgcgcctgtccatccagtccagcccaaaatgcattgttggaaagttccgcatgtacgtggcggtttggaccccttacggagtcttgcggacttcccgcaatccagagactgatacttatatccttttcaacccgtggtgtgaggatgacgcggtgtacttggacaatgagaaagaacgggaagagtacgtcctgaatgacatcggcgtgatcttctacggagaagtcaacgatatcaaaactagatcctggtcatacggacagttcgaagatggaatcctggatacgtgcctctatgtgatggatcgagcacaaatggacctgtccggcagggggaacccaatcaaagtgtcgagagtgggttccgccatggtgaatgccaaggatgacgagggagtgcttgtgggctcctgggataacatctacgcctacggcgtgcctccgtccgcctggaccggttccgtggatatcttgctcgaatacaggtccagcgagaatccagtgcgctacggacagtgctgggtctttgccggcgtattcaacaccttcctgaggtgcctgggaatcccagcccggatcgtcactaattacttctcggcccatgacaatgacgccaaccttcaaatggacatcttcctggaggaggacggcaacgtgaattccaagctgaccaaggattccgtgtggaattaccactgctggaatgaagcgtggatgaccagaccagatctgccagtgggattcggaggatggcaggccgtcgatagcactccgcaggaaaactcagacggcatgtaccggtgtggcccagcctccgtccaagctatcaagcacggacacgtctgtttccaattcgatgccccctttgtctttgccgaggtcaactcagacctgatctacattaccgccaagaaagacggcacccatgtggtggaaaacgtggatgcgactcatatcggcaaactgatcgtgacgaaacaaatcggtggtgacggcatgatggatattaccgacacgtacaagttccaagaaggccaagaagaggagcggctggcattggaaactgcgctcatgtacggggccaagaaacctttgaacaccgaaggtgtcatgaagtcgcgctccaatgtggacatggacttcgaagtggagaatgcagtgctgggtaaggacttcaagctctctatcaccttcaggaacaactcacacaatagatacactattaccgcttacctgtcggctaacatcactttctacacgggcgtgcctaaagcggaattcaagaaggaaacgtttgatgtgaccctcgagccgctcagcttcaagaaagaagcagtcctgatccaggccggggaatacatgggtcaactgttggagcaggcatcgctgcatttcttcgtgaccgcccgcattaacgaaacccgcgacgtgctggccaagcaaaaatctactgtccttaccatcccggagattatcatcaaagtccggggtactcaagtggtgggatccgacatgactgtcaccgtgcagtttacgaacccgctgaaggaaacgctgcggaacgtgtgggtgcacctcgacggacccggggtgacccggcctatgaagaagatgtttagagagatcagacctaactcgaccgtgcagtgggaggaggtgtgcagaccgtgggttagcggccaccgcaagctgatcgcctcgatgtcctccgattcactgcggcatgtctatggtgaacttgacgtgcagattcagcgaaggccgtcgatg

SEQ ID NO: 2128 - DNA, 2196 bp, Artificial Sequence
  derived and/or modified sequence
atgtccgagacctcacgcacagcttttgggggtcggcgcgctgtgccaccaaataatagtaacgccgccgaggacgacctaccaacagtagagcttcaaggagtggttccaagaggagtcaacctccaggagtttttgaatgtgacaagtgtccacctctttaaagagagatgggataccaataaggtggaccatcacactgataaatatgagaacaacaagctgattgtccgccgggggcaatctttttatgtgcagatcgattttagtagaccctacgatccaagaagagacttattccgggtagaatacgtcattggccgctacccacaagaaaacaagggtacttatatccccgtacccatcgttagtgagttacagagtgggaaatggggtgctaagatagtgatgagggaagatagaagtgttagacttagtattcaaagctcccccaagtgtatcgtggggaagtttaggatgtatgtcgcggtctggaccccttacggggttctgcggacaagtcgaaaccccgaaactgatacctacatattgtttaacccctggtgtgaagacgacgcggtctacctagacaacgagaaagaaagggaagagtatgtgctcaatgatattggcgttattttctatggagaggtcaatgacataaaaacgcgcagctggtcatacggccaattcgaggatgggattttggatacttgtctgtacgtaatggacagagcgcagatggacttatccggccgaggtaacccaatcaaagtgtcaagagtggggagcgcgatggtaaatgctaaggatgatgagggggtgctggtgggcagctgggacaatatctatgcctatggcgtgccacctagtgcttggaccgggtccgtcgatatcctgttagaatatcgaagctccgagaacccggtccggtacggccagtgttgggtcttcgctggggtttttaacactttcctccggtgcctaggaatccccgcgcgcattgtgaccaactacttttccgcacacgataatgacgccaaccttcagatggatatcttcctggaagaggacggcaatgtgaacagcaagctcaccaaggactctgtgtggaattatcactgctggaatgaggcatggatgactcgacccgacctacccgtggggtttgggggctggcaggccgtggacagcactccccaggagaattctgacggtatgtacaggtgcgggcctgcttcagttcaggcgataaaacatggccacgtttgctttcaatttgatgccccattcgtgttcgccgaggtgaactcagacctcatatatattactgccaaaaaggacggcacccacgtggtcgaaaatgtagatgctactcatatcggtaagctcatcgttacaaagcagataggtggcgatggaatgatggacattactgacacttacaagtttcaggaaggccaagaggaagaacgactcgctctagaaactgccctgatgtacggggccaaaaagcccctcaacactgagggggtgatgaagtccagatctaacgtggacatggacttcgaagtcgagaatgccgtcctggggaaggacttcaagctctcgattacattcaggaataacagccataacagatacactattaccgcctatctctccgctaacattactttctacaccggcgtgcccaaagctgagttcaagaaggaaacgtttgatgtgaccctcgagccattatcctttaaaaaggaagccgtcctgatccaggcaggtgagtatatgggccaactcctggagcaagcttcactgcacttcttcgtcaccgctcggattaacgagactagggatgtcctagcgaaacaaaagagcaccgtgctgactatcccagagataatcatcaaagtacggggaactcaagttgtgggaagtgatatgacagtcaccgtgcaattcacgaatcccctcaaggagaccctccggaacgtgtgggtacacctggacggaccaggagtcacacgcccaatgaaaaagatgtttagagaaatccgtcccaactctacagtacagtgggaagaggtgtgtcggccctgggtgagcggacacagaaaactaattgcttctatgtcgtcggatagtttacggcatgtctacggggagctcgacgtgcagatccagaggcggccttccatg

SEQ ID NO: 2129 - DNA, 2196 bp, Artificial Sequence
  derived and/or modified sequence
atgtcagaaacctcccgcacagcgttcggcggacgccgggccgtaccaccaaataactcaaatgctgccgaggatgaccttcctaccgtggaactgcagggtgtcgtgcccagaggtgtgaacctgcaggaattcctaaacgtcaccagcgtgcatctgtttaaagagagatgggacacaaacaaggttgatcaccacactgataaatacgaaaataataagctcatagtgcgcagagggcagagtttttatgtgcagatcgacttttccagaccttacgatccccggagagatctgttccgcgtcgagtacgttataggccggtacccacaagaaaacaagggcacatatatcccggtccccatcgtatcagaactgcagtccggcaagtggggggcgaaaattgtgatgcgagaggacaggtcagtgcgcctgagcatccaaagctctccaaagtgcattgtggggaaattccgaatgtacgtcgcagtttggaccccatacggggtacttagaacatctcgaaatcctgaaactgacacttacattctgtttaatccatggtgcgaagacgacgccgtgtatctggataacgagaaagaaagggaggaatacgtactaaatgatattggcgtcatattctacggtgaggtcaacgatatcaagacccgcagttggtcgtacggacagtttgaggatgggatcctggacacctgcctgtatgtaatggacagggcccagatggacctctccggccgtggcaacccaatcaaagtgtcgcgcgtcggcagcgccatggtgaacgctaaagacgatgagggagtgctagttggatcctgggacaatatctacgcatatggggtgccacccagtgcatggactggttcagtggatattctcctggaataccggtccagtgagaacccagtgaggtacggccagtgctgggtatttgcaggggtcttcaacaccttcctgaggtgtctaggtatccctgctagaatcgtgacgaattatttcagcgcacatgataatgatgccaatctgcagatggatatcttcctggaggaagatggcaatgttaactccaagctcactaaggatagcgtgtggaactatcattgttggaatgaagcttggatgacacgtccagaccttcctgtgggttttggcggctggcaggccgtcgatagtaccccacaggagaactccgatggaatgtaccgctgcggacctgctagtgtacaggcaatcaagcacggccatgtttgcttccagtttgacgcaccgttcgttttcgccgaggttaactctgatctcatttatattacagcaaagaaagatgggacccacgtggtagagaatgtggacgcgacccatataggcaaactgatcgtgaccaagcaaatcggaggggacggcatgatggatatcaccgatacgtataaatttcaggaagggcaggaagaggagcgcctcgcactcgaaaccgcactcatgtacggagcgaaaaagcctctgaacactgaaggtgtcatgaaatcacgtagcaatgtggacatggatttcgaggtggaaaacgccgtcctcgggaaggattttaagctgtcaatcaccttccgaaataacagccataacagatataccataacagcatatctgagcgccaatatcaccttctacacaggcgtccctaaggccgagtttaagaaggagaccttcgatgtcactctggagcccctgtcttttaaaaaggaagccgtcctgatacaggcgggcgaatacatgggacagctcctcgagcaggcctcattgcacttcttcgtcacagcaagaattaacgagactcgtgacgtcctggccaagcagaaaagtaccgttcttaccatccctgagattatcatcaaggtgcggggcacacaggtggtggggtcagatatgacggtcactgtgcagtttaccaatccccttaaggagacccttaggaatgtgtgggtccatctagacggaccaggtgtcacccgacccatgaaaaagatgttcagagagatcagaccaaatagtaccgtgcaatgggaggaagtgtgccgtccttgggtgtcaggccatcgaaagttgattgcatctatgagttccgactccctgaggcatgtgtacggagagctggacgtgcaaattcagcgccgccccagcatg

SEQ ID NO: 2130 - DNA, 2196 bp, Artificial Sequence
  derived and/or modified sequence
atgtcagaaacttcccggacagcattcggcggtcgccgcgctgttcctcccaacaactcaaacgccgctgaggacgacctacccaccgttgagttgcagggagttgtgccccgtggcgtgaaccttcaggaatttcttaacgtgaccagtgtgcatcttttcaaggagaggtgggatactaacaaagtggatcatcatacggataagtatgagaacaacaagctgatagtgcgtaggggccaatccttttacgtacagatagacttctcgcgaccgtatgacccacgccgagatctcttccgcgtagagtatgtaattggtaggtacccccaggagaacaaggggacttacatcccagtgcccatagttagcgagcttcagtctggcaagtggggggctaaaatcgtgatgcgcgaggaccgctcggtgcgtttgtcgattcagtctagcccaaagtgcatagtcgggaagttcagaatgtacgtcgccgtctggaccccgtacggagtgttacggacctctaggaacccagagactgatacgtacattttgtttaatccatggtgcgaagacgacgcagtttatcttgataacgagaaggagcgggaagagtatgtgcttaatgatattggggtcatcttctatggtgaggtgaatgatatcaaaacccgctcatggtcttatgggcagttcgaggatggcatactggatacctgtctttacgttatggatagggcacaaatggatctcagtggacgcggcaatccgattaaggtgtcccgggttggctccgcaatggtcaacgctaaagacgacgagggcgtgcttgtcggctcatgggacaatatctacgcttacggggtgcccccctcggcctggacaggttccgtcgacatcctccttgaatataggtcgtccgagaaccctgttcggtacggacaatgttgggtgtttgcaggtgtgttcaatacctttttgagatgtttagggattcctgcacgaatcgtcaccaattatttctctgcacatgacaatgacgcaaacctacagatggacatcttcttggaagaagatggcaacgtcaattcgaagcttactaaggattctgtgtggaactaccactgttggaacgaggcttggatgacacgaccagatctgccggtgggctttgggggttggcaggccgtcgattccacaccccaggaaaactcggatggcatgtaccgttgcggtcccgctagtgttcaggctattaaacacggacatgtttgctttcagtttgacgccccattcgtctttgctgaagtcaactcagatctaatctatattactgccaaaaaggacggtactcacgttgtcgaaaacgttgatgctacccatataggtaagttgatagtcactaagcagattggaggtgatggtatgatggacatcaccgatacttataaattccaggagggacaagaagaggaacggctagctctcgagactgctctaatgtacggggctaaaaagccgttgaatacggaaggagttatgaaatcccggtctaacgtcgatatggacttcgaagtcgaaaacgccgttctcggcaaagatttcaagctgtccatcacgtttcgcaacaactctcataatcgttatacgattactgcatacctgtctgccaacattactttctacacaggcgtgcctaaggcagaattcaagaaagagaccttcgacgttactctagagcccttgagcttcaagaaggaggctgtgctcatacaagccggtgagtacatgggccagctgctcgaacaggcaagcttgcacttcttcgtgacggctcggatcaatgaaacccgcgacgttcttgcaaaacagaaatctacggtgcttaccatacctgaaatcatcattaaggtccgcggcacacaggttgttggtagtgacatgacagttactgtacaattcaccaatccactgaaggaaacccttcgcaacgtgtgggtgcacttggatggaccaggcgtgaccaggcccatgaagaagatgttcagggaaatccgacctaattctacggtacagtgggaagaggtttgtcgaccttgggtgtctgggcatcgtaaattgattgcctccatgtcttccgactcactgcgccatgtatatggcgagctagatgtccagatacaacggcggccttcgatg

SEQ ID NO: 2131 - DNA, 2196 bp, Artificial Sequence
  derived and/or modified sequence
atgtccgaaaccagccggacggccttcggaggaagaagggccgtacctccaaacaatagcaacgctgcagaggacgacctgcccactgtcgagctgcagggagtcgtcccaagaggagtgaacctgcaagaatttctgaacgtgacatctgtccaccttttcaaggaacggtgggataccaacaaggtggaccatcacaccgataagtacgaaaataacaagctaatcgtcagacggggacagtctttctatgtgcagatcgatttcagccgcccgtatgatcctagaagagacctgtttagagtggagtatgtgattggaagatatccgcaagagaacaaggggacttatatacccgtgcctattgtgtccgaactacagtccggtaagtggggggcgaagatagtgatgagggaagatcggtccgttaggctgagcattcagagttctccgaaatgcatagtggggaagttccgtatgtatgtggcagtctggacaccctacggcgtgttgcgcaccagccggaaccccgagaccgatacttacatactctttaatccttggtgcgaggacgacgccgtctatctggataacgaaaaggagcgggaagaatacgtactgaacgacatcggcgtcatcttctacggggaggttaatgacatcaaaactcgatcttggtcatacggacagttcgaggacggcattttggacacatgcctctacgtgatggatcgcgcgcagatggacctatctggtcgcgggaaccctatcaaagttagcagagtggggtctgcgatggtgaatgccaaggacgatgagggggtgctagtcggatcgtgggataacatttatgcttacggagtgccacccagtgcatggaccggctcagtggacattttgctagagtaccgatccagcgaaaatccagtgagatatggccagtgctgggtttttgccggagtgtttaacaccttcctgaggtgcttgggcatccctgcccgcatcgtaactaactacttttctgcccacgacaatgacgcaaatctgcaaatggacattttcctcgaggaagacgggaacgtgaactccaaactgactaaggactcggtgtggaactaccactgctggaacgaggcctggatgacacgacccgatctgccggtcggctttggcggttggcaggcggtagattctacaccacaggagaactccgacgggatgtataggtgcggccccgcttcggtgcaagctattaagcacggccatgtctgcttccagtttgatgccccctttgtcttcgccgaagttaattccgatctgatttacattacagcaaagaaagatggaactcacgtggtggaaaacgtggatgctacccatattggcaaactgatcgtaaccaagcagatcggcggggacggaatgatggacatcacggacacttacaaattccaggagggccaagaagaagagaggttggccctcgagaccgcgctgatgtacggcgcaaagaaaccgctgaacaccgaaggcgtcatgaaatcacgttccaatgtggatatggatttcgaagtcgaaaacgcagtcctcgggaaggatttcaagctctccattactttccggaataatagtcataaccggtacaccattaccgcttacctgtctgcgaacataactttttacacaggcgttcctaaggctgaatttaagaaggaaacctttgacgttactcttgagccgctgagcttcaagaaggaggccgtcttgatacaggccggggaatatatgggtcagctactggaacaggctagcttgcacttttttgtaaccgctaggatcaatgagacaagggatgttctggcaaagcagaagagtacggtcttgacaattccggaaattatcataaaagttagagggacacaggtcgtaggatcagatatgaccgtcacagtgcagttcacaaatccgctgaaggaaacactgcgcaatgtctgggtccatctagatggccccggagttactcgtccaatgaagaagatgtttagagaaatacggcccaacagcaccgtccagtgggaggaagtctgccggccgtgggtgagcggccacaggaagctgatcgccagcatgtcttcagactcgctccgccacgtgtacggtgaattggacgtgcaaatccagaggcgacctagcatg

SEQ ID NO: 2132 - DNA, 2196 bp, Artificial Sequence
  derived and/or modified sequence
atgagcgagacgtccaggacagccttcggtggacggcgagccgttcctccaaacaatagtaacgccgcagaagatgacctccctactgttgaactccagggcgttgtcccacgcggcgtaaatcttcaggaattcctgaacgtgacctcagtgcacctgttcaaggagcgatgggacaccaacaaggtcgatcatcataccgacaaatatgagaataacaagctgatcgtacgtcgcggtcagtctttttacgtgcagattgactttagccggccctacgaccctaggagggacttattccgggtcgagtacgtgatcgggcgatatccgcaagaaaacaaaggtacttacatccctgtgccaatagtctcagagctgcagtccgggaaatggggggctaagattgtgatgcgggaggacagatcggtcagactgtccattcagtcgtcccccaagtgcatagtgggaaaattcaggatgtacgttgccgtttggactccctacggcgtgttacggacttctcggaatcctgagactgatacctacatcttattcaacccttggtgtgaggatgacgcggtgtaccttgacaacgagaaggagagggaggaatacgtcctcaacgatataggcgttatcttttacggagaggtgaacgacattaagacacgatcatggagctatggccagttcgaggacggaattctggacacttgtctctacgtgatggatcgggcgcagatggatctttccgggcgcggcaaccctatcaaggtctcccgggtgggtagcgccatggttaatgccaaagacgacgaaggtgtgctggtgggctcttgggataacatctatgcgtacggagttccccctagcgcgtggacaggctcagtggacatactgttggagtatcgcagcagcgaaaatcctgtacggtatggccagtgttgggtatttgcaggggtctttaataccttcttgcggtgtctgggaatcccagccaggatagtaaccaattacttctctgcccacgataacgatgctaacctccagatggacatcttcctggaggaagatgggaacgtgaattctaagctgacaaaagactccgtatggaattaccactgctggaacgaggcttggatgacacgtccagacctcccagtgggtttcggtggctggcaggccgttgattcaacgccccaagagaacagcgacggcatgtacaggtgtgggcctgcatctgtgcaggctatcaagcacggccacgtatgtttccagtttgatgcaccattcgtgtttgccgaagtcaactccgatttaatctacatcactgccaagaaggacgggacccacgtggtggaaaatgtggacgcaacacacattggaaagctaatagtgactaagcagataggtggagatgggatgatggacatcacagacacttataaattccaggaaggacaagaggaagaaagattggccctggaaactgctttgatgtacggagcaaagaaaccccttaacaccgagggggtgatgaaatcgcgctctaatgtagatatggacttcgaagtggagaacgcagttctaggtaaagactttaagttgtctattacatttagaaacaactctcacaacagatacacaatcacggcctatctttctgccaatatcactttttatacgggagtgccaaaggccgaatttaagaaggagaccttcgacgtaacattagagcccctatccttcaagaaggaggccgtgctgattcaagccggggaatacatggggcagcttcttgagcaggcctcactccacttttttgtgaccgctcggatcaacgagacaagagacgtgctggctaaacagaagtcaacggtcctgacgatccctgagatcattataaaggttcgggggacccaggtggtaggaagcgacatgaccgtgaccgtgcagtttaccaaccctttgaaggaaaccctgcgaaatgtctgggttcatctcgatggcccaggagtcaccaggccgatgaaaaagatgttccgcgagattagacccaactccacagtacagtgggaggaggtctgccggccatgggtttctggacatcgcaaactgattgcaagtatgtcttccgactcactgcgacacgtatatggggagttagatgtccagatccagcggagaccttctatg

SEQ ID NO: 2133 - DNA, 2196 bp, Artificial Sequence
  derived and/or modified sequence
atgtccgaaacctcaagaaccgcattcggcggacgaagggcagtccctccaaataacagcaacgcagccgaggacgatctgccaaccgtcgagctccaaggagtcgtgcctagaggcgtgaacctgcaggagtttcttaacgtgacgtcggtgcatttgtttaaagaaaggtgggacaccaacaaggtggaccaccacaccgataagtacgaaaacaataagctcattgtgagacgcggtcagagcttctacgtccagatcgattttagcagaccatacgaccctcgcagagatcttttcagagtggagtacgtgattggcagataccctcaagagaacaagggaacctacattccagtgccgatagtttccgaattgcagtccggtaagtggggtgcaaaaatcgtgatgagagaggatcgatcggtgcgcctgtcgatccagtcctccccaaagtgtatcgtgggaaagtttagaatgtacgtcgccgtgtggacgccttacggtgtcctgcgtacttcgagaaacccagagactgatacctacattctgtttaatccttggtgtgaagatgatgcggtgtaccttgataacgaaaaggaaagagaagaatacgtcctgaatgacatcggagtgatcttttacggagaagtgaacgacataaagactagaagctggtcctacggacagttcgaagatggtatactggacacctgtctgtacgtgatggaccgcgctcagatggatctgtccgggaggggtaatcctatcaaagtctccagagtgggatcggcgatggtgaacgccaaggatgatgagggtgtccttgtcggttcgtgggacaatatctacgcctacggtgtcccccctagcgcgtggaccggcagcgtggatattctgctggaatacaggtcatccgaaaacccagtcagatacggacaatgctgggtgtttgcaggagtgttcaacacctttctcaggtgtctcggaatcccagcaagaatcgtgaccaactatttcagtgcacatgataacgacgcaaatcttcagatggacatatttctcgaagaagatggaaatgtgaacagtaaacttaccaaggattcggtgtggaactaccattgctggaacgaagcatggatgactcggcctgaccttcctgtggggttcggaggatggcaggcagtggatagcaccccccaagaaaacagcgatggtatgtatagatgcggtcctgccagcgtgcaagctatcaaacacgggcatgtgtgcttccagtttgacgcaccctttgtgtttgcagaagtgaactccgatctgatctacataactgccaaaaaggatggtactcatgtggttgagaatgtcgacgcgactcatattggaaagctcatcgtgactaagcaaatcggcggtgatggcatgatggatattacggacacctacaagtttcaagaaggacaagaagaggagcgactggctcttgaaacggccctgatgtacggcgctaagaaacctctgaataccgaaggggtgatgaagtcgcggtcaaacgtagacatggatttcgaggtggaaaatgcagtgctggggaaagacttcaaactttcaattacctttcggaacaattcccacaacagatacaccattaccgcctacctctccgcaaacattaccttttacaccggagtgcctaaagcagagtttaagaaggagactttcgatgtgaccctcgagcccctgtccttcaagaaggaggcagtgctcatccaggcaggagaatacatgggtcagcttttggaacaagcaagcctgcacttttttgtgactgccagaattaacgagactcgggacgtgcttgccaagcaaaagtcgactgtcctgactattcctgagattatcattaaggtgcgcgggactcaggtggtgggctccgatatgactgtgactgtgcaatttactaacccccttaaggaaaccctgcggaatgtgtgggtgcaccttgatggtcctggtgtgacccggccaatgaagaaaatgtttcgggaaatccgtcctaattccaccgtgcaatgggaggaggtctgtcgaccgtgggtatcgggccatcggaagttgattgccagcatgtcgtcggactcgctcagacatgtgtacggcgagctggatgtgcagatccaaagacggccatccatg

SEQ ID NO: 2134 - DNA, 2196 bp, Artificial Sequence
  derived and/or modified sequence
atgagcgaaacctcgcggaccgctttcggaggaagaagagcggttcctccgaacaattctaacgcagccgaggacgacctgccgactgtggagctccaaggagtggtccctcgtggagtgaacttgcaagaattcctgaacgtgacttcggtgcacctcttcaaagaacgttgggatactaacaaggtcgaccatcacaccgacaagtacgagaacaacaagttgatcgtccggagaggacagagcttttacgtgcagatagactttagcagaccgtacgatccaaggagagacttgttccgcgtcgagtacgtgattgggaggtacccacaagagaacaaaggtacctatatcccggtgccaattgtgtcggaactgcaatcaggcaaatggggggctaagatcgtgatgcgggaagatcgctccgtgcgcctgagcattcagtcgtcgccaaagtgcattgtggggaagttcagaatgtacgttgcggtgtggaccccgtacggtgtcctcagaacttcccggaaccccgagacggacacctacatcctgtttaacccctggtgcgaggatgatgccgtctacctcgacaatgagaaggagcgggaggagtatgtgctgaacgatatcggagtgatcttctacggggaggtgaatgacattaagaccaggtcatggagctacggacaattcgaagatggaatcctcgatacttgcctgtacgttatggaccgcgctcagatggacctgagcggaaggggaaatccaatcaaggtgtcccgtgtgggctccgcgatggtcaacgctaaggacgatgaaggagtgcttgtcgggtcctgggacaatatctatgcctacggagtcccgccgtcggcctggaccggcagcgttgacatcctgctggagtaccgctcctcggaaaaccctgtccggtacggtcagtgttgggtctttgccggagtgttcaatacttttctccggtgccttggtatccccgcgagaatcgtcaccaattacttctccgctcacgataacgacgcgaacctccagatggacatttttctcgaggaagatggcaatgtgaattcgaaactgactaaggattcggtgtggaactaccattgctggaacgaggcatggatgacccgcccggacttgcctgttggctttgggggttggcaggccgtggacagcacgccacaggaaaactccgatggcatgtaccgctgcggaccggcctcggttcaggcaatcaagcatggacatgtctgcttccagttcgatgcgcctttcgtgttcgccgaagtgaatagcgacctgatctacatcactgccaagaaggacggcacccatgtggtcgagaacgttgatgccacccatatcggaaaactcatcgtcaccaaacagatcggaggcgacggcatgatggatatcactgatacttacaagttccaagagggccaagaagaagaaagactggcactggaaaccgcgcttatgtacggagcgaagaagccgctgaacaccgaaggagtcatgaaatcgagatccaacgtggacatggactttgaggtggagaacgctgtgctgggaaaggacttcaagctgtccattaccttccgcaacaattcccataaccgatacactatcaccgcctacctgtccgcgaatatcaccttctacacgggcgtgccaaaagcggaattcaagaaggaaacttttgatgtgaccctcgaaccactctcattcaagaaagaagcggtgctcatccaagcgggagaatacatgggacagctcctggagcaggcatccttgcatttctttgtcactgccagaatcaatgagactcgggacgtgttggcgaagcaaaagagcactgtgctgacgatcccggaaatcatcatcaaggtgcggggtacccaggttgtgggttcggacatgaccgtgaccgttcagttcactaacccgcttaaggagactctgcggaatgtgtgggtgcatctcgacggacctggggtgacccgccccatgaaaaagatgttccgggagatccggccgaacagcactgtccagtgggaggaagtgtgtaggccctgggtgtcgggacaccgcaagctgatagcctcaatgtcgtcggattcactgagacacgtgtacggagaactcgacgtgcagatccaacgccgcccgtcgatg

SEQ ID NO: 2135 - DNA, 2196 bp, Artificial Sequence
  derived and/or modified sequence
atgagcgaaacttccagaaccgcctttggcggacgtagagctgtcccccccaacaattcaaatgccgcggaggacgacctgcccacggtcgagctgcagggcgtggttccgcgaggcgtgaatctccaggagttcctgaacgtcacaagcgtgcatctgtttaaagagcgttgggatactaacaaggtcgaccatcatacagacaagtacgaaaataataagttgattgttcgacgggggcagagtttctacgtgcaaattgacttttcgcgtccctacgaccctagaagggacctgtttcgggtggagtatgtgatcggccggtacccgcaggagaataaaggcacatatattccggtgccaattgttagcgagctacagagtggcaagtggggagcgaagatagtaatgagagaagaccggtcagtgagactcagcattcaaagctccccgaagtgtatagtgggtaaatttcgaatgtacgtcgcagtgtggacaccatacggggtgctaagaacgtcaaggaacccggaaaccgacacttacatactcttcaatccatggtgcgaagatgacgccgtgtacctcgacaacgagaaagagagagaggaatacgtgttaaatgatataggtgtcatcttttatggcgaagtcaacgacatcaaaaccaggtcctggagctacggtcagttcgaggacggcattcttgacacatgtctttatgtgatggaccgggcacagatggacctgtccggcagaggaaaccctattaaggtgtcccgcgtgggctctgccatggtgaatgcaaaagatgacgagggtgtactagtgggatcctgggataacatctatgcttacggagtgccaccctcagcttggacgggcagcgttgacattctgttagagtacaggagcagtgagaatccggtgaggtacggtcaatgctgggtgtttgccggggtttttaatacctttcttcgctgtttgggcatcccggcgcgaattgtgacgaattactttagcgctcatgataatgacgccaatctccagatggacatctttctggaagaagatggtaacgtcaatagcaagctgacaaaggactctgtctggaattatcactgctggaatgaagcatggatgacgcggccagacctgcctgttggatttggaggatggcaggccgtcgacagcaccccacaggagaactctgacgggatgtaccggtgcgggccagcaagtgtgcaggctattaaacatggccacgtctgtttccagtttgacgcaccgttcgtcttcgctgaagtgaacagtgatttgatctatataactgcgaagaaggatggcacccatgtcgtcgaaaacgtggacgctacgcacattgggaagctgatcgtcaccaagcaaatcggaggcgacggtatgatggatattaccgatacatataagtttcaggaaggacaagaggaagaaagactcgctctggaaactgctctaatgtacggtgcaaagaagccgctcaacacagagggcgtcatgaaaagcagatccaatgtggacatggacttcgaagtggaaaatgcggtcttaggcaaagattttaagctatctatcacgttccgaaacaatagccataaccggtatacgatcaccgcctacctgtccgccaatattacgttttatacaggcgtacccaaggccgagtttaagaaagagaccttcgacgtgactctggaaccgttgagctttaagaaagaggccgtgctgatccaggcgggggagtatatgggacagctactcgaacaggcttcactgcatttttttgtgacagcccggatcaacgaaacaagggatgtgctggcaaaacaaaagagtactgttctaaccatcccggaaattatcatcaaggtgagagggacccaggtggtggggtccgacatgaccgtgaccgttcagttcactaacccgctgaaagagaccctgagaaacgtgtgggtgcacctcgacgggccgggggttactaggcccatgaagaaaatgttccgcgaaattcggcccaacagcactgttcaatgggaggaggtttgccggccatgggtttcggggcatagaaagctcatcgctagcatgagctcggacagcctgcgacacgtgtatggcgagcttgacgtgcagatccagaggcgaccctctatg

SEQ ID NO: 2136 - DNA, 2196 bp, Artificial Sequence
  derived and/or modified sequence
atgtctgagacaagcagaaccgccttcggagggcgccgggccgttcctccaaacaacagtaatgccgctgaggacgacctgccaactgtggagctccagggagtggtacctcgcggagtgaatctacaggaatttttaaatgtgacatcggttcatctctttaaggaacgctgggacactaacaaggtggaccaccatacagacaaatatgagaataacaagcttatagtgcgccgcggacagtccttctacgtgcagattgacttctctcgcccctacgacccacgcagggatttgtttcgtgtggagtatgttattggtcgctacccccaggaaaataagggaacgtatattccagtcccaattgtctctgagctgcaatctggcaaatggggagccaagattgtgatgcgtgaagataggagtgtgagattatcaatacagtccagccccaagtgtatagtgggcaagttcagaatgtatgtggcagtctggacgccttatggtgttcttaggacctctagaaaccctgaaactgacacttatatcctgttcaatccctggtgcgaggacgatgcagtttatctcgacaacgaaaaggagcgggaggagtatgtattgaatgatattggtgtaatcttctatggggaagtaaatgatatcaagactcggtcctggtcctacggccagtttgaggacggcattctagatacttgcctatatgtgatggatagggctcagatggatctatctggtcgagggaacccgatcaaagtgtcgcgtgttgggtccgctatggtcaatgcgaaagacgatgaaggagtcctcgtcggatcctgggataatatctatgcgtatggcgtaccccccagtgcctggacaggctctgtcgatatcctccttgagtaccggagcagtgaaaaccctgtgcggtatggccagtgttgggtgtttgctggtgtcttcaatacattcctgagatgcctcggcattccagcacgcatcgtcacaaattacttctccgcccatgacaacgatgccaacctccagatggacatcttcctggaagaggacggtaacgtaaacagcaagctgacaaaggactccgtctggaactaccactgctggaacgaggcatggatgacccggcccgacctgcccgtaggcttcggcggctggcaagcagtcgactccactccccaggagaacagtgatggtatgtataggtgcggtcctgcctctgttcaggctatcaagcatggccatgtatgcttccagtttgacgccccgttcgttttcgctgaagtgaatagtgacctcatatacataacggccaaaaaggacgggacgcacgtagtcgaaaatgtagatgcgacccatattgggaagctcatagtaaccaagcagatcggaggcgatgggatgatggacatcacagacacatataagtttcaagaaggccaagaggaggaacggcttgctcttgaaacagcactgatgtacggagcaaaaaagccactgaacacagaaggagttatgaaaagccggagtaacgtcgatatggactttgaggtggagaacgcggtcttgggtaaagatttcaagctgtctatcaccttcagaaacaactcccacaatagatatacgatcacggcctacctgtccgccaatatcaccttctatactggagtccctaaggcggagtttaaaaaagaaactttcgacgttactctcgagcctctgagcttcaagaaagaagcagtcttaatccaggccggagagtacatgggacagcttcttgaacaggcatctcttcactttttcgtgaccgctcgcattaacgagacacgggacgtcctggccaagcagaagagcactgtgctgactattcccgagattataatcaaggtgcgcggaacccaggtagtgggctccgatatgactgtcacagtgcagtttactaaccctctcaaggagacactgagaaacgtgtgggtgcacctggatggccccggggtcactcgacctatgaaaaagatgtttcgcgaaatcaggccgaattcgaccgtccagtgggaggaggtgtgtagaccatgggtatccggccacagaaaactcattgcgtcaatgagtagtgacagtctacggcatgtatatggcgagctcgacgtgcagatacagagaagaccttcaatg

SEQ ID NO: 2137 - DNA, 2196 bp, Artificial Sequence
  derived and/or modified sequence
atgagcgaaacctcacgaaccgcctttggaggccggagggcagtgcccccaaacaacagcaacgccgcagaagatgatctccctactgtggaactccaaggagtggtcccaagaggagttaacttgcaagaatttctgaatgttacctcagtgcacctgtttaaggaaagatgggacacgaacaaggtggaccatcataccgataagtacgagaacaacaagctcattgtgcgccgcggacaatccttttacgtgcaaattgatttttcgcgtccttacgatccacgaagagatctgtttcgcgtcgagtacgtgatcgggagatatccgcaagagaataaggggacttacatacctgtccctatcgttagcgaactgcaatctgggaagtggggagcaaagatcgtgatgagggaagataggtcggtgaggctttccattcagtcatccccaaaatgcatcgtcggcaagtttcggatgtacgtcgcagtgtggaccccgtacggagtgctccggacttcgagaaatccagaaactgacacgtacattctgttcaacccttggtgtgaggacgatgcagtgtacctggacaatgagaaagaacgggaagaatacgtgctgaatgacatcggtgtgattttctatggtgaagtcaatgacatcaaaaccagatcgtggtcatacggccaatttgaggatggcattctggatacctgtttgtacgtgatggatagagcacaaatggacctgtccggacgcggaaatccaatcaaagtgtcgcgcgtggggagcgcaatggtgaacgcaaaagacgacgaaggggtccttgtgggatcgtgggataacatctatgcctacggtgtcccaccaagcgcgtggaccggatcggtcgatattctgctggaatacagatcatcggagaatcccgtccgctacggccagtgttgggtgttcgccggcgtctttaacactttccttcgttgcttgggcattccggcaagaattgttactaattacttctcggcgcacgacaacgacgccaacctccaaatggacattttcttggaggaagatggtaatgtgaactccaagctgactaaagattccgtgtggaactaccattgttggaacgaagcatggatgacgcggcctgatctcccagtggggtttggaggatggcaggcagtggattcgacgcctcaggaaaattcagatgggatgtacagatgcggccctgctagcgtgcaggcaatcaagcatggacatgtctgttttcagttcgacgccccttttgtctttgcggaagtgaattccgatctgatctacattaccgcgaagaaagatggtactcatgttgtggaaaacgttgacgcgacccatattggtaagctgatcgtgaccaagcaaataggtggggatggtatgatggatatcactgacacttacaagttccaggaaggccaagaggaagaacgactggcacttgaaactgcattgatgtacggcgccaaaaagccattgaacacggagggggtgatgaagagcaggtccaacgtggatatggactttgaagtggaaaatgccgtccttgggaaggactttaaactttccattacctttagaaacaattcacataacaggtatactatcaccgcatacttgtccgcgaacataactttttacaccggagtgcccaaggcggagttcaagaaggaaacttttgatgtgaccctcgaacctctttcgttcaaaaaggaggccgtgcttatccaagcaggggagtatatggggcagctgcttgaacaagcctccctgcacttctttgtgactgctcgaattaacgagactagagatgttcttgccaagcaaaaaagcacggtgctgaccattccggagataatcatcaaggtcagagggactcaggtggtgggtagcgacatgactgtcaccgtgcagtttactaaccctctgaaggaaaccctccggaatgtttgggtccacctggacggccctggagtgaccaggccgatgaaaaagatgttcagagagataaggcctaattcaaccgtgcagtgggaggaggtgtgcagaccttgggtttcgggccaccgcaaacttatagcatccatgagctccgattcccttcggcacgtctacggagaacttgacgtccagattcaaagacgtccatcgatg

SEQ ID NO: 2138 - DNA, 2196 bp, Artificial Sequence
  derived and/or modified sequence
atgtccgaaacctcccgcaccgcattcggcggcaggagagccgtgcctccaaataactccaacgccgcagaagacgatttacctactgtggaacttcaaggggtggtacctcgcggcgttaatttgcaggagtttttgaacgtcacctctgtgcacttgttcaaggagaggtgggacactaacaaggtggatcaccacactgacaaatacgaaaataataagcttatagtcagacggggccagtcgttctacgttcaaatcgactttagtcggccttacgacccgcggagagacttgtttagagtggagtacgtgatcgggaggtatccccaggagaacaaaggcacttacattccagtgccaatcgtatccgaattacagtctgggaaatggggtgccaagatagtaatgagagaggataggtctgtaaggctcagtatacagagctcccccaagtgcattgtcggcaaattcaggatgtatgtggcagtgtggactccctacggtgtgctgcgtacctctagaaaccccgaaaccgatacttacattctcttcaatccctggtgcgaggacgacgccgtctacctggataatgagaaggagagagaggagtatgtactgaatgacattggggtgatattttacggggaagtgaatgatatcaaaactcgatcgtggtcctatgggcaattcgaggacggaattctggatacatgcctatatgtcatggaccgggctcaaatggatctctccggaagaggcaaccccattaaggtgtctagagtaggatcagcaatggtgaacgctaaagatgacgagggtgtcctggtcggttcttgggataatatatatgcctatggagtgcctcccagcgcatggaccggttcagtggacatattattggaataccggtcttcggaaaaccccgtgaggtacggtcagtgttgggtctttgcaggcgtgttcaacacgttcctgcgctgccttggtatccctgcccgtattgtgaccaattatttcagtgctcacgataatgatgcaaacctacagatggacatatttctggaagaagacggcaacgtaaattccaagctgaccaaggactctgtgtggaactaccattgttggaatgaagcctggatgacccgcccggacctgcccgtagggttcggtggatggcaggcagttgacagtactccccaggagaacagcgacgggatgtataggtgcggccctgcctcagtgcaggctatcaaacacggacacgtgtgtttccagtttgatgccccatttgttttcgctgaagtgaattctgaccttatctacatcaccgctaagaaggatggaactcatgtggtggaaaatgtcgatgcaacgcacatcggcaagctcattgtcactaagcaaatcggcggggatggaatgatggatattacggacacttataagttccaagaagggcaggaggaagagcggctggccttggagacagcgcttatgtacggggcaaagaaaccccttaataccgaaggagtgatgaagtctcggagcaacgtggacatggattttgaggtggagaacgccgttttgggcaaggacttcaagctgtccattacctttcgcaacaacagccacaatcggtacaccataactgcctacctgtcggcaaacatcaccttctataccggtgttccaaaggccgagttcaagaaggaaacgttcgatgtcaccctggaacctctctcctttaaaaaggaagctgtgctgatccaggccggggagtatatgggacagcttctggagcaggcttcgttgcacttcttcgtgaccgcgcgtatcaacgagacgagggacgtgctggccaagcagaaaagcacggtgctcacaattcctgagattattattaaggtccgtgggacccaagtggtgggcagtgatatgacggttactgtgcagtttaccaacccactcaaagaaacactgcggaacgtatgggtgcatctcgatggcccaggtgtgacacgtccgatgaagaaaatgttccgtgaaatccggccaaatagcacagtacagtgggaggaagtgtgtaggccttgggtgagtggccaccggaagctgatcgcgtccatgagttcggactcccttcggcatgtatatggagagctggacgttcaaatccagcgcagaccgtctatg

SEQ ID NO: 2139 - DNA, 2196 bp, Artificial Sequence
  derived and/or modified sequence
atgtcggagacttcgaggaccgcctttggaggtagacgtgcagtgcctccgaacaactcgaacgcggcggaggatgatctgcccactgtcgaactgcaaggtgtcgtgccgagaggtgtcaacttgcaggaattccttaacgtgactagcgtccatctctttaaagaacggtgggacactaacaaagtggatcaccataccgacaagtatgaaaacaacaagctcatcgtccgtcgaggccaatccttttacgtgcaaattgatttttcacggccatacgacccaagaagggacctgttcagggtggaatacgtgattgggcggtacccccaggagaataagggtacttacatcccagttcctatcgtgtccgagctgcaatccggaaaatggggcgcaaagatcgtgatgcgtgaagatagatctgttcgccttagcattcaaagctcccctaaatgtatcgtgggcaagttccggatgtacgtcgcagtctggactccatacggagtactgaggaccagccgtaatcctgaaaccgatacttacatccttttcaacccatggtgtgaagatgatgcagtgtacttggataacgaaaaggaaagagaggaatacgtgcttaacgacattggagtcatcttttacggagaagtgaatgatatcaaaaccagatcctggtcctacgggcaatttgaggatggaattctggatacctgtctctacgtgatggatcgtgcccaaatggatctctcaggacgcgggaatcctattaaggtatcgcgtgtgggttccgccatggtgaatgcaaaggacgatgaaggagtccttgtgggatcgtgggataacatatacgcatacggggtgccaccgtctgcctggaccggctccgtggatattcttctggaataccggagcagcgaaaaccctgtgcggtacgggcaatgttgggtctttgcgggagtgttcaatacctttcttaggtgtctgggaattccggcacggatcgtgactaattacttctcggcacatgataacgatgcgaacttgcaaatggacattttcctggaggaagatggcaatgtgaattcgaaacttactaaggatagcgtctggaactaccattgctggaacgaagcctggatgactaggccagatctccctgtgggtttcgggggttggcaagccgtggattcaaccccgcaagagaattcagacggcatgtaccgctgtggccctgcctcagtccaggcaatcaagcacggacatgtctgcttccagtttgatgcacccttcgtgtttgcagaagtcaactcagatttgatttacattaccgccaagaaggatggcacccacgtcgtcgaaaacgtggatgcaactcatatcggaaaacttattgtgacgaaacagattggaggagacggtatgatggatatcacggatacctacaagtttcaagagggccaagaggaggagcggcttgcgctcgaaactgcccttatgtacggagcgaagaagcctctgaacactgagggagttatgaagtcgcgatcgaacgtggatatggattttgaggtggagaacgcagtgcttggtaaagactttaaactttcaataacttttcgcaacaactcgcacaatcgatacactatcaccgcctacctttccgcaaacattactttctacactggggtgccaaaagcggagttcaaaaaggaaacctttgatgtgacccttgaaccactttcatttaagaaggaagctgtgctgatacaggcaggagaatacatgggacagctgctggaacaagcatccttgcacttctttgtcaccgcacggatcaatgagactagagatgtgttggcgaagcagaaatccaccgtgctgaccattccagagatcatcattaaggttcgcgggactcaagttgtcggttcagatatgaccgtgactgtgcagtttactaaccctcttaaggagactctgcggaatgtctgggtccatctggatggcccaggagtgactaggcccatgaagaagatgtttcgcgaaattagaccgaattccaccgtccagtgggaagaagtctgtagaccctgggtgtcgggacatagaaagctgatcgcttccatgtcctccgatagcttgcgccacgtgtacggggagctggatgtccagattcaacgtaggccatccatg

SEQ ID NO: 2140 - DNA, 2196 bp, Artificial Sequence
  derived and/or modified sequence
atgtcagaaacctcccgcactgcgttcggtggtcgacgcgcggtcccgcctaataactcgaacgcggccgaggacgacctgcccacggttgagctccagggcgtcgtcccccgaggcgtgaacctccaggagttcttgaatgttacgtctgttcacttgttcaaggagcgatgggacaccaacaaggtggaccaccatactgacaagtacgagaacaacaagctgatcgtccgccgcggacagagcttctatgtgcagatcgatttttccagaccgtacgaccctcgccgtgatctctttcgcgtggaatatgtgatcggtcggtacccccaggagaacaagggcacctacattcctgtcccgatcgtcagtgagctgcagagtggtaagtggggtgccaagatcgttatgcgtgaggaccgctccgtacggctgagcattcagagcagcccgaagtgtatcgttggcaagttccgaatgtacgtggctgtctggacgccttatggcgtcctgcggaccagtcgtaacccggaaacagatacctacatcttattcaatccttggtgtgaggacgacgccgtgtacttggacaatgaaaaggaacgtgaggagtacgtccttaatgacattggtgttatattctatggcgaagtgaacgacatcaagacccgttcatggtcctatggtcagttcgaggacggcattctggacacttgcctctatgtcatggaccgggcacagatggacctgagtggtcgcggaaatccaatcaaagtctctcgcgtgggatccgcaatggtaaacgccaaggacgacgagggtgttctggtgggctcctgggacaacatctatgcctatggcgttccgcctagcgcgtggaccggtagcgtcgatatcctgctggagtaccgtagctctgagaacccagtccgttacggtcagtgctgggtgttcgccggtgtttttaatacatttctccgctgcctcggtataccggcgcgcattgtgacaaattacttctccgcacacgacaatgatgctaatctgcagatggatatcttcctcgaagaggacggcaacgtgaacagcaagctcactaaggactccgtgtggaactatcactgctggaatgaggcctggatgacgcggccggaccttcctgtcggcttcggcgggtggcaggccgttgatagtaccccgcaggagaactccgacgggatgtacagatgcggccctgcgtcggtccaggctattaagcacggccatgtttgctttcagttcgatgcccctttcgtctttgctgaagttaattccgatttgatctacattaccgctaagaaggacgggacacacgtggtcgagaacgtcgacgccacccatatcggtaagcttatcgtgaccaagcagattggtggcgatggcatgatggatatcaccgatacttacaagttccaggagggccaggaggaggagaggctcgcccttgagactgctctgatgtacggagccaagaagccgctcaacaccgagggtgtgatgaagtcaagatccaacgtcgacatggatttcgaggtcgagaatgccgtcttggggaaggacttcaaattgagcattaccttccgcaacaatagccacaatcgatacacgattaccgcgtacctgtcagctaacatcaccttctacaccggcgtgcctaaagccgagttcaagaaggagaccttcgacgtgactctggagcccctctcctttaagaaggaggctgtcctgatccaggccggcgagtacatgggtcagctgctggaacaggcctccctgcacttctttgtcaccgcacgcattaatgaaactcgcgacgttctcgcaaaacagaagtcgacggtgctgacgatccccgaaatcattatcaaggtgcgcggcacacaggtggtaggctctgacatgaccgttactgtccagttcactaacccgctaaaagagaccttgcgcaatgtctgggtgcatctggacggccccggcgtcacacgtccgatgaagaaaatgttccgcgagatacgtcccaacagcaccgtccaatgggaggaggtttgtcgcccctgggtctcgggccaccgtaagctcattgcttctatgagcagtgacagcttgcggcatgtctatggtgaattggatgttcagattcagcgccgcccctctatg

SEQ ID NO: 2141 - DNA, 2196 bp, Artificial Sequence
  derived and/or modified sequence
atgtcagaaactagcagaactgccttcgggggacggagggccgtgcctcccaataactccaatgcagccgaggatgacctgcccaccgtggagttgcagggagtcgtacctcgcggagtaaacctgcaggagtttttaaatgttacttctgttcatctatttaaggagagatgggatacaaataaagtggaccaccataccgacaagtacgaaaacaacaagttgattgtcagacgcggtcagtccttttatgtccagatcgatttcagtcgtccctatgatcccaggcgcgatttgtttagagttgaatacgtgatcggccggtatcctcaggaaaataaaggcacttacatcccagtgcccatcgtgagcgagcttcagtcgggaaaatggggagccaagatagtgatgagagaggatcgatccgtgcgattaagtatacagtcctctccaaaatgcatcgtggggaagttcagaatgtacgtggctgtgtggacaccctacggggtgctaagaacctcccggaacccagagaccgacacgtacattttattcaacccatggtgtgaagacgatgctgtgtacctggacaacgagaaggagcgcgaagaatacgtgctcaacgatatcggggtcatcttctatggagaggtgaatgacattaaaaccagatcatggagctatgggcagttcgaggacgggattttggatacatgtctttacgttatggatagagcccagatggatttatccgggaggggcaacccgatcaaggtatccagggtcgggtcagccatggtcaacgccaaagacgatgaaggcgtgttagttggatcttgggataatatttatgcttacggagtaccgccatcggcttggacggggtcagtcgatattttgctggagtaccggagctccgagaaccccgtcaggtacggtcagtgttgggttttcgccggcgtattcaatacattcttacgctgcctgggtattcctgcccgcattgtgaccaattatttttccgcccacgataatgacgcaaatttgcagatggatatctttcttgaagaggatggtaacgtgaactctaagctcacaaaagattccgtttggaattaccactgttggaatgaagcctggatgacacgtcccgatctccccgttggcttcggcggttggcaggccgtcgactcgacacctcaggaaaactccgacggcatgtatcgctgtggacccgcttccgttcaggcgatcaagcacggccatgtctgctttcagtttgatgccccctttgtatttgccgaggtgaactctgatctgatatacatcaccgcaaagaaggacggaacccacgtcgtggagaacgtggacgctacccatatcggaaagctgatagttaccaagcagatcgggggcgatggaatgatggacataacagacacttataaattccaggaaggccaggaggaagagcgcctggccctagagacagctctgatgtacggagccaagaagcccctgaatacagagggggttatgaagtctagatccaatgtggacatggatttcgaagtcgaaaacgccgtcctaggtaaagactttaaactcagcataacattccggaacaacagccacaacaggtacactattacagcctatctatccgccaacataacgttctatacaggggtgcccaaggcagaatttaagaaggaaactttcgatgtaacgcttgagcccctatcatttaagaaggaggctgtgctgattcaggctggtgagtatatgggccaattactggaacaggcatctctccatttctttgtaactgctcgcattaatgagacacgggacgtgcttgccaagcagaagtccaccgtactaaccatccccgagatcattattaaagtcagaggaacccaggtggtggggtcagacatgacggtgacagtccagttcaccaatcctctgaaggagacattgcggaatgtctgggttcacttggatggaccgggcgtgacgagacccatgaagaagatgttccgagaaatccgtccaaacagtactgtgcagtgggaggaagtgtgcagaccctgggtctccggccatcggaaactgatcgcttccatgagcagcgactcgctgagacacgtttatggagagctcgacgttcagatccagcggcgaccctctatg

SEQ ID NO: 2142 - DNA, 2196 bp, Artificial Sequence
  derived and/or modified sequence
atgtcggagaccagccgcacggccttcggggggcgcagggcagtgcctcctaacaatagcaatgctgccgaggacgacctacctacagtggagctgcagggcgtagttcctcggggggtgaacctacaagagtttcttaatgtgaccagtgttcacctgtttaaggagcgctgggacaccaacaaggtggatcatcacaccgataagtatgagaataacaagctaatagtccgaaggggtcagtccttttatgtgcagattgacttttctagaccctatgaccctagacgcgatctgttccgcgtcgagtatgttatcgggcgctatccgcaggagaacaagggcacctacatccccgtccctattgtctccgagctgcagtccggaaaatggggggccaagatcgtgatgcgggaagacagaagtgtgcgactgtcaattcagagcagcccgaagtgcatcgttgggaagttccgcatgtatgtggccgtatggaccccgtatggcgtgttacgtacaagccgaaatccagagaccgatacctacatcctgtttaacccctggtgtgaggatgatgccgtgtacctggataatgagaaagagcgcgaagagtatgtgctcaacgacatcggggtgatcttctatggggaggtcaatgacattaaaacgcggagttggagctatggacagtttgaagacggcatactggacacttgtctgtacgttatggatcgagcccaaatggatctttctggccgcggtaatccaatcaaagtttcccgggtgggtagtgccatggtgaacgctaaagatgatgagggggtcctggtgggctcatgggacaatatttacgcctacggcgtgccgccgtccgcctggaccggctcggtggatatcctactggaataccggagctctgaaaatcccgtgcgctatggccaatgttgggtgtttgccggcgtgtttaatacttttctgcgatgcctgggaattccagcccgcatcgtcacaaattatttttccgctcacgacaatgacgcgaacttgcagatggatatcttcctggaggaggatggaaacgtgaattccaaactgactaaggacagtgtatggaactaccattgttggaacgaagcctggatgaccaggcctgatctccccgtgggatttggcggatggcaggccgtggacagcacacctcaagaaaattcggacggaatgtaccgatgcgggcccgcgtcagtgcaagccataaaacacggccacgtatgtttccaattcgatgcgccttttgtgtttgctgaggtcaacagtgacctcatctatatcacagcaaagaaggatggtacacacgtggtcgagaacgtcgacgccactcatatcggaaaactgatcgtgacaaagcagattggtggagacggaatgatggacatcaccgacacttataaatttcaggaaggccaggaggaggaacggttggccctggagacagcactgatgtatggcgccaagaaaccattgaatacagagggcgtgatgaaaagtagaagcaacgtggacatggattttgaggtcgaaaatgccgtgttgggcaaagacttcaaactgtccatcactttccgaaataattcacacaatcggtataccatcactgcgtatctctctgctaatatcaccttctacactggtgtgccaaaggctgaatttaagaaggagacatttgacgtgaccctcgagcctttgtcttttaaaaaagaagccgtgctgatccaagctggtgagtacatgggtcagttgctggagcaagcctccctccacttctttgtcaccgcccgcataaacgagactcgggatgtgctggccaaacagaagtccacagttttgaccatccctgaaattattatcaaggtccgcggcacacaggtcgtgggcagtgatatgaccgtgactgtacagttcaccaatccattgaaagagacgctgcggaacgtatgggtccatcttgatggcccaggtgtgacccggcctatgaaaaagatgtttcgggagattagacctaacagcaccgtccagtgggaggaggtgtgccggccctgggtgagcggccaccgcaaattgatcgcgagcatgtctagtgactccctgcggcatgtgtatggagaactggacgttcagatccaaaggaggccaagtatg

SEQ ID NO: 2143 - DNA, 2196 bp, Artificial Sequence
  derived and/or modified sequence
atgagcgagaccagtagaaccgcgttcgggggacgccgtgccgttcccccaaacaactctaatgctgcagaggacgatttgcctaccgtcgaattgcagggcgtggttccacgcggggttaaccttcaggagttccttaacgttactagcgtccaccttttcaaagaacgctgggatactaacaaggttgatcatcacacagataaatacgaaaacaataagttgatcgtgcggagagggcaaagcttttacgtgcagatcgactttagcagaccttacgaccctagaagagatctttttagggtggagtatgtgatcggtaggtatccccaagaaaacaagggaacctacatccctgtcccaatcgtctccgaactgcaatccggcaaatggggagctaagattgtcatgcgcgaagataggagcgtcagacttagtattcagagctcccctaaatgcatcgtggggaagtttaggatgtatgtggccgtgtggacaccttacggagtgctgcgcacatcgcggaacccagagacagacacctatattttatttaacccgtggtgcgaagatgacgcggtctacctggacaacgagaaagagcgggaagaatacgtgcttaatgatatcggagtcatcttttatggtgaggttaatgatatcaagacgcgatcgtggtcatacggccagttcgaagacgggatcctcgacacatgtttgtatgtcatggaccgtgcacaaatggacctttccggaagaggtaaccccattaaggtcagccgggtgggaagcgctatggtaaatgctaaagatgacgaaggcgtcctcgtgggctcgtgggacaatatctacgcttatggggtccctcccagcgcttggactggcagcgtggacatcctcctggaatatcgctccagtgagaatcccgtgaggtacggtcagtgttgggtttttgcaggggttttcaacacttttctgagatgtctgggaattccagcgcgcatcgttactaactacttcagtgcacatgacaacgacgctaatctgcagatggacattttcctggaggaagatggaaacgttaactctaaactcacaaaggatagcgtttggaactaccactgttggaatgaagcatggatgacgagaccagatctgccggtcgggtttggaggctggcaggccgtcgatagcactccccaggaaaacagcgacggaatgtacagatgcggcccggctagtgttcaggctatcaagcacggacacgtctgcttccaatttgacgccccctttgttttcgccgaagtcaactccgatttgatatatattacagccaaaaaggatggaacccacgttgtcgagaacgtggatgctacgcatatcggtaagctgattgtgaccaaacaaattggaggagatggtatgatggacatcactgacacatacaaatttcaagagggacaggaagaagagaggctcgccttagagactgccttgatgtacggagcaaagaagccacttaatacagaaggagtaatgaaaagcaggagcaatgtagatatggactttgaggttgaaaatgctgtcttgggcaaggacttcaaactcagcatcacattcagaaacaactctcataacagatataccattacggcttacttgagcgccaatatcaccttttacaccggcgttcccaaagctgagtttaaaaaagaaacctttgatgtaacgttggaacctctgagcttcaaaaaagaagccgtcctcattcaagccggcgaatatatgggccaattgctggagcaggcttctcttcacttcttcgtgactgctaggattaacgaaacgcgcgacgttctggctaaacagaagtcaaccgtcctcaccatccccgaaataatcatcaaagtccgtggaacacaggtcgtgggctctgacatgacagttaccgtgcagtttacaaaccccctgaaagaaaccctgcgaaacgtctgggtccacctcgacgggccaggggttacccgtcctatgaagaagatgttccgggagatcagacctaattcgactgtgcagtgggaagaggtgtgccggccttgggtgagcggacataggaagcttatcgcttctatgtcctcggatagcctgcgccacgtctacggcgagctggacgtgcagattcagagaagacctagcatg

SEQ ID NO: 2144 - DNA, 2196 bp, Artificial Sequence
  derived and/or modified sequence
atgtcggaaacttcccggactgctttcggtggccgacgggctgtcccaccgaataactcgaacgccgcagaggacgatctcccaactgttgagttgcagggagtggttccgcgcggcgtgaatctgcaggagttcttgaatgtcaccagcgttcatctgtttaaggaacggtgggacaccaacaaggtcgaccaccataccgacaagtacgagaacaacaagttgatcgtgcggcgcggacagtcgttctacgtccaaatagacttttcgaggccgtacgaccctagacgggatctttttcgggtggagtacgttattgggcgctatccgcaagaaaacaagggaacttacatcccggttccgatcgtgtccgagctgcagagcggaaagtggggagccaagattgtcatgcgcgaagataggtcagtgcgcctgtcgattcaatcgtcacctaagtgcatcgtgggaaaattcagaatgtacgtggccgtctggaccccgtacggtgtgcttcggacttcgagaaacccggaaaccgacacgtatatcctcttcaacccttggtgcgaggacgatgccgtctacctcgataatgagaaggaaagggaggaatacgttctcaatgatatcggcgtgatcttttacggtgaggtcaatgacatcaagaccagatcgtggagctatggtcagttcgaggatggaatcctggacacttgcttgtacgtgatggaccgggcacagatggatctctcgggtcgcggaaaccccattaaagtgtcgcgggtgggaagcgccatggtgaatgcaaaggacgacgaaggggttttggtggggtcatgggacaacatctacgcttatggcgtgccgccgtccgcatggaccgggtctgtggatatcctgctggagtaccgctcctctgagaacccggttcggtacggacagtgttgggtgttcgcaggagtgttcaataccttcttgcggtgcctgggtatcccggccagaatcgtgaccaactacttcagcgcccacgacaacgacgccaacctccagatggacatcttcctggaagaagatggcaatgttaactcgaaactgactaaggattctgtctggaattaccactgttggaacgaagcctggatgaccaggcccgatcttcctgtgggcttcggcggatggcaggcagtcgattcaactccgcaggaaaactccgatggtatgtaccggtgcggccccgcatccgtgcaggccatcaagcacggacacgtttgcttccaatttgacgcgccgttcgtctttgccgaagtgaactccgacctcatttacatcaccgccaagaaggatggaactcacgtggttgaaaacgttgatgctactcatatcggcaagctcatagtgactaaacagatcggaggagacgggatgatggacatcaccgacacttacaaattccaggaaggacaagaagaagagcgcctcgccttggagactgcgctgatgtatggtgctaaaaagcctctgaatactgagggagtgatgaaatcgcgcagcaacgtagacatggacttcgaggtggaaaacgcagtcctcggaaaggactttaagctctccatcaccttccggaacaattcccacaatagatacaccatcaccgcgtacctttcggctaacatcactttctacaccggagtcccgaaggctgagttcaaaaaagagacttttgatgtgaccctcgagcctctgtccttcaagaaggaagccgtgctcatccaagctggggaatacatggggcagctgttggagcaagccagcctgcatttcttcgtgactgcgcggattaacgagactcgagacgtgctggcgaagcagaaatcaactgtgctcactatcccggagattatcatcaaggtgagaggtacccaagtggtcggatccgatatgacggtgaccgtccagttcaccaacccactcaaagagactctgcgcaacgtgtgggtgcacctggacggccctggagtcacgcgccctatgaagaaaatgttccgagagatccgccctaactccacggtgcaatgggaagaagtgtgcaggccgtgggtcagcggccatcgcaagctgattgctagcatgtcgtctgactcactccgccatgtgtacggagaactggacgtgcaaatccagagacggccatcgatg

SEQ ID NO: 2145 - DNA, 2196 bp, Artificial Sequence
  derived and/or modified sequence
atgtcagaaacatccaggaccgcctttgggggacgtagggccgtcccccctaataatagcaatgctgcggaggacgatctcccgaccgttgagcttcagggggtggtcccaaggggggtgaacctccaggagttcctgaacgtgaccagcgtccatctgttcaaggagcggtgggataccaacaaggtggatcaccacaccgacaagtacgaaaataacaaacttattgtgcggaggggtcagtctttttacgttcaaattgacttttcacggccttatgaccctagacgcgacctgttccgagtagagtacgtcattgggcgatatccccaggagaacaagggaacctatatcccagtgcccattgtgagcgagctccaaagtggaaagtggggtgccaaaatagtgatgagagaggacagatcagtccgtctctcaatacagagctcccctaaatgcatcgtggggaaattccggatgtacgttgccgtgtggacaccctatggggtgcttcggacgtctagaaacccggaaacggatacctatatccttttcaatccctggtgcgaagatgacgctgtgtatctggataacgagaaagagcgcgaggaatatgtgttaaatgatatcggagtgatcttctacggtgaagttaacgacatcaagactaggagttggtcatacggacagttcgaggacgggatcctggatacctgcctctatgtgatggatagggcacagatggatctctccggcagaggcaaccccattaaggtgtcacgagtggggtccgcgatggttaacgcgaaagacgatgaaggtgtgctcgtgggatcatgggataacatctatgcgtacggcgtgccccctagcgcatggacaggaagtgtggacatcctccttgagtaccgctcatctgagaacccggtgaggtacgggcagtgctgggtgttcgccggggttttcaacacattcctgcggtgtctcggtatcccagcacggattgtgacgaattatttttccgcccatgacaatgatgccaatctgcagatggacatcttcctggaggaggatgggaacgtaaattcaaaactgactaaggactccgtttggaactaccattgctggaatgaagcctggatgaccagacccgatctgcccgtgggctttggtggctggcaggctgtggattccacaccccaggagaattctgacgggatgtatcggtgtggcccggctagcgtccaggccatcaagcacggccatgtgtgcttccagtttgacgccccgtttgtgttcgctgaggtgaattccgacttgatttacatcaccgcaaaaaaggatggtacccacgtagttgaaaatgtagacgctacacacattgggaaactcatcgtgaccaagcagatcggaggagatggtatgatggacatcaccgacacatataaattccaggagggtcaagaagaggaacggttggccctggagactgccttaatgtatggggctaaaaagcccctaaataccgaaggggtgatgaagtcgcggagtaacgtggatatggatttcgaggtggagaatgcagtgttaggaaaggatttcaagctgtccatcacttttagaaacaactctcacaaccgatataccattactgcctatctaagcgctaacatcaccttttatacaggtgtgcctaaagctgagtttaaaaaggaaacatttgatgtgaccctagagcccctgtcattcaagaaggaggcagtgctgatccaggccggagagtatatgggtcagctcttagagcaggcaagcctccacttctttgtgaccgcaagaattaatgaaacacgcgacgtcttggccaagcagaaaagtacggttttaaccataccagaaattattatcaaagtgagagggacgcaagttgtgggctcagatatgactgtcaccgttcaattcaccaacccacttaaagaaacactcagaaacgtgtgggtgcaccttgatgggcccggggtcacccgcccgatgaagaagatgttccgcgagattcgtccaaactcaaccgttcagtgggaggaggtatgtaggccctgggtgagcggacaccgcaagctgatcgcctccatgagctccgactcactccgccacgtgtatggggagttggacgtgcaaatccagagacgcccctctatg

SEQ ID NO: 2146 - DNA, 2196 bp, Artificial Sequence
  derived and/or modified sequence
atgtcagagacatcgcgtacggccttcggaggccgacgcgctgtgccccccaataacagcaacgccgccgaggacgacttgcccactgtcgagctccagggggtcgtgccacggggagtcaacctgcaggagtttctcaatgttaccagtgtgcacctgttcaaagaacgttgggacactaataaagtggaccaccacaccgataagtacgaaaacaataagctgattgtgcgccgtggacagagcttttatgttcaaatcgacttttcacgaccatacgacccccgccgggatctgttcagagtggagtatgtaatcggtagatatccccaggagaacaaggggacctatatacctgtccccattgtgtctgaactgcagtctggcaagtggggagctaagatagttatgagggaagacaggagcgtgagattgagcattcagagctctcctaaatgtatcgtggggaagtttcgcatgtatgttgccgtctggacgccatacggggtcctacggacatctcgtaacccagagacagacacttacatcctgttcaacccctggtgcgaggacgatgcagtctatcttgacaatgagaaggagcgtgaggagtacgtgctgaacgacatcggtgtgatcttttacggcgaagtgaacgacattaagacgagatcttggagctacggccagttcgaagatggaattctcgacacttgcctgtacgtgatggatagggcgcagatggacctttctggaagaggcaatcccatcaaagtcagccgcgtgggttctgccatggttaatgcgaaagatgatgagggggttttggtcgggtcctgggataacatatacgcatacggagttcccccttctgcctggacaggaagtgtcgatatcctgctcgagtaccggtcatccgaaaatccagtgaggtatggacagtgttgggtgtttgctggcgtattcaacactttcctgagatgtctgggcattccagcccgtatagtgacaaattacttctccgcgcacgacaacgacgcaaacctacagatggacatatttctcgaagaggatggcaatgtgaatagcaagctcacaaaggactcggtgtggaactaccactgttggaatgaagcctggatgactcgtcctgacttgcctgtgggctttggaggctggcaagcagtggattctaccccccaggagaactcagatggcatgtatcgctgtgggcctgcgagcgttcaggccatcaaacacggacacgtctgttttcagttcgacgccccctttgtgttcgcggaagtgaacagcgacttaatctacatcaccgcaaagaaggatggtactcacgttgtcgaaaatgttgacgccactcatattggcaagctcatagttaccaaacagatcggaggcgacgggatgatggatatcacggatacctacaagttccaggagggacaggaggaggagcgactggcccttgagactgcactcatgtacggggctaaaaaacctctgaacactgaaggcgtgatgaagtcccgatcaaacgtcgacatggacttcgaagtggaaaatgctgttttgggtaaggacttcaagctgtcaataacattccgcaacaactctcacaataggtacactataaccgcctacttgagtgccaatatcactttctatactggtgtgccaaaggccgagttcaaaaaggagacttttgacgttacgcttgaacctctgagttttaagaaggaggcagtcttaatccaggcgggagaatacatgggacagctcttggagcaggcatctctgcatttcttcgtcaccgcccgcattaatgaaacacgggacgtattggcaaaacagaaaagcaccgtcttgaccatccccgaaattatcatcaaagtgcgaggcactcaggttgttggctccgacatgacggtgacagtgcagttcacaaacccactgaaggagacactccgcaatgtctgggtgcatcttgatgggcctggggttacccgccctatgaagaagatgtttcgagagattcggcctaattctacagtgcaatgggaggaggtttgccgtccttgggtttccggccatagaaagctgatagcctccatgtccagtgactcactgaggcacgtatatggggagcttgacgtgcagattcagcgacgccctagcatg

SEQ ID NO: 2147 - DNA, 2196 bp, Artificial Sequence
  derived and/or modified sequence
atgagcgaaactagcaggactgcattcgggggacgccgggccgtgcctccgaacaactccaatgctgccgaggatgacctgcctacggtggaactgcagggagtcgttccgcggggagtgaatctgcaggagttcctcaacgtgacttcggttcacctgttcaaggagcgctgggatactaataaggtcgatcaccacaccgacaagtacgaaaacaacaagttgatcgtgagacgcggtcagagcttctacgtgcaaatcgatttctcgcggccatacgaccctcggagggatctgtttagggtcgaatacgtgatcggaagatacccacaggaaaacaagggtacctacatccctgtgccgatcgtctcagagctgcagtctggaaaatggggggcaaagattgtgatgcgggaggacagatcagtgcgcctctcaattcagtccagcccgaagtgcatcgttggaaagtttaggatgtacgtcgccgtgtggactccgtacggcgttctgcgcacctcccgcaacccagagactgacacgtacatcctgttcaatccgtggtgcgaagatgacgcagtgtatctcgataacgaaaaggagcgcgaagaatacgtgctgaatgatattggagtgatcttctacggggaagtgaatgacataaagactcggtcctggtcctacggccagttcgaggatggtatcttggacacgtgcctctacgttatggacagggctcaaatggacctgagcggacgcggcaatccgatcaaggtgtcacgcgtcggctccgctatggtcaacgccaaggatgacgagggagtcctggtgggatcatgggataacatttatgcctacggcgtcccgcctagcgcatggactggatcagtggacatcctgctcgaatacagaagcagcgaaaacccagtgaggtacgggcaatgttgggtgttcgccggagtctttaacaccttcctgcgctgcctgggaatcccagcgcgcatcgtgactaactatttctccgcccatgataatgacgcgaatctgcaaatggacatcttcctggaggaggacggtaatgtgaactcgaagctcactaaagattccgtctggaactatcactgttggaatgaggcatggatgactcggccggacctccctgtcgggttcgggggatggcaggcagtcgattcgaccccgcaagaaaactcagatggaatgtaccggtgtggaccagcatcggtgcaggcaatcaagcatggacatgtgtgtttccagttcgatgcgccgttcgtgttcgcggaggtgaactcagacctcatctatatcaccgcgaaaaaggacggaacccacgtggtggagaacgtggacgcgactcatatcggcaagctcatcgtgaccaagcaaatcggcggtgacggtatgatggacatcactgatacttacaagtttcaggagggtcaggaagaggaacggctggcccttgaaaccgcccttatgtacggagcaaagaagcctctgaacacggagggcgtgatgaagtctcgcagcaatgtggacatggacttcgaagtggaaaacgccgtgctcggcaaagacttcaagctctcgattaccttccgcaacaatagccataatcgctacactattacggcctacctgtccgccaacattacgttctacaccggagtgccgaaggcagagttcaaaaaggagactttcgatgtgaccctcgaaccgttgtcgtttaagaaggaagccgtcctgatccaggccggagagtacatgggacagctgctggaacaggcatccctgcatttcttcgtgaccgcacgcatcaacgagactcgggacgtgctggcgaagcaaaagtcaaccgtgctcactattccagagatcatcatcaaagtgcgcgggactcaggttgtgggatcagatatgactgtcaccgtgcagtttaccaaccctctgaaggagactcttcgcaacgtgtgggtgcacctcgacggtccgggggtcactcgcccgatgaaaaagatgtttcgcgaaatccgcccgaactcaaccgtgcagtgggaagaagtgtgccggccgtgggtgagcggacaccgaaagctgatcgctagcatgtcgtcggattccctcagacacgtgtacggagagctggacgtgcaaatacaacggcggccgagcatg

SEQ ID NO: 2148 - DNA, 2196 bp, Artificial Sequence
  derived and/or modified sequence
atgagtgagacgtcccgtactgcattcggaggccgtcgggcagtgccacctaacaactctaacgcggctgaagatgatctcccaaccgtggaactgcaaggagtcgtgcctcggggggtcaacctccaagaatttctcaatgtgactagtgtgcatctgtttaaggagcgctgggacactaacaaggttgaccaccataccgataagtacgaaaacaacaaattgattgtacggagaggccagtcgttctatgttcagatcgacttttcccgaccatatgaccctaggcgtgatctctttagggtcgagtacgttataggacgctacccacaagagaacaagggaacgtacattccggttcctatcgtgtcggagctgcaatccggaaagtggggagccaaaatcgtgatgcgagaggacaggtccgtgcgcctgtcgatccaatcctcccctaagtgtattgtgggcaagtttcgaatgtacgtcgcagtctggactccgtacggtgtgctgagaacttcgagaaacccagaaaccgacacctacatcctcttcaacccatggtgtgaggacgatgcggtttacttggacaatgagaaagaacgagaggagtacgtgctcaatgacattggggtgatattctacggtgaagtgaatgacattaagaccagatcctggagctatggacaattcgaggatgggattctggacacctgcctgtacgtcatggacagggcccagatggatttgtcaggacggggaaatcctattaaggtgagccgcgttggcagcgctatggtcaatgcaaaagatgatgaaggtgtgctggtgggttcgtgggataacatttacgcctacggagtcccaccctcagcctggaccggctccgtggatatcctcctggaataccgctcctccgaaaatccagtgcgctacggacaatgttgggtctttgcaggggttttcaataccttcctgcgttgtcttggaattcctgcacggatcgtcaccaactacttttcggcccatgataacgatgcaaaccttcaaatggatatctttctggaagaagatgggaacgtgaattccaagctgactaaagattcggtgtggaactaccactgctggaacgaagcgtggatgacgcgcccagaccttcctgtgggatttggaggttggcaggccgtcgacagcacgccacaagaaaactccgatggaatgtaccggtgtggtccagcctccgtgcaagctatcaaacatggtcacgtgtgctttcaatttgatgccccattcgtctttgcggaagtcaactcagatctcatttacatcactgcaaagaaagatggtacccacgtggtggaaaatgtggatgcaacgcatataggcaagttgatcgttactaagcagatcgggggtgatgggatgatggacattactgacacttacaagtttcaagaaggtcaagaagaagaaagacttgctcttgaaaccgcactcatgtacggtgcgaaaaagccgcttaacacggaaggtgtgatgaagtcgagatcaaatgtggatatggacttcgaggtggaaaatgcagtcctcggaaaagatttcaaattgtccatcacctttcggaataactcccataacagatacactattacggcgtatctttcggcaaacattaccttctacaccggtgtcccaaaggccgagtttaagaaggaaacctttgatgtgactctcgagccactttcgtttaagaaagaagcagtgctgatacaagcaggtgaatacatgggtcagctgctggagcaagcgagcctgcatttcttcgtgacggccagaattaacgaaacccgcgacgtgctggcaaaacagaagtccaccgtccttacgatcccggaaatcatcattaaggtgcgtggtacccaggtggtgggatcagatatgaccgtaactgtgcaatttacgaaccctctcaaggaaactctgaggaacgtgtgggttcatcttgacggtcctggggtcaccagaccgatgaaaaagatgtttagagaaatccgccctaatagcaccgtccagtgggaggaagtgtgtagaccatgggtgagcggacatcgaaagctcattgctagcatgtcgtcggattctcttaggcacgtgtacggggaactggatgtccaaattcagaggcgcccttcgatg

SEQ ID NO: 2149 - DNA, 2196 bp, Artificial Sequence
  derived and/or modified sequence
atgtcagaaacaagtcgcactgccttcggcggcaggcgggctgtgcctcccaacaactccaatgccgccgaggatgacctgcctactgtagaactgcagggcgtcgtgcctaggggtgtgaatctgcaagagtttctcaatgtaacgagcgttcacctgttcaaagagaggtgggatacaaataaggtggatcaccacaccgataagtacgagaacaataagcttatcgtcagacgcggacagagcttttatgtgcagattgattttagccggccttatgatcccaggcgagatctgttcagagtggagtacgttatcgggagataccctcaggagaacaagggcacgtacatccctgtaccaattgtgagcgaattgcagtccggaaaatggggtgctaagatagttatgcgcgaggatagatctgttaggctgtctattcagtcttctcccaaatgcatcgtcgggaaattccgcatgtacgttgctgtgtggaccccttacggcgtgctgcgcacctcccgaaacccagagactgatacctacattctttttaacccatggtgcgaagacgacgctgtgtatctggataatgaaaaggagagggaggagtatgtgctgaatgatattggtgtaattttctacggtgaagtgaatgatatcaaaaccagaagttggtcatatggacagtttgaggacgggatcttggacacgtgcctctacgtgatggaccgggctcagatggatttgtctgggcgcggcaatccaatcaaggtgtctagagtaggctcagctatggtaaacgccaaggatgatgaaggggtcctcgtgggctcatgggataatatctatgcgtacggagtgcccccttctgcgtggacaggatccgtggatatactgcttgaatatcgcagcagtgagaaccctgtgcgctacggccaatgttgggtgtttgccggcgtgtttaacacatttctgagatgcctgggaattccagcaaggatcgtaaccaattacttctccgctcacgataacgatgccaacctgcagatggacatattcctggaggaggatgggaatgtgaactctaagctgactaaggactctgtgtggaattatcactgctggaatgaagcttggatgaccaggccggacctgcctgtcggattcggtggatggcaggccgtagacagcactccacaggaaaatagcgatgggatgtacagatgcggtcctgcatctgtgcaagctattaagcacggccacgtgtgtttccagttcgatgcccctttcgtattcgctgaggtgaattcagatctgatttacataacggctaagaaagatggaacccatgtggtagagaacgttgatgccacccatatcggtaaactgatcgtcaccaagcagatcggtggggacgggatgatggacatcaccgacacctacaagtttcaggagggccaagaggaagagaggctggcactcgagactgccttgatgtacggtgctaagaaaccacttaacacagagggtgttatgaagtctcgatccaacgtggacatggatttcgaggtggagaacgcagttctcgggaaagacttcaagctgtctatcacatttaggaacaacagtcacaaccgctatacaatcacggcctatttgtccgctaatattacattctataccggcgtgccgaaggctgagtttaaaaaggagacgtttgacgtgaccctggaacctctctcattcaaaaaggaagcagtcctcatacaggcgggagagtatatgggacagcttctcgagcaagcatccctgcacttttttgtgacagcacggatcaacgagacccgggacgtgttggccaaacaaaagagcacagtactcacaattccggaaattattattaaggtaaggggcacgcaggtggtggggtctgacatgacggttacagtgcagtttaccaaccccttgaaagaaaccctgcggaatgtatgggtgcatctggacggcccaggcgtgacccgccctatgaagaaaatgttcagggagatcaggccaaactctacagtgcagtgggaggaagtctgtagaccctgggtgtctggccaccgaaagttgattgcgtccatgagctccgactccctgaggcatgtgtatggtgaactcgacgtgcaaatccagcgccgcccatccatg

SEQ ID NO: 2150 - DNA, 2196 bp, Artificial Sequence
  derived and/or modified sequence
atgtctgaaacctctcgtacggcattcggtggacgacgagccgtccctcctaacaatagcaacgccgcggaggacgatttgcccactgtcgagttgcagggtgtggtccctcggggcgtcaatttgcaggaatttttaaacgtcacttccgtacatctgtttaaggagcgttgggatacgaacaaagttgatcatcacacagacaagtatgagaacaacaaacttatcgtgcgcaggggtcaaagtttttacgtacagattgattttagtcgaccgtacgacccccggagggatctgtttagagtagagtacgtcattggccgctatccccaggaaaacaaaggcacctacattcctgttccaattgtctcagagctgcagtcaggcaagtggggtgcgaagatcgtcatgagggaggacagaagtgtgcgcctgagcattcagtcttctcctaaatgcatcgtgggaaaattcagaatgtatgtcgctgtttggacaccatacggggtcctccggactagtaggaaccccgaaactgacacatacattctgttcaacccttggtgcgaggacgacgccgtgtacttggacaacgagaaggagagagaggagtatgtcttaaatgatatcggcgtgatattttatggggaagtcaatgacatcaaaaccaggtcctggagttatggccagtttgaagatggaatcctcgatacatgtctctatgtaatggaccgggcacagatggatctcagcgggcgcggcaacccaataaaggtgtcccgagtcggttctgcgatggtgaatgctaaggacgacgaaggggttctggtgggatcttgggacaatatctacgcgtacggggtgccacctagtgcttggacagggtctgtagatattctgttggagtatagaagcagtgagaatcccgtcaggtatggccaatgctgggtgttcgcaggggtgttcaacacatttttaagatgtttgggtattccagcaaggattgtgacaaattatttcagtgctcatgacaatgacgccaacctgcagatggacatttttcttgaggaggacggaaacgtgaatagcaagctcacaaaggatagtgtgtggaactatcactgctggaatgaggcctggatgacccgcccagacttgcccgttgggttcggaggatggcaggcagttgacagcaccccgcaagagaactccgatggtatgtaccgctgcggacccgcgtccgtgcaagccatcaaacacggccacgtgtgtttccagtttgatgccccgtttgttttcgcagaggtcaattccgatcttatttacatcactgcgaaaaaagatggaactcacgtagtggagaacgtagacgctacacacatcggcaagttgattgtaaccaagcagataggtggggacggcatgatggatataactgacacctacaaatttcaagagggtcaggaagaggagcgcttagccttagagacggccctcatgtatggcgcgaagaagcccctgaatacagaaggtgtcatgaagagcagatcaaatgtggatatggattttgaagttgagaatgcggtgctggggaaggatttcaaactcagcattacatttcgaaacaatagccataatagatatacaattaccgcatatctctcggctaacatcactttctataccggggttccgaaggccgaattcaagaaagaaacatttgatgtgacactggaacctctgagtttcaagaaagaagcagtgttgatccaggcaggcgaatacatgggtcagctgttggaacaagccagccttcacttttttgttacagccaggatcaatgaaactcgggatgtcctggctaaacagaagtccaccgtgctgaccatccccgagattatcattaaagtgaggggaacccaggtcgtggggtcggacatgacagtgacagtgcaatttaccaatcctctgaaggagaccctccgcaacgtttgggtgcatctcgacggccctggcgtgacaagaccgatgaaaaagatgttccgggagatccggcccaacagcacagtccagtgggaggaagtttgcagaccttgggtctctggccaccggaaactaatcgcctctatgtcctctgactccctgaggcatgtctatggtgaactggatgtccagattcaaaggcgaccttctatg

SEQ ID NO: 2151 - DNA, 2196 bp, Artificial Sequence
  derived and/or modified sequence
atgtcggaaaccagccgcactgcgttcggcgggagacgtgcagtgccaccaaataactccaatgcagcggaagatgatctgcctacggtggagctccaaggagtcgtgccaaggggggttaacctccaagaatttcttaacgtcaccagcgtccatctgtttaaggaacgctgggacaccaataaggtggatcatcatactgacaagtacgagaacaacaaactgattgtgcgaagaggtcagtccttctacgtacaaattgatttctcaagaccgtacgaccctcggcgtgatctttttcgcgtggaatacgtgatcggacgataccctcaggaaaacaaggggacttacatccctgtccctatcgtgtcggaactgcaatcaggaaagtggggagccaaaatcgtgatgcgagaggaccgcagcgtgcgactttcgattcaatcgtcccctaagtgcatcgtgggaaagtttagaatgtacgtagcagtgtggactccatacggtgtcctccgaaccagccgcaatcccgaaaccgatacctacattttgtttaacccatggtgtgaagatgatgctgtgtacctcgataacgaaaaggaaagagaggagtacgtcctgaacgatatcggtgtgattttctacggtgaggtcaatgatatcaaaacccgatcgtggtcatacggccagtttgaagatgggatcttggatacgtgcctgtacgtcatggatagagcgcaaatggacctgagcggtagggggaatcctatcaaggtgtcccgagtgggctctgcaatggtgaacgccaaagatgacgaaggtgtgctggtgggatcctgggacaacatttacgcttacggagtccctccctccgcctggaccggctcagtggatattctccttgagtatcgttcctccgagaatcccgtgcgctacggacaatgttgggtctttgctggtgtgttcaacacttttcttcggtgtcttggaattcccgcacgcattgtcaccaactacttctcggcacacgataacgacgcaaacttgcaaatggatatctttctcgaagaggatggcaatgtgaacagcaaacttaccaaagactcagtttggaattaccactgttggaacgaagcatggatgacgcggccggatcttccagtgggttttggaggttggcaggccgtggactcgactccccaagagaactccgatggaatgtatagatgtgggccagcatctgtccaagctatcaagcacgggcacgtgtgctttcaattcgacgcaccatttgtttttgccgaggtgaactccgatctgatatacatcactgcaaaaaaggatgggacccatgtcgtggaaaacgtggacgcaactcatattggcaagctgatcgtcactaagcaaataggaggggatggcatgatggacattaccgacacttataagttccaggaaggacaggaagaggaacgtttggcactggaaactgccctgatgtacggagcgaagaagcctctcaataccgagggggttatgaagagccgatctaatgtggacatggacttcgaggtggaaaatgccgttctcggtaaagatttcaaactctccataacttttcgaaataactcccataacagatacaccattaccgcttatctttccgcaaacattactttttacactggggtgccaaaagcagagttcaaaaaggaaacctttgatgtcaccctggaaccccttagctttaagaaggaggcagtgcttattcaagctggagaatacatggggcaacttctggagcaggcgtctctgcatttctttgttacggcccggattaatgagactcgggacgtgctcgccaagcagaagagcacggtgcttacgattccagaaatcatcatcaaggtgcgaggaactcaggtggtgggctccgatatgactgtgactgtgcaatttaccaaccccctgaaagaaaccctcaggaacgtgtgggtgcatctggatggccctggagtcacccgacctatgaagaagatgtttcgagagattcgccccaactccaccgttcagtgggaggaggtgtgtaggccttgggtgtcgggtcacaggaaactgattgcatccatgtcctcggattccttgagacatgtctacggagaacttgacgttcagatacagaggcggccgtccatg

SEQ ID NO: 2152 - DNA, 2196 bp, Artificial Sequence
  derived and/or modified sequence
atgagcgaaactagtcggaccgcattcggtggccggagggcagtccctccgaacaactcaaatgccgctgaggacgacctgccaacggtcgagttgcagggggtggtcccgcgcggcgtaaaccttcaagaattcctcaacgttacgagcgtgcacctcttcaaggagagatgggacaccaataaggtggatcatcacaccgacaaatacgaaaacaataagctgatagtacgcaggggacaatcattttacgtgcagatcgacttctcccggccatacgaccctagacgggacctgttccgggtggagtacgtgatcggaaggtacccgcaggaaaacaaaggaacttacatcccggtcccgattgtgtccgaactccagtctgggaaatggggagccaaaatcgttatgcgcgaggatcgctctgtgagactgtcgatccaatcgagcccgaaatgcatcgtgggaaagtttcggatgtacgtggccgtgtggaccccctacggggtgttgagaacttcaaggaatccggaaacggatacctacatcctgttcaacccatggtgcgaggatgatgcggtgtacctcgataacgaaaaggaaagggaagaatacgtgctcaacgacattggcgtcattttctacggtgaggtgaatgatatcaagaccagatcctggtcatacggccaatttgaggatgggattctggatacttgtctgtatgttatggatcgcgcccaaatggatctcagcgggcgtggaaatccgatcaaggtgtcgcgcgtgggatccgccatggtgaacgctaaggacgacgaaggcgtgcttgtgggatcgtgggacaacatttacgcctacggagtgcctccttcagcgtggactggtagcgtggacattctgctggaataccgctcaagcgagaaccccgtgcgttatggccagtgctgggtctttgcgggggtattcaatacctttctccgatgtctcgggatccctgcacggatcgtaactaattacttttcggcccatgacaacgacgccaacctgcaaatggacatcttcctcgaggaggacgggaatgtgaactcaaaactcaccaaggacagcgtgtggaattaccattgctggaacgaagcatggatgacccggcccgacctgccagtgggtttcggaggatggcaggctgtggattcgactcctcaggaaaactccgacggaatgtaccggtgcgggccggcctcggttcaggcaattaagcacggccatgtgtgtttccaatttgacgcgccattcgtgttcgcagaggttaatagcgatctgatctacatcaccgcgaaaaaagacggaacccacgttgtcgagaatgtggacgccacccatatcgggaagctgatcgtcaccaagcagatcggaggggacggaatgatggacatcaccgatacttacaagttccaggagggacaggaggaggaacgcttggcgctggaaactgcgttgatgtacggagccaagaaacccctgaatactgaaggcgtcatgaagagcagatcgaacgtcgacatggatttcgaggtcgagaatgccgtcctgggcaaggatttcaagctgagcatcactttccgcaacaactcgcacaaccggtatactatcaccgcctatctttcagcaaacattaccttctacaccggtgttccaaaggccgaattcaaaaaagaaacctttgacgtcactctcgaaccactgtcgtttaagaaggaagccgtgcttatccaggctggcgagtacatgggacaactgttggagcaggcttctcttcacttcttcgtcacggctcggatcaacgaaaccagggatgtgctggcgaagcagaaatccactgtcttgactatcccagaaatcatcatcaaggtccgaggaacccaggtggtcggttccgacatgaccgtcactgttcaattcacgaacccgctgaaggaaactttgagaaatgtgtgggtgcatctggacggacccggagtgaccaggcctatgaagaagatgttccgggagatcagaccaaacagcactgtgcaatgggaagaagtgtgccggccgtgggtatcgggacaccggaagctcatagcctcaatgtcatccgattccctgcgccacgtttacggcgagctggatgtgcagatccagcgcagaccgtcgatg

SEQ ID NO: 2153 - DNA, 2196 bp, Artificial Sequence
  derived and/or modified sequence
atgtcagaaacttcgcgcaccgcgttcgggggacgcagagctgtgccacccaacaattcaaatgccgctgaggatgatctgccgacggtggagctgcaaggagtggtgccgcgcggagtgaatctgcaggagttcctcaatgtaactagcgtgcacctctttaaagaaagatgggacactaataaggtggaccaccacactgacaaatacgagaataacaaactgatcgtgcgccggggccaatccttttatgtccaaatcgacttctcccgcccatacgatcctagaagagatttgttccgcgtggagtacgtgatcggtaggtaccctcaagagaataagggtacctacatccctgtgcccatcgtgtcggagctgcaatccggtaagtggggagcaaagatcgtcatgcgcgaggatcggtcagtgcgcttgtccatacaaagctcgccaaagtgtattgtcggtaagttccggatgtacgtggcggtgtggaccccttacggggttttgaggacttcaaggaacccagagactgacacttacatcctgtttaacccgtggtgcgaagatgacgctgtgtacttggacaacgagaaggaacgcgaagaatacgtgcttaacgatattggtgtgatcttctacggagaagtgaacgatatcaagactcgctcgtggtcgtacggacagttcgaggacggaatccttgacacttgcctctacgtgatggatcgcgcccagatggacctttcgggacgtggcaaccctatcaaggtttcccgagtgggatcagccatggtgaacgccaaggacgatgaaggcgtgttggttggatcgtgggacaacatttacgcctacggggtcccgccgtcggcttggaccggatcggtggatatcctgctggaatacagaagctcagaaaatccagtcagatacggacagtgctgggtgttcgctggtgtgttcaacacgtttctgcggtgtttgggaatcccggcccgcatcgtgacgaactacttcagcgctcatgacaatgatgcgaacctgcagatggatatctttctggaagaggacggcaacgtgaattcgaagttgactaaggactccgtgtggaactaccattgttggaacgaggcgtggatgacccggcctgacctcccggtgggcttcggaggatggcaggcagtcgattcaaccccacaggaaaacagcgatggaatgtaccgctgtggacctgctagcgtgcaagcaatcaagcacgggcatgtttgttttcagttcgatgctccctttgtgttcgcagaggtgaattcggatcttatctacatcaccgccaagaaggacggcactcacgtggttgagaacgtcgacgcaactcacatcggaaaactcatcgtgaccaagcagatcggcggagatggaatgatggacatcaccgatacttacaaatttcaggaaggacaggaagaggagaggctggctctcgagactgcgcttatgtacggagccaagaagcccctgaacactgaaggagtgatgaaatcccggagcaacgtcgacatggacttcgaagtggaaaatgcggtccttggaaaggatttcaagctgtcgatcactttccggaacaattcacacaaccgctacactatcaccgcgtatctttccgcgaatatcactttctacaccggagtcccaaaggcggagtttaagaaagaaacctttgacgtcactctggaaccgctttcgttcaaaaaagaggcggtcctgatacaggccggagaatacatgggccaactgctggaacaggcgtcactccactttttcgtcaccgcaagaatcaacgaaactcgcgatgtgctggccaagcagaaaagcaccgtgctcacgatcccggaaatcattatcaaagtgcggggaacccaagtggttggttcagacatgaccgtgaccgtgcagttcaccaatccactgaaggaaacgctgcggaacgtctgggtgcatcttgacggcccgggcgtgacccggccaatgaagaaaatgttccgcgaaatccgcccaaatagcaccgtgcagtgggaggaagtgtgcaggccgtgggtgtccggacataggaagctcatcgcgagcatgtcgtcggactcgctgcggcacgtgtacggggagctggacgttcaaatccagcggaggccgtccatg

SEQ ID NO: 2154 - DNA, 2196 bp, Artificial Sequence
  derived and/or modified sequence
atgagcgagacttcccggaccgcatttggagggcgtcgggcggtccccccgaacaattcgaatgcagctgaggatgatctgccaaccgtggagctccaaggtgttgtgcctcgcggagtgaatctgcaagaatttcttaacgttactagcgtgcatctgtttaaggagcgttgggacaccaataaggtcgaccaccacaccgacaagtacgaaaacaataagctcatcgtccgcagaggacaatcgttttatgtgcagatcgactttagccgcccctacgaccctagaagagatctgttccgtgtggaatacgtcatcggtagatacccccaagagaacaaaggtacttacatacccgtccctattgtgtcagagctgcaatcgggaaagtggggtgcaaagattgttatgcgcgaagatcgcagcgtgaggctctcgatccagtcctcgccaaaatgtatcgtcggcaagttcaggatgtacgtggcagtgtggaccccatacggagtgcttaggacctcccgtaaccctgaaaccgatacgtacatactgtttaatccttggtgtgaggatgatgcagtgtaccttgataacgaaaaagaacgcgaggaatacgtcctcaacgacatcggcgtgattttctatggtgaagtgaacgatatcaaaactaggtcctggtcgtacgggcagttcgaggacggaattctggatacgtgcctgtacgtgatggatcgcgcacaaatggacctctccggaaggggaaaccctataaaggtttctcgagttgggtccgcaatggtgaacgctaaggacgacgaaggtgttttggtcggctcctgggataacatctacgcgtacggagtgccaccttccgcctggaccgggtcggtggacatcctgctcgaatatcgttcctcggagaacccagtgcgttatggtcagtgctgggtgtttgccggtgtgtttaacacgtttcttcggtgtttgggcattcccgctagaattgtcactaattacttctcggcacacgataacgacgcaaatctgcaaatggatatctttctggaggaggacggcaacgtcaattccaaactgaccaaagattcggtgtggaattaccattgctggaatgaggcctggatgactagaccagacttgccagtgggttttggaggatggcaggccgtggattccacgccgcaggaaaattccgatggaatgtaccgttgtggtcctgcgtcggtccaagcaattaagcatggacacgtgtgttttcagtttgatgcaccttttgtgttcgctgaagtgaattcagatctgatttacattacggcgaagaaggatggcacccacgtggtcgaaaacgtggatgccacccatattggcaaactgatagtcacgaagcagattgggggagacggcatgatggatattactgatacttacaaatttcaggaagggcaggaggaagaacggctcgctttggaaaccgcccttatgtacggtgccaagaagcccctgaacactgaaggcgtcatgaaatcaagaagcaatgtcgacatggactttgaggttgagaatgcagtgttgggaaaggatttcaaactgtcgattacctttcggaacaattcacataacagatacaccatcactgcttacctctcagcgaacattaccttttacaccggagtgccgaaggcagaattcaagaaggaaactttcgatgtgactcttgagccgctttctttcaaaaaggaagcagttctgatccaggcaggggagtatatgggacaactcctcgaacaagcatcactgcatttctttgttacggcgcgcatcaacgaaactcgggacgtgcttgcaaagcagaagtccaccgtgctcaccatccccgagattatcataaaagtcagaggaacccaggtcgtgggtagcgatatgaccgtgactgtgcaatttaccaacccactgaaggagacgcttaggaacgtgtgggtgcaccttgatgggccgggagtcactcgccctatgaagaagatgttccgtgaaattcgacctaactctactgtccagtgggaagaagtgtgtcgaccttgggtttccggtcatagaaagttgatcgcatcgatgtctagcgactcgctgagacatgtctacggggaacttgatgtgcaaattcaaaggcgacctagcatg

SEQ ID NO: 2155 - DNA, 2196 bp, Artificial Sequence
  derived and/or modified sequence
atgtcggaaacctccaggactgcgtttggcggacgccgggccgtcccaccaaacaattcaaacgcggcagaggacgacctcccaactgtggagctgcagggcgtggtgccgcggggcgtcaacctgcaagaattcctgaacgtcacctcggttcacttgttcaaggagcggtgggatactaacaaggtggaccaccatacggataagtacgaaaacaacaaacttattgtccggagggggcagagcttctatgtccagatcgacttctcccgtccatacgacccacggagagacttgtttcgcgtggaatacgtgataggaagatatccgcaggagaataagggcacctacataccggtccccatcgtcagcgaactgcagtccggaaagtggggagcgaaaattgtgatgagagaagatcggtcagtgagactctcgattcagtcctcacctaagtgtatcgtgggcaagttccgcatgtacgtcgccgtgtggactccttacggagtgttgaggacgtccaggaatcctgagactgacacttacatcctcttcaacccgtggtgcgaagatgatgcagtgtacctcgacaatgaaaaggaacgcgaggagtacgtgttgaatgatattggcgtcattttctacggggaggtcaacgatatcaagacccggtcctggtcctacggccaatttgaggacggaatccttgacacctgtttgtacgtgatggacagagctcaaatggatctgtcaggccgcggaaacccgattaaggtcagcagagtaggatccgcgatggtgaacgccaaggacgacgaaggagtgttggtcggaagctgggacaacatctacgcgtacggggtcccaccgtcggcctggaccgggtcggtcgatatcctgctggaataccggtcctcggagaatccggtgagatacggacagtgctgggtgttcgcgggagtgtttaacaccttcctgcggtgtctgggtatcccagccaggattgtcaccaactactttagcgctcacgacaacgatgctaacctgcaaatggatatctttctggaagaggatggtaacgtgaacagcaagctgaccaaggactccgtgtggaattaccactgttggaatgaagcctggatgaccagacccgacctgcctgtgggttttgggggatggcaagccgtggactcgacgccgcaagaaaattcggatggaatgtacagatgtggaccggcgtcagtgcaggccatcaaacacggtcatgtgtgcttccaattcgatgctccgtttgtgtttgcagaagttaactccgatctgatctacatcactgccaagaaagacggtacccacgtcgtggagaatgtcgacgcgactcacatcggcaaactgatcgtgaccaagcagatcgggggagatggcatgatggacattaccgacacctataagttccaggaggggcaggaagaagagagactggccctggagactgctctcatgtacggagccaagaaaccactgaacaccgagggcgtcatgaagagcaggtcgaacgtggacatggacttcgaagtggaaaacgccgtgttgggcaaggatttcaaactgagcatcacttttcgcaataactcgcacaatcggtacaccatcaccgcctacctgagcgctaacatcaccttttacaccggtgtcccgaaggccgaattcaagaaggagacttttgacgtgactttggaacccttgagctttaagaaggaagcagtgctgattcaagcgggagagtacatggggcagcttctcgagcaggcatcgctccatttcttcgtgaccgcgcggattaatgaaactcgggacgtgctggccaaacagaagtcgaccgtcctgaccattccggaaatcatcatcaaggtccgcgggacgcaggtcgtcggatcggacatgacggtgacggtgcagttcaccaatcccctgaaggaaacccttcgcaatgtctgggtgcacctggacggaccgggtgtgacccgtccgatgaagaagatgttccgggaaatccggccgaactcaaccgtgcagtgggaggaagtgtgccgcccgtgggtgagcggacaccgcaagctgatcgcatcaatgtcctcagattccctccgccatgtgtacggagagctggacgttcagatccagcgccggccgtcgatg

SEQ ID NO: 2156 - DNA, 2196 bp, Artificial Sequence
  derived and/or modified sequence
atgagtgaaacaagtagaactgcatttgggggaagaagagctgttccaccaaataatagtaatgcagctgaagatgatttgccaactgttgaattacaaggagtagttccaagaggagttaatttacaagaatttcttaatgtaacttctgtacatctttttaaggaaagatgggatacaaacaaagttgatcatcatactgataaatatgaaaataataaacttattgttagaagaggacaatcattttatgtgcaaattgatttttctagaccatacgacccaagacgtgatctttttagagttgaatacgttatagggcgttatcctcaagaaaataaaggaacatatattcctgttccaattgtttctgaattacaatcaggaaagtggggagctaaaattgttatgcgagaagaccgttctgttagattgtcaattcaatcaagtcctaagtgtattgttggtaagttcagaatgtatgtagctgtttggacaccatacggggtattacgaacttctagaaatcctgaaactgacacatatattttgtttaatccatggtgtgaagatgatgcagtttatttagacaatgagaaagagagagaggaatatgttctaaatgatattggtgtaatattctacggtgaagttaatgatattaaaacaagatcatggtcctatggacaatttgaagatggaattttagatacatgtttatatgtaatggatagagcacaaatggatcttagtggaagaggaaatccaataaaagtaagtagagttggttcagcaatggtaaatgctaaagatgatgaaggagttttagttggatcttgggataatatttatgcttatggtgttccaccttctgcatggacaggttcagttgatatacttttagaatatagatcatctgaaaatccagtccgttatggacagtgttgggtttttgctggtgtttttaatacttttcttagatgtcttggaataccagctagaatagttactaattatttttctgctcatgataatgatgcaaatctacaaatggatatttttttagaagaagatggaaatgttaacagtaaacttactaaagatagtgtttggaattatcactgttggaatgaagcctggatgactagacctgatttaccagttggttttggaggatggcaagctgtcgattctactccacaagaaaatagtgatggaatgtatagatgtgggccagcatctgttcaagctattaaacatggtcatgtttgtttccaattcgatgctccttttgtttttgcagaggttaattctgatttaatttatattacagcaaagaaagatggtacacacgtcgttgaaaatgttgacgctactcatattggaaaattgattgtgacaaaacaaattggaggagatggaatgatggatattactgatacatataagtttcaagaaggacaagaagaagaaagacttgcacttgaaactgcacttatgtatggagcaaaaaaaccacttaatactgaaggtgttatgaaatctcgaagtaacgttgatatggattttgaagttgaaaatgcagtattaggaaaagattttaaactttctattacttttagaaataattcacataatagatatactattactgcatacttatcagcaaatataacattttacactggagtgccaaaagcagagtttaaaaaagaaacttttgatgttacattagaaccattatctttcaaaaaagaagcagttttgattcaagccggagaatatatgggtcagttactagaacaagcttctcttcatttttttgttactgctaggatcaatgaaacaagagatgttctagccaaacaaaaatctacagttttaactattcctgaaattattataaaggttagaggaacacaagtggttggttcagatatgactgtaacagttcaatttactaatccattgaaagaaacattacgtaacgtttgggtacatcttgatggaccaggagttactagaccaatgaaaaaaatgtttagagaaataagaccaaatagtacagttcaatgggaagaagtttgtcgaccttgggttagtgggcatagaaaattaattgcatctatgtcatctgatagtttaagacatgtatatggagaattagatgtacagattcaaagacgtccatcgatg

SEQ ID NO: 2157 - DNA, 2196 bp, Artificial Sequence
  derived and/or modified sequence
atgtctgaaactagcaggactgccttcggcggaaggcgcgccgtcccccctaataactccaacgctgccgaagacgacctacccaccgtggaactgcagggtgtggtccccaggggcgttaacctgcaggagttcttgaatgtgaccagtgtccacttatttaaggaaaggtgggatacaaacaaggtagatcaccacaccgacaagtacgaaaacaataaactgattgttagacgcggccaatctttttatgttcagattgatttcagccggccctatgatccccgtcgagatctgttccgcgtggagtacgtgatagggaggtacccacaggaaaacaaaggaacctatatcccggttcccattgtctcagagctgcaatctggcaaatggggcgcgaagatcgtcatgcgggaggatcgcagcgtgaggttgtctatacagagttcccccaaatgcatagtgggcaaatttcggatgtacgttgccgtgtggacgccctatggggtgttgcggacctcccggaatcccgagaccgatacttacattctgtttaacccctggtgcgaagacgatgccgtgtaccttgataacgagaaggaacgcgaggagtacgttctcaacgacatcggggttattttttatggtgaagtgaatgatataaagacgagaagttggtcctacggacagtttgaggatggcatcttagacacttgtctgtacgtcatggacagagcccagatggacctgagcggcagaggcaacccgattaaagtgtccagagtcggaagcgcaatggtaaacgccaaggatgacgagggggtgctggttggcagttgggacaatatttatgcctacggcgtccctcccagtgcttggacaggatctgttgatatactgctggagtatagatccagtgaaaatcctgtgagatacgggcagtgttgggtgttcgctggagtttttaacaccttcctcaggtgcctcggaattcctgccagaattgtcaccaattacttcagcgcccatgacaacgatgccaatctccagatggatatcttcctggaggaggacggaaacgtcaactctaaactgaccaaagattcagtgtggaactatcactgttggaatgaagcttggatgactcgccccgacctgcccgttgggtttggaggttggcaggcagtcgactcgacccctcaggagaattctgacggcatgtaccggtgtggccctgcgtccgtgcaggccattaaacacgggcacgtgtgtttccagttcgacgccccatttgttttcgcggaagtgaatagcgacctcatctacatcactgctaagaaggatggtacgcatgtggtggagaatgtcgacgccactcatattggaaaactgatcgttaccaagcagatcggcggagacggcatgatggatatcactgatacatataaatttcaggaaggccaggaagaggaaagactcgcgctggagacagccttgatgtacggagccaaaaaaccgttgaacaccgagggcgtgatgaagagccggagcaatgtggatatggatttcgaggtcgaaaatgccgttttaggtaaggatttcaagctgagtattactttccgcaacaactcacacaatcgctacactatcacagcctacctatcggccaatataaccttctatacaggagttcccaaggcagagttcaagaaggagacatttgacgtgacgctagaaccacttagcttcaagaaggaggcagtgttaatccaggctggcgaatatatgggtcagctgctcgagcaagcgtctctacattttttcgtgactgctagaataaacgagaccagggatgtgctggctaaacagaagagcacagtgctgacaatccctgagatcatcatcaaggtacgcggaacccaagttgttggatctgatatgaccgtcaccgtgcagttcaccaacccactgaaggaaaccctgaggaatgtgtgggtgcacctggatggccctggggtgacacgccctatgaagaaaatgtttcgggagatacggcccaattcaaccgttcagtgggaagaggtgtgtcgtccctgggtgagcggtcaccgcaaacttatcgcttccatgtcctccgactccttgcggcacgtgtatggagagttggacgtgcagatccaacgtcggcctagcatg

SEQ ID NO: 2158 - DNA, 2196 bp, Artificial Sequence
  derived and/or modified sequence
atgtcagaaacttcacgcaccgcgttcggtggaagaagggccgtcccacccaacaactccaacgccgctgaggacgacctccctacggtggaactccagggcgtcgtgccccgcggagtcaatctgcaggaattcctcaatgtgacgtcagttcacctctttaaggaaagatgggataccaacaaggtcgaccaccacacggacaaatacgaaaacaacaagctcattgtccgtcggggccagtcgttctacgtgcagatcgatttctccagaccctacgaccctagacgggacctgtttcgcgtcgaatacgtgatcggcaggtacccgcaggagaataagggaacttacattccggtgccaatcgtgtcggagctgcagtccggcaagtggggagcaaagatcgtgatgagagaggatagatcggtccggctctccattcaatccagcccgaaatgcatcgtgggaaagtttagaatgtatgttgcagtgtggactccttacggggtgctcagaactagcagaaacccagagactgatacttacatccttttcaatccatggtgcgaggatgatgccgtgtaccttgataatgagaaggaaagggaggaatacgttctgaatgatatcggtgtgatcttctatggagaggtcaatgatatcaagacccggtcctggtcgtacggacaattcgaagatgggatcctcgacacttgcctctatgtgatggatcgagcccagatggacctttcgggacggggaaatccaataaaggtgtccagggttggatcagcaatggtaaatgcgaaagacgatgaaggagttctggtgggctcgtgggacaatatctacgcgtacggagtcccgccgtcagcgtggaccggctccgtggatattctgctcgaataccggtcctcggagaacccggtgcgctacggtcagtgctgggtgttcgccggagttttcaacactttcttgagatgcctgggaattccagctcggatcgtgactaactacttctctgctcatgacaacgatgctaacctgcaaatggacatctttttggaggaagatgggaatgtcaactcgaagttgactaaggactcggtatggaactaccactgttggaatgaagcctggatgaccaggcccgaccttccggtcgggttcggaggctggcaagcagtggactctacccctcaagaaaactcggatgggatgtacagatgtgggccggcctccgtgcaggccatcaagcacggacacgtgtgtttccagtttgacgcgccgttcgtgttcgcagaagtgaatagcgatctgatctacatcaccgccaaaaaagacgggacccatgtcgtcgaaaacgtcgacgcgacccatatcggcaaattgatcgttactaagcagatcggtggagacggtatgatggacataactgacacctacaagttccaggaaggccaggaagaagagcgcctcgccctggaaaccgctctcatgtacggagcgaagaagccgcttaacaccgagggtgtgatgaaatcccgaagcaacgtggacatggacttcgaggtcgagaatgcggtgctcggaaaggactttaagttgtcaataacctttcggaacaacagtcacaatagatacaccatcaccgcgtacttgagcgcgaatatcactttctataccggagtcccaaaggcagaattcaagaaagaaactttcgacgtgaccctggagccgctgtcatttaagaaagaggcggttctgatccaggctggagagtacatggggcaactgctggaacaagcctccctgcatttcttcgtgactgcaaggatcaacgaaacccgcgatgtgctcgccaaacaaaaatccaccgttctgaccatccccgagattatcataaaagtccgcggtacgcaggtggtcgggtcagacatgactgtgactgtgcaattcaccaaccctctgaaggagactctgagaaacgtgtgggtgcatctggatggtccgggagtgacccggccaatgaagaagatgtttcgcgaaatccggcctaacagcaccgtgcaatgggaggaagtgtgccgtccatgggtgagcggacaccgcaaacttatcgcgagcatgtcatccgactcgttgcgtcatgtgtacggagaactcgacgtgcaaatccagaggcgaccgagcatg

SEQ ID NO: 2159 - DNA, 2196 bp, Artificial Sequence
  derived and/or modified sequence
atgtcggagacatcgcggacggcatttgggggtcgtagagcggtgcctcctaataattcaaatgcggccgaagacgatctgccaacagttgaacttcaaggcgttgttcctcgcggcgttaatctgcaggagtttctgaacgtcacatcggtgcacctgttcaaagaacggtgggataccaacaaagtagatcatcatacagataaatacgaaaataataaattaatcgttagaagaggccaaagtttttatgttcagatcgacttttctcgcccttatgatccgagacgtgatttgttccgagtcgagtacgtcattggacggtacccacaagaaaacaaaggtacttatatcccggtcccgattgttagcgaacttcaatcgggcaagtggggagcgaaaatcgtaatgcgcgaagaccggtctgtcaggctctcgattcaaagctcgccaaagtgtattgttgggaaattccgtatgtatgttgctgtctggacaccttatggcgtacttcggacatcgcggaacccagaaacagacacgtatattctgtttaatccatggtgcgaagatgatgctgtatatctcgacaatgagaaggaaagggaagaatatgtattaaacgatatcggagtaatcttctatggagaggtcaacgatatcaagactcgatcctggtcatatggacagtttgaggatggcattctcgatacatgcttatatgtaatggacagggcccagatggatctgagcggccgtgggaatcctattaaagtaagtagggtcggatccgccatggtgaatgcgaaagatgatgaaggggtcttggtcgggagctgggataatatttacgcatacggagtgcctccgagcgcctggacagggtctgtggatatactgttggaataccgaagctcagaaaaccccgtgagatatggccagtgttgggtctttgctggagtttttaatacgtttctacggtgccttggcattccagctagaattgtgaccaattatttttcagcacatgataatgatgcgaacttgcaaatggatatatttttggaggaagatggcaacgtcaactcaaaattgactaaggactcagtctggaattatcactgttggaacgaagcttggatgacacgtcctgatctgcccgtcggttttggtggctggcaagcagtcgactcaactccacaggaaaactcagatggaatgtatcgatgtgggccggcatccgtccaagcaattaaacatggtcatgtctgctttcaatttgacgctccgtttgttttcgcggaggttaattcggatctgatctatatcaccgctaaaaaggatggtacacacgtcgtcgaaaatgtagacgcgactcatataggcaaactcatcgttacaaaacaaattgggggggacggcatgatggatattacagatacgtacaaattccaagaaggccaggaagaagagcgcctggcattagaaacagctcttatgtatggcgcaaaaaaaccgcttaatacggagggcgtgatgaagagccgctcgaatgtcgacatggattttgaagtggagaacgccgtgctgggcaaggactttaaattgagtattacattccgaaataattcacataaccgttatacgattacagcttacttgtccgccaatatcacattttacacaggcgttcctaaagcggaatttaagaaggaaacgtttgacgtgactctggaaccgttatcgtttaaaaaagaggcagtgttgattcaagccggagaatacatgggacaattattagagcaagcatctctccacttttttgttacagctcgtattaatgaaacgcgcgacgtcctggcaaaacagaaatcaaccgtattgacaattcctgaaatcatcattaaagtgcgtggcactcaagtagttggatccgacatgacagttacagtacaatttactaacccgcttaaagaaacgctgcgtaatgtctgggtacacttagacggaccgggagtgacacggccgatgaagaagatgtttcgggagattcgtcctaatagtactgtgcaatgggaagaagtttgccggccgtgggttagcggccatcgaaagctgatagcgtccatgtcttcggatagtcttcgccacgtctatggcgaactagatgtgcagatccaacggagaccgtcgatg

SEQ ID NO: 2160 - DNA, 2196 bp, Artificial Sequence
  derived and/or modified sequence
atgagtgagacaagcagaacggcttttggcggccggcgtgccgtgcctccaaacaattccaatgccgcggaagacgatttacccaccgtcgaactgcagggagtcgtgccccggggggttaatcttcaggaatttctcaatgtaacttcagtacatctgttcaaagaaaggtgggacacaaacaaagtggaccaccatactgacaagtatgagaacaacaagctgattgtgagaaggggccagtccttttacgtccagattgatttctcccggccgtacgatcctcgaagggatctgtttagggtggaatatgttatcggaagatacccacaggaaaacaagggaacatacatccctgtgcccattgtgtctgagctccagagcggcaaatggggtgctaaaatcgtgatgcgagaagatcggtccgtgaggttgtcgatacaaagctcacctaagtgcatcgtgggtaagttccgaatgtacgttgccgtgtggactccgtacggcgtgctcagaacctcaagaaacccggagacagacacttacattctgttcaacccctggtgcgaggatgacgcagtctacctggacaatgagaaagagcgcgaggaatacgtgctgaatgatatcggagtcatcttttatggagaagtgaacgatattaagacacgttcatggagctatgggcaattcgaagacgggatcctagacacttgcctgtatgttatggatcgagcacagatggacctgagcgggagaggtaacccgatcaaggtgtctcgcgtgggatccgctatggtgaacgcaaaagatgacgagggcgtgctcgtgggctcgtgggataatatatatgcatatggagtgccgccgtctgcttggaccggtagcgtggacattctgctcgaataccgcagttctgagaatccagtgaggtatggccaatgctgggtatttgcaggcgtatttaatacattcctgcgctgcctcggcatccccgcccggatcgtaaccaactatttcagcgcgcacgacaacgatgccaatctccaaatggacatctttttggaagaagacgggaatgtaaattctaagttgacaaaagactcagtatggaattaccattgctggaatgaggcctggatgacccgaccggaccttcctgttgggttcgggggttggcaggctgttgactccacaccacaggagaattcggatggaatgtatcgctgtggccctgcctctgtacaggccattaaacacggccacgtctgctttcagttcgacgcacctttcgtcttcgctgaagttaactctgacctgatttacatcacagccaagaaggatggcacccacgtcgtggagaatgtggatgccacacatatcgggaaactgatcgtgaccaagcagatcggcggcgacggaatgatggatataactgacacttacaagttccaggagggacaagaggaagaaagactagcccttgagacagccttaatgtacggcgcgaagaagcctttgaatacagagggggtgatgaaatccagatccaacgtggatatggactttgaggtcgagaacgcggtgctgggtaaagatttcaagctctctatcacattcagaaacaattcacataatcggtacactattacagcatacctgtcagccaacattacattttatacaggggtacccaaagccgagtttaaaaaggaaacatttgacgtcactctggagcccctcagctttaagaaagaagctgtgctgattcaggcaggcgagtacatggggcaactgctggagcaagcctcgttgcatttcttcgttacagctcggataaacgagaccagagatgtgttagcaaagcagaagtccacagtgttgaccattccagagattatcataaaggtgcgaggtacacaggtagtaggctccgatatgacagtgaccgtgcaattcacaaatccactgaaggagaccctcaggaatgtgtgggtgcacctggacggtcctggagtgactaggccgatgaagaaaatgtttagagagataaggcccaactcaaccgtgcagtgggaggaggtatgccgaccatgggtctctgggcacagaaaattgattgcctcaatgtcctcggattccttgcgtcacgtgtacggcgaactagacgttcaaatccagcgccgcccctccatg

SEQ ID NO: 2161 - DNA, 2196 bp, Artificial Sequence
  derived and/or modified sequence
atgtctgaaacttccagaacagcctttggagggaggagggcagtgcctccaaataactcaaatgctgcggaagatgatctgcccactgttgaactccagggggtcgttcccaggggagtaaaccttcaagaatttctgaatgtcacttcagttcacctgttcaaagaaaggtgggatacaaacaaggttgatcaccacactgataaatacgagaacaacaaacttatcgttaggcgggggcagtcattctatgtgcagatagatttctcacgaccctacgacccccggcgggatcttttccgagtggagtacgttatcgggcggtaccctcaagaaaataagggaacttatatccccgtccctatagtgtccgaactacagagtggaaagtggggagccaagatcgtaatgcgcgaagataggtccgtgcggctatctatccagtcctcacctaaatgcatagtgggaaaattcagaatgtatgtggcagtatggacaccgtatggggtgttacggacatcccggaacccagagacagatacatatatactgttcaacccttggtgcgaagatgatgccgtatacttggataacgaaaaagaacgcgaagaatatgtgctgaatgatataggagttattttctatggggaggtcaatgatatcaaaactaggtcttggtcgtatgggcagttcgaagatgggattctcgatacatgcctctacgtcatggatcgcgctcagatggatctttccgggaggggaaaccccatcaaggtgagtcgggtggggagtgccatggtgaatgccaaagatgacgaaggagtcttggtggggtcctgggataatatctatgcttatggagtaccaccatcagcttggactggatcagtggatatactcctagagtaccggtcttccgaaaatccagtacgctacggacagtgttgggtcttcgccggagtgttcaacacttttctccggtgtcttggaatccccgcccggatcgtgacaaattatttctctgcccatgacaatgatgctaatctccagatggatatatttctcgaagaagacgggaatgtcaactccaaactcactaaagattccgtctggaattatcattgttggaacgaagcctggatgacacgccctgatcttcctgttggattcggaggatggcaggccgttgattccacaccacaggaaaattccgatggaatgtacagatgtggacccgcatcggtgcaggccataaaacacggacatgtatgtttccagtttgatgccccattcgtcttcgctgaggttaattccgatcttatatacataacagccaaaaaggacggaacgcacgtggtcgaaaacgtcgatgccactcatatcgggaaattaattgtcactaaacagatcgggggggatgggatgatggatataacagatacttataaatttcaggaaggacaggaagaggaacgtctggcacttgaaacagccttaatgtatggagccaaaaaacccctgaacacagaaggggtgatgaaatctcgctcaaacgtggatatggattttgaagtggaaaatgcagtgttagggaaggattttaaactgtctatcacgtttcgaaacaactcccacaacagatatacaatcactgcttatctgagtgccaacatcactttttatacaggggtgcccaaggcagaatttaaaaaagaaacatttgacgtaactctcgagcccctcagttttaaaaaagaggcagtcctaattcaagccggggaatatatgggacagctcctcgaacaggcatccctgcacttcttcgtgactgctaggataaacgaaacaagagatgtacttgcgaaacagaaatctacagtgctgacaatccctgaaatcatcataaaagtgcgcggaacacaggtggtggggtctgacatgacagtaactgttcagttcacaaatcccctgaaagaaactttgagaaatgtgtgggtgcatttagatgggcctggagtgacacggcccatgaaaaaaatgttcagggaaatccgacctaactctactgtccagtgggaagaagtatgtcggccttgggtgtcaggacatcgtaaactcatcgcctctatgtcctctgactccttaaggcatgtatatggagaactagatgtccagatccagaggcggccctctatg

SEQ ID NO: 2162 - DNA, 2196 bp, Artificial Sequence
  derived and/or modified sequence
atgtcagagacatccaggaccgcattcgggggacggcgtgccgtgcctccaaataactcaaacgcagctgaggacgacctccccacagtcgaactgcaaggtgtggttcccaggggggtgaatctacaggagtttcttaatgtgacctccgtgcacctttttaaagaacgctgggataccaacaaggtagatcaccataccgacaagtacgagaataataagcttatcgtgagaagaggtcagagcttctatgttcagattgactttagccgaccgtatgatcccagaagagacctttttagagtggagtacgtgattggaaggtatccccaagaaaacaagggaacctatatccccgtgcctattgtgtccgagcttcagtccggaaagtggggagcaaaaatcgtgatgagggaggatcgttcagtgagactctccattcagagctcccccaaatgtatcgtcggaaaatttagaatgtacgtagctgtgtggaccccttacggagtgctccggacgtcaaggaacccagagacagacacatacattctgttcaacccatggtgcgaggacgacgcggtctatctcgacaacgaaaaggagcgcgaggaatacgtattaaatgacattggcgtgattttctatggcgaggtgaatgacataaaaacaaggtcttggtcttatggccaatttgaggatggtattttggatacctgcctgtacgtgatggatcgcgcacagatggatctgtccggacgcggtaatcctatcaaagtgtcacgggtcgggagtgccatggtcaatgctaaagatgatgagggtgtgctcgtgggctcttgggataatatctatgcgtatggtgttccgccgtccgcatggactggctcagtcgatatcttgttagagtaccggagctctgagaatcccgtccgctacggccagtgctgggtcttcgctggggtgttcaacacatttcttaggtgcctcgggatccccgcaaggattgttactaactacttttctgcgcatgacaacgacgctaacctccagatggacatctttttggaagaggatggcaatgttaattccaagctcaccaaggattcagtgtggaactaccattgttggaatgaggcatggatgacacggccagacctccccgtaggtttcggagggtggcaggcagtggactccaccccgcaggagaacagcgacggcatgtataggtgcgggcctgcctcggtccaagctatcaagcacggccatgtgtgttttcaattcgacgctccatttgtcttcgctgaggtaaatagtgatctcatttacatcacagccaaaaaggacggcacacacgtggtggaaaacgtcgacgccacgcacatcggtaaattgattgtcaccaaacaaatcggcggtgatggtatgatggacatcaccgatacctataaatttcaggagggccaggaggaagaaaggctggccctggagacggctctcatgtatggggcgaagaaacccctgaacacagagggggttatgaagtctcggtccaacgtcgatatggatttcgaagtcgagaatgccgtgctgggcaaagacttcaagctaagtattacattccggaacaacagtcataataggtacacgataaccgcatatttatcggctaatattacattctatactggggtgccaaaagccgagttcaagaaagaaaccttcgacgtgactctggagcccctatctttcaagaaggaagcagttctcattcaggctggagagtatatgggacaattacttgaacaggccagtttgcacttcttcgtaacagccaggataaatgagacccgtgacgtcctcgcaaagcaaaaatctaccgtcctgactatccccgaaattataataaaagttcgtggcactcaggtcgttggcagcgacatgacggtgacggtgcagtttaccaacccactgaaagagactttgcgcaatgtttgggtgcatctggacggacccggcgtgacacgccctatgaaaaagatgttcagggaaattcggcccaattcgaccgtgcaatgggaggaggtctgccgaccatgggtaagcggacatcgcaaactgatagcctctatgtcgtctgactcattgcggcacgtctatggcgagctagatgtacagatacagagacgcccaagtatg

SEQ ID NO: 2163 - DNA, 2196 bp, Artificial Sequence
  derived and/or modified sequence
atgtcagaaaccagccggaccgccttcggcgggcgccgcgctgtcccgccaaacaacagcaatgcagcggaggacgaccttccaactgtggaattgcagggagtggtgccgcgcggggtcaatttgcaggaatttctcaatgtcaccagcgtgcacctctttaaggaacgctgggataccaataaggttgaccatcataccgacaaatatgagaacaacaagctgattgtgagacgcggacagtccttctacgtgcagatcgattttagccggccttacgatccaagaagagatctgttccgcgtggagtacgtgatcggaaggtacccacaggaaaacaaaggaacttacatccctgtgccaattgtcagcgaactccagagcggcaaatggggcgcaaagattgtgatgcgggaggacaggtcggtccggctctccatccagagctccccgaaatgcatcgtgggcaagtttaggatgtacgtggcagtgtggaccccgtacggagtgctcagaacctcgcgcaaccccgaaaccgatacttacattttgttcaacccctggtgcgaggacgatgctgtgtacctcgataacgaaaaagagcgggaggaatacgtcctcaacgatattggcgtgatcttctacggagaagtgaatgatatcaaaactcgctcgtggtcatacggccagttcgaggacggaatcctcgacacctgtttgtacgtcatggacagagcccagatggacctctctggacggggtaaccctatcaaagtgtcgagggtgggatccgccatggtgaacgccaaagacgatgaaggggtgctggtgggatcgtgggacaacatctacgcctacggcgtgccaccgagcgcctggactgggtccgttgacatcctcctcgaataccgctcctcagaaaacccagttcggtatggtcagtgctgggtctttgcaggagtctttaacactttcctgcggtgcttgggcatcccggcgcggatcgtcaccaactacttctcggcgcacgacaatgacgcgaatctgcaaatggacatctttctggaagaagatggaaatgtgaactcgaagctgaccaaggactccgtgtggaattaccactgctggaacgaagcatggatgaccaggccggacctgcccgtgggctttggcggatggcaggcagtggactccaccccccaggaaaatagcgacggaatgtaccgatgcggccctgcgtcggtgcaggccatcaagcatggacacgtctgcttccaatttgatgcgccgttcgtgttcgctgaagtgaactcagatctgatctatatcaccgccaaaaaagacggaacgcacgtggtggaaaacgtggatgccactcatatcggtaaactcatcgtgaccaaacagatcggaggagacggcatgatggacatcactgatacttacaagttccaagagggacaagaagaggagcgcctggctctggaaaccgcgttgatgtacggcgcaaagaagccactgaatactgagggggtcatgaaaagccggtcgaatgtggacatggacttcgaggtggagaacgctgtcctgggcaaggatttcaaactctcgattaccttccgaaataactcccataatcggtacaccattaccgcgtacctgtcagccaacattaccttctacaccggagtgccgaaagcggaattcaaaaaggaaactttcgacgtcaccctcgagccgctttccttcaagaaagaagccgtgttgatccaggccggcgagtacatgggacaactgttggaacaggcatcgctgcacttcttcgtgaccgcccgtattaacgagactagagacgtgctcgccaaacagaagtcgactgtcctcactatcccggagatcatcatcaaggtgcggggcactcaagtggtgggttccgatatgaccgtcactgtccaattcaccaaccctctgaaggagacgctccgcaacgtgtgggttcacctggacggacccggtgtcactcggcccatgaagaaaatgtttcgcgagatcagaccgaatagcaccgtgcaatgggaagaagtgtgccgcccgtgggtcagcgggcaccgcaaactgattgcttcgatgtcgtccgactcgctccggcacgtctacggagaactcgacgtccaaattcagagacgcccgagcatg

SEQ ID NO: 2164 - DNA, 2196 bp, Artificial Sequence
  derived and/or modified sequence
atgagcgaaacgtcacgcaccgcatttggaggacggagagcagtgcccccgaacaactccaacgccgcagaagatgatcttccgaccgtggaacttcaaggtgtggtgcctagaggcgtcaacctccaagaattcctcaacgtcacttccgtccatctgtttaaagagagatgggataccaacaaggtagatcaccatactgataagtatgaaaacaacaagctcatcgttagacgcggacagtcattttacgtgcaaattgatttttcacgcccgtacgaccccagacgggatttgtttcgggtcgaatatgtcattggtcgctaccctcaagaaaacaagggaacctacatcccagtgccaatcgtgtcggagttgcagagtggtaagtggggagccaagatcgtgatgcgcgaagatcggtccgtcagactgtccattcagagctccccaaagtgcatcgtggggaagtttaggatgtacgttgcggtgtggaccccttacggggtgctgagaacgtcgagaaatccggaaaccgatacgtacattcttttcaatccgtggtgtgaagatgatgccgtgtacctcgataacgaaaaggaacgagaagagtacgtgctgaacgacatcggagtcatattctatggtgaggtcaatgacatcaagactcggtcctggagctacggtcagttcgaagatggaattctcgatacctgtctctacgtaatggatcgggcacaaatggacctttcggggcgcggaaaccctattaaggtttcccgtgttggctcggcaatggtgaatgcaaaggatgacgaaggtgtcctcgtaggaagctgggacaatatctacgcatacggggtgcccccctccgcttggaccggatcggtcgacattcttctggagtacaggtcaagtgagaatccagtccggtatggacaatgttgggtctttgccggggtgtttaacacttttctgcgctgtcttggcatacccgctcgtatagtgaccaactacttttcggcccacgataatgatgccaatctgcagatggacattttccttgaggaggacggcaacgtgaattcaaagctgactaaagactcagtttggaactaccattgctggaatgaagcatggatgactcgccctgaccttcctgttggctttgggggttggcaggcagtggattcgactccgcaggaaaacagcgatgggatgtacagatgtggaccggcatcggtccaagcgataaagcatggccatgtctgcttccaattcgatgcgccttttgtgttcgccgaggtcaactccgatcttatctacataaccgcaaaaaaggatggtactcacgtggtggaaaatgtggatgcgactcatattggtaaacttatagtgactaaacagattggtggggatggcatgatggatatcaccgacacgtacaagttccaggaaggtcaagaagaggaaagattggcactcgagactgcacttatgtacggagcgaagaaaccccttaacaccgaaggcgtgatgaaatcacggtcaaacgtcgacatggatttcgaggtcgaaaatgcggtgctgggaaaggactttaaactgagcattacctttcgcaataacagccataaccggtacaccatcactgcatacttgagcgctaacattacgttttacactggggtgccaaaggcagagttcaaaaaggaaacttttgacgtcaccctggaaccattgtccttcaagaaggaagccgtcctgatccaggccggcgagtacatggggcaacttcttgagcaagcaagcctgcacttttttgtgactgcacgcattaatgaaaccagggacgtgcttgcgaagcaaaaatcgaccgtcctcaccattcctgaaatcatcatcaaagtgcgtggaacccaggtggtgggatcagatatgaccgtgactgtgcagtttactaacccacttaaggaaaccctgcgcaacgtgtgggtacatcttgatggtccaggagtgacccgcccaatgaaaaagatgttccgtgagatacggcctaactcaaccgtgcaatgggaggaggtgtgtcgaccttgggtgtccggacatcgcaagctgatcgcatcgatgagcagcgactccctccgccacgtgtacggcgaacttgatgtccagattcaacgcagaccttcgatg

SEQ ID NO: 2165 - DNA, 2196 bp, Artificial Sequence
  derived and/or modified sequence
atgagtgaaacgtcccgcaccgcctttggaggcaggcgggcagtccctccaaacaattccaacgctgccgaggatgatttacctaccgttgaacttcagggcgtcgttcctcgaggagtaaatctgcaggaattcctgaacgtgacttccgtgcacctgtttaaagagcgctgggacacaaataaagtggaccatcacacagataagtatgagaataacaagctcatcgtgcgtagagggcagtcgttttatgtgcagatcgatttctcaagaccatacgaccctcggcgggacctatttagggttgagtacgttattggccggtatcctcaagagaataaagggacatacatccctgttccgatagttagcgaattgcagagcggaaagtggggcgcaaagattgttatgcgcgaggatagaagtgttcggttgagcatccagtcaagccccaagtgcattgttggaaaattccgtatgtacgtggcggtatggactccatatggagtgttgcgcaccagtcgcaatcccgagacagatacttacattctttttaacccctggtgtgaagacgatgcagtgtacttagacaatgaaaaggagcgcgaggagtatgtgctgaacgacatcggggtgatcttttacggcgaagtgaacgatattaagacccgctcatggtcctatggccagtttgaggacggcatcctggatacctgcctctacgtcatggacagggcacagatggatctgtctggacggggaaaccctataaaggtgtctcgcgtaggaagtgctatggtgaacgctaaggatgatgaaggtgtgttagtggggagctgggacaacatatacgcctatggcgtgccacctagtgcttggacaggctctgtggacatcctgctcgagtatcgatccagcgaaaatcctgttcggtacggtcaatgttgggtcttcgctggtgtgttcaatactttcctgagatgccttggtattcctgcacggatcgtgactaactatttttctgctcatgacaatgacgccaatttacagatggatatatttctcgaagaggacggaaacgtcaattctaaactcaccaaggactccgtgtggaattaccattgctggaacgaggcttggatgacacggcctgatctcccagtgggatttggcggctggcaagctgttgactctacgccccaggagaacagtgacggaatgtatcggtgtggacctgcatctgtgcaggctatcaagcatggccatgtgtgctttcaattcgacgcaccattcgtcttcgcagaggttaactcagacctgatttacattaccgctaaaaaagatggcacgcacgtcgtagagaatgtcgatgctactcatatcggcaaactgattgtgacgaagcagattggaggcgatggaatgatggacattacagacacctacaaatttcaggaagggcaggaagaggagaggctggccctcgagaccgcgctgatgtacggagctaaaaaacccctcaacaccgaaggagtaatgaagtcccggtccaatgtggatatggacttcgaggtcgagaatgccgtcctcgggaaagactttaagttgagtataactttcagaaataattcacataacaggtacacaattacagcatacctgagcgcaaatataaccttttacacgggcgtgccaaaggccgagttcaagaaggagaccttcgacgttactcttgaaccactttctttcaagaaggaagccgtcttgattcaggcaggtgaatacatgggacaactgctggaacaggcttctctacacttctttgtgaccgcacgaatcaacgagaccagggacgtgctggctaaacagaagagtactgtcctgactatccccgagattattatcaaagtccgggggacacaggtggttggcagcgatatgaccgtgaccgtccagttcactaatccattgaaggaaacactgcgtaatgtgtgggtgcatctggacggaccgggcgttacacgccctatgaaaaaaatgtttagagaaatcagacccaattccactgtgcagtgggaggaagtttgcagaccatgggtctccggacataggaaacttatagccagcatgtcatccgacagcctgcggcacgtatatggggagctggacgtacaaatacagcgccgtccaagcatg

SEQ ID NO: 2166 - DNA, 2196 bp, Artificial Sequence
  derived and/or modified sequence
atgtcagaaacaagtcggacagcttttggagggcggcgggctgtgccacccaataatagtaatgcggccgaagacgatctccccacagttgagctccagggagtggtacccaggggggtgaatctgcaggaatttctgaatgtgacaagtgtacacctatttaaagaacgttgggatactaataaagtagatcatcatactgacaaatatgaaaataataaattaattgttcggaggggacaatcattctatgttcagattgatttttccagaccctatgatccaaggcgggacctgtttagggttgaatacgtaatagggagatatccccaggaaaataaaggaacatacatcccagtgccaatagtatccgaattacagagtgggaaatggggagccaaaatcgtgatgagggaagataggtctgtcaggctctccatccaatcttcacccaaatgtatcgtgggaaagtttaggatgtatgtcgcagtctggactccatacggagtactccgcacaagtcggaatccagaaacagatacatacatactatttaatccttggtgcgaagatgatgccgtctatctggataacgaaaaggaacgggaggaatatgtactgaacgacatcggagtaattttttacggagaagtgaacgatattaaaacaaggtcttggagttatggacagtttgaagatggaatactagatacatgtctctacgttatggatcgtgcgcagatggatctcagtggacgggggaaccctataaaggtatcacgggtcggatccgcaatggtcaatgccaaagacgatgaaggggtattggtgggaagttgggacaacatctatgcttacggggtccctccctctgcatggactggatcagtggatatactccttgaatatcgaagttccgaaaaccctgtgcgctatggacagtgttgggtgtttgcaggggtctttaacacattcttgcgctgtctggggattcccgcaaggatagtgacaaactatttttccgcccacgataatgatgccaacttacagatggacatcttcctcgaagaagatgggaacgtgaatagtaaactaacaaaagatagtgtttggaattatcattgttggaacgaagcttggatgactcggcccgatctacctgtcgggtttggagggtggcaggccgttgatagtactccacaggaaaatagtgacgggatgtaccggtgtgggccagcctcagtgcaggctatcaagcacggacatgtttgcttccagtttgatgccccattcgtttttgccgaagtgaactctgatctgatctacatcactgccaagaaagatgggacacatgtagtggaaaatgtagatgcgactcatatcgggaaactcatagttacaaaacagatcggaggagatgggatgatggatataactgatacatacaagttccaagaggggcaggaagaagaaaggcttgccctcgaaactgccctaatgtatggagcaaaaaaacctctcaatactgaaggagttatgaagtcgagaagtaatgtagatatggattttgaagtcgaaaatgccgtgctggggaaagatttcaaacttagtatcacattccggaataactctcataatagatacacaatcacagcctatctcagtgcaaacataacattttatacaggagtacccaaagctgaattcaaaaaagagacgtttgatgtaactttagaacctctctcctttaaaaaagaggccgtgctcatacaggccggagaatacatgggacagctgctagaacaggcttccctacacttctttgtgacagccagaatcaatgaaacacgcgatgttctcgccaaacagaagtccacggtgcttactatacccgaaatcataatcaaagttcggggaactcaggtggtggggagtgatatgactgtgactgtgcagttcacaaacccacttaaagaaacactgcggaatgtttgggtgcatctcgatggacccggggtgactagacccatgaagaaaatgttccgcgaaatccgacccaatagtacagtgcagtgggaagaggtttgtaggccctgggtttccgggcatagaaaattaatcgcatcgatgtccagtgattctctgagacacgtttatggagaactagatgtgcagatccagaggagaccctctatg

SEQ ID NO: 2167 - DNA, 2196 bp, Artificial Sequence
  derived and/or modified sequence
atgagcgaaacctcacgcaccgcctttgggggacggagagcagtccctcctaacaattccaacgcagcagaggacgacctgccgactgtcgaactgcagggagtcgtgccacggggcgtgaaccttcaagaattccttaacgtcacttcagtgcatctgtttaaggagaggtgggatactaacaaggtggatcaccatactgacaagtacgaaaacaacaaactgattgtccgccgcggacagagcttttacgtgcaaatagatttttctaggccttacgatccacgaagagatctttttcgcgtggagtacgtcattggtagatatccccaggaaaacaagggaacttacatccccgtgccaattgtgtccgagcttcagagcggaaagtggggagctaagattgtcatgagggaagatagatccgtgaggctgtcgattcaatcgtcaccaaagtgcattgtggggaaattccgcatgtacgtggcagtctggaccccctacggcgtacttcgaacctcccgtaaccctgagacggacacctacattttgtttaatccttggtgtgaagatgacgccgtgtaccttgataacgaaaaagaacgggaagaatacgtgctcaatgatataggggtgattttctacggagaggtgaacgacattaagaccagatcctggtcttatggccaattcgaggatggtattcttgatacctgtctgtacgttatggatagggctcagatggatctgtcgggaagagggaacccaattaaggtgagccgcgtggggtccgctatggtgaacgcaaaggatgatgaaggagtgctcgtgggatcctgggacaatatctatgcatacggagtgcccccttcggcctggactgggagcgtcgatatactgcttgaatacagatcgtcggaaaaccccgtgcggtacggacaatgctgggtctttgcaggcgttttcaatactttcctgcgttgtttgggaattcctgcgcggatagtgaccaattacttctcggcacacgataacgatgcaaaccttcaaatggacatcttcctcgaagaggatggaaacgtcaactcaaagctgaccaaggattcggtctggaactaccactgttggaacgaggcttggatgacccgccccgacctgcctgtgggatttggggggtggcaagcagtcgattccaccccccaagaaaatagcgatggtatgtaccgttgtggacctgcctcggtgcaagccattaagcatggacacgtgtgttttcagtttgatgcacccttcgtgtttgctgaggtcaacagcgatctgatttacattaccgctaagaaagacggaactcacgtggtcgaaaacgtggatgcaacccatataggaaaacttattgtcaccaaacaaattggcggagatgggatgatggacattactgatacctacaagtttcaggaaggtcaagaggaggagaggctcgcactggaaacggcacttatgtatggtgccaaaaagccactcaataccgagggggtgatgaagtcgcgctcaaacgtggacatggattttgaagtggaaaatgccgtgctgggcaaggactttaaactttcaatcaccttccgtaacaattcacataataggtacactatcacggcgtacctgtcggccaacattactttttacactggggtgcccaaggcagagttcaagaaggagacgttcgatgtgactctcgaacctctgtcctttaagaaggaagccgtgctgattcaagcaggagaatacatgggtcagctgctggaacaagcctcgcttcatttctttgtgaccgcacggataaatgaaacccgcgatgtgttggcaaagcaaaagtcaaccgttcttactattccagagattatcattaaagtgcggggtactcaagtcgtgggttccgatatgaccgttactgtgcaattcaccaatccgcttaaggagactctgaggaatgtgtgggtgcatctcgacggaccaggggtgaccaggccaatgaaaaagatgttcagagaaattaggcccaatagcactgtgcagtgggaagaagtgtgtcggccctgggtgtctggccatagaaaactgattgcatcgatgtcgtcggattcgctgaggcatgtctacggtgaactcgatgtgcaaatccaacggcgcccaagcatg

SEQ ID NO: 2168 - DNA, 2196 bp, Artificial Sequence
  derived and/or modified sequence
atgtcggaaacgtcgcgaacggcgtttggtggtcgtcgtgcggtaccgccgaataattcgaatgcggcggaagatgatctaccgacggtagaattacaaggtgtagttccgcgaggtgttaatttacaagaatttttaaatgtaacgtcggttcatttatttaaagaacgttgggatacgaataaagttgatcatcatacggataaatatgaaaataataaactaatagttcgtcgaggtcaatcgttttatgtacaaatagatttttcgcgaccgtatgatccgcgtcgagatctatttcgtgttgaatatgttataggtcgttatccgcaagaaaataaaggtacgtatataccggtaccgatagtttcggaattacaatcgggtaaatggggtgcgaaaatagtaatgcgtgaagatcgatcggtacgattatcgatacaatcgtcgccgaaatgtatagtaggtaaatttcgaatgtatgttgcggtttggacgccgtatggtgtactacgaacgtcgcgtaatccggaaacggatacgtatatattatttaatccgtggtgtgaagatgatgcggtttatctagataatgaaaaagaacgtgaagaatatgttttaaatgatataggtgtaatattttatggtgaagttaatgatataaaaacgcgatcgtggtcgtatggtcaatttgaagatggtatactagatacgtgtctatatgtaatggatcgtgcgcaaatggatctatcgggtcgtggtaatccgataaaagtatcgcgagttggttcggcgatggtaaatgcgaaagatgatgaaggtgttttagttggttcgtgggataatatatatgcgtatggtgtaccgccgtcggcgtggacgggttcggttgatatattactagaatatcgatcgtcggaaaatccggtacgatatggtcaatgttgggtttttgcgggtgtatttaatacgtttctacgttgtttaggtataccggcgcgtatagttacgaattatttttcggcgcatgataatgatgcgaatttacaaatggatatatttttagaagaagatggtaatgttaattcgaaattaacgaaagattcggtttggaattatcattgttggaatgaagcgtggatgacgcgaccggatctaccggttggttttggtggttggcaagcggttgattcgacgccgcaagaaaattcggatggtatgtatcgttgtggtccggcgtcggttcaagcgataaaacatggtcatgtttgttttcaatttgatgcgccgtttgtttttgcggaagtaaattcggatttaatatatataacggcgaaaaaagatggtacgcatgtagttgaaaatgtagatgcgacgcatataggtaaattaatagtaacgaaacaaataggtggtgatggtatgatggatataacggatacgtataaatttcaagaaggtcaagaagaagaacgtttagcgctagaaacggcgttaatgtatggtgcgaaaaaaccgttaaatacggaaggtgtaatgaaatcgcgttcgaatgtagatatggattttgaagtagaaaatgcggtattaggtaaagattttaaactatcgataacgtttcgtaataattcgcataatcgatatacgataacggcgtatttatcggcgaatataacgttttatacgggtgttccgaaagcggaatttaaaaaagaaacgtttgatgttacgttagaaccgttatcgtttaaaaaagaagcggttttaatacaagcgggtgaatatatgggtcaattattagaacaagcgtcgttacatttttttgttacggcgcgtataaatgaaacgcgagatgtattagcgaaacaaaaatcgacggttttaacgataccggaaataataataaaagttcgtggtacgcaagtagttggttcggatatgacggttacggttcaatttacgaatccgctaaaagaaacgttacgtaatgtatgggttcatctagatggtccgggtgttacgcgtccgatgaaaaaaatgtttcgtgaaatacgaccgaattcgacggtacaatgggaagaagtttgtcgtccgtgggtttcgggtcatcgtaaactaatagcgtcgatgtcgtcggattcgttacgtcatgtatatggtgaattagatgttcaaatacaacgtcgaccgtcgatg

SEQ ID NO: 2169 - DNA, 2196 bp, Artificial Sequence
  derived and/or modified sequence
atgtctgagacctccagaaccgcgttcggaggtaggagagctgtgcctccgaataatagtaacgctgccgaggatgatcttccgaccgttgagttgcagggggtagtccctcggggtgtgaatttacaggagtttctcaatgttacttcagttcatctctttaaggaaaggtgggacacaaataaggtggaccaccacaccgataaatatgagaataacaagttaatagtcagacgagggcaatccttctacgtccaaatcgatttctctagaccatatgatccaaggagggatctttttagagttgaatatgttattggtaggtatcctcaagaaaacaagggtacttacatcccggttcctattgtttcggagttgcagtcggggaaatggggtgctaaaattgttatgagagaggatagatccgtccgactgtccattcagtcatctcctaagtgcattgtgggcaagttccgcatgtatgtggctgtctggacaccttatggagttttgagaacctctagaaacccggagacagatacttacattctatttaatccttggtgcgaggacgatgctgtttacttagataatgagaaagaaagagaggaatatgttctaaacgacattggggttattttttatggcgaggtcaatgatattaagactcgttcatggagctacggtcagtttgaagatggtatacttgatacatgtttatacgtgatggaccgagctcaaatggatttaagtggaaggggtaatcccatcaaggtgtccagggtgggctctgcaatggttaacgctaaagatgatgaaggagtgttggtcggatcttgggataacatatatgcttatggtgtgcctccaagcgcatggacaggaagtgttgatatcttacttgagtataggtcctctgagaatcctgttaggtacggtcaatgttgggtgttcgccggagtcttcaacacttttttgagatgtctcggaatcccggcccggatcgttaccaactattttagcgcacacgataatgatgcaaacctccagatggacatatttttggaggaagacggaaacgttaactcgaaacttactaaagattcagtatggaattatcattgctggaatgaggcttggatgactaggcctgatttgccagtcggtttcggcggctggcaagctgtagattccacaccgcaagagaacagtgacggaatgtaccgatgcggtcctgccagcgttcaagcaattaagcatgggcacgtgtgtttccagtttgacgctcctttcgttttcgcggaggtcaatagcgatctgatttacattacagccaaaaaggatggaactcatgttgtggagaacgtcgacgctactcatattggaaaactgatcgtaactaaacagataggtggtgatggtatgatggatatcaccgacacatacaagttccaagagggacaggaggaagaacggcttgctcttgagactgcacttatgtatggggccaaaaaaccactgaacactgagggagttatgaagagtcggtcgaacgtggatatggactttgaggttgagaatgccgttttgggtaaagatttcaagcttagtattactttccgtaataattctcataacagatatacgatcactgcttatctttctgccaatataaccttttatactggagtgccaaaggcagagttcaagaaagaaacgtttgatgtgactctggagcccctgtcttttaaaaaggaggccgttctaatccaggctggtgaatatatgggtcagcttttggaacaagcaagtttgcatttcttcgtcaccgctcgcattaatgagacccgggatgttctggctaagcaaaagagtacagtccttacaattcctgaaatcatcatcaaggtgagaggtacacaagtcgtgggttctgacatgaccgtgacagttcagttcactaatccattaaaggagaccttgaggaacgtttgggtgcacctggatggaccgggtgtcacaaggccgatgaaaaaaatgtttagagaaattagacctaatagtaccgtccaatgggaggaagtttgccggccttgggtctccggacatcgtaagcttattgccagcatgtccagtgactcgttaaggcacgtctatggtgagcttgatgttcagattcagaggagaccttcgatg

SEQ ID NO: 2170 - DNA, 2196 bp, Artificial Sequence
  derived and/or modified sequence
atgtccgaaacttcaaggaccgcattcggtggccgcagagcagtcccccctaacaactccaacgccgcggaggacgatctcccaaccgtggagttgcaaggagtcgtgccaagaggcgtgaatttgcaagaatttctgaacgtgacgtccgtgcacctcttcaaggaacgctgggacaccaacaaggtggaccaccatactgacaagtacgagaataacaaattgattgtgcgccggggacagtcattttacgtccaaatcgacttctctaggccgtacgatccgcggagagatctgtttcgggtggaatatgtgatcggacgctaccctcaagagaacaaaggaacctacatcccggtgccgatcgtttcggagctgcagagcggaaagtggggggcaaagatcgtgatgcgcgaggaccgcagcgtgcggctttcgatccagtcgtccccgaagtgtatcgtgggaaagttccgcatgtacgtggcagtgtggaccccgtacggagttctgcggactagcagaaatcccgaaactgacacctacattctcttcaatccgtggtgtgaggacgatgccgtgtacctcgacaatgagaaggagagagaggagtacgtgttgaacgatatcggggtgatcttttacggcgaggtcaacgacatcaaaacgcgctcctggtcctacgggcaatttgaggacggtatcctggacacgtgtctgtacgtgatggaccgggctcagatggacctctcgggcagaggaaaccctatcaaggtgtcacgcgtgggatcggctatggtgaatgcaaaggacgatgagggggtcctcgtggggtcctgggataacatttatgcctacggagtgccgccttccgcctggacgggtagcgtcgatatcctcctggagtaccggtcctctgagaatccagtgcgatacggacaatgttgggtctttgccggagtgttcaacacgttcctgcgctgcctgggcatcccggcccgaatcgtgaccaattacttctccgcacacgataatgatgcgaatcttcaaatggacattttcttggaagaggacggaaatgtcaactccaagctcacgaaagactcggtctggaattaccactgctggaacgaagcatggatgactcggcctgatctccccgtgggcttcggaggatggcaagccgtggatagcaccccacaagaaaacagcgatggaatgtaccgctgcggcccagctagcgtccaagccatcaagcacgggcatgtgtgcttccagttcgacgcgccgtttgtctttgctgaggtcaattccgaccttatctatatcactgcgaagaaggacggaactcatgtcgtcgagaacgtggatgccacccatatcggcaagctcatcgtgactaagcagatcggaggagacggcatgatggacattaccgatacttacaaatttcaagaaggacaagaggaagagcgcttggcccttgaaaccgcgctgatgtacggcgccaaaaagccactgaacactgaaggagtcatgaaatcccggtccaatgtggatatggattttgaagtcgaaaacgcggtcctcggaaaggactttaagctgtccatcactttccgtaacaatagccacaatcgctatactatcacggcttacctgtcggctaacatcaccttctacaccggggtccccaaagccgaattcaaaaaggaaaccttcgatgtgactctggagcctctgtcattcaagaaggaagccgtgctgatccaggctggcgaatacatgggccagctgcttgagcaggcgtccctgcatttcttcgtgacggcccgcatcaacgaaacccgggacgtgctcgccaaacagaagtccactgtcctcactatcccagagatcatcatcaaggtccgggggactcaggtggttggtagcgacatgacggtgaccgtccagtttaccaatcccctcaaagaaacccttaggaacgtctgggtgcatctcgatggcccaggggtgacccgcccgatgaagaaaatgttccgcgagatccggccaaactcaactgttcaatgggaagaagtgtgccggccgtgggtgtcaggacaccggaagctgatcgcctcaatgtcctcagacagcctccgccacgtctacggcgagctggatgtccagatccagagacgtccatcgatg

SEQ ID NO: 2171 - DNA, 2196 bp, Artificial Sequence
  derived and/or modified sequence
atgtcggaaacctcccggactgcttttgggggtcgacgcgcagtcccgccgaacaactcgaatgccgccgaggatgacctcccaaccgtcgaacttcagggagtggtccctagaggagtgaacctgcaggaattcctcaacgtcacttcagtgcaccttttcaaggaaaggtgggacacgaataaggttgatcaccacaccgataaatacgaaaacaataagctcatagtccggcggggtcaatcgttctacgtgcagatcgacttcagccgcccgtacgatccgcggcgcgatctgttccgcgtggaatacgtgatcggacggtacccgcaggagaataagggcacctacattccggtgccaatcgtgtccgagttgcagtcagggaagtggggagctaagatcgtgatgagagaagatcggagcgtccggctcagcatccagtcgtcccctaagtgcatcgtgggcaagttcaggatgtacgtggctgtgtggacgccctacggcgtacttaggacgtccaggaatccggaaactgatacctacatcctgttcaacccgtggtgcgaagacgatgcagtgtacctggataacgaaaaagaacgcgaagagtacgtgctgaatgatatcggcgtgatcttctacggagaagtgaacgatatcaagaccaggtcctggagctacggacagttcgaagacggaatcttggatacttgtctgtacgtgatggatcgcgcccagatggacttgtcgggaagaggaaacccgatcaaggtgtcccgggtcggatcggccatggtgaatgccaaggacgatgagggagtcctggtgggctcgtgggataacatctacgcttacggagtgcccccaagtgcgtggaccggaagcgtggacatcctgctcgaatatcggagctcagagaatccggtcagatacggacaatgctgggtgttcgctggtgtgtttaacacttttctccgctgcctgggaattccagcccggatcgtgaccaattacttctcagcccatgataacgacgccaatctgcagatggacatcttcctcgaagaagacggaaacgtcaactcgaagctgactaaagattcagtgtggaactaccactgctggaatgaggcctggatgacccgtcccgacctgccggtcggcttcggaggatggcaagcggtggattccaccccacaggagaactccgatggcatgtaccggtgcggcccagccagcgtgcaagccatcaagcatggacatgtctgcttccaatttgatgctccatttgtattcgcggaagtcaacagcgacctgatctacataaccgcgaaaaaggacggaacgcacgttgtggagaacgtggacgcgacgcacatcggaaagctcatcgtcaccaagcagatcggaggtgatgggatgatggacattaccgacacgtataagttccaggaaggccaagaggaggaacgcctggccctcgaaaccgcactcatgtacggggccaaaaagccactgaacacggagggagtgatgaaatcgaggtcaaacgtcgacatggacttcgaagttgagaacgcagtgctgggaaaggatttcaagctgtccatcacctttaggaataattcccataataggtacaccatcaccgcctacctgtccgccaacatcaccttctacaccggagtgcccaaagccgagttcaagaaggaaacttttgatgttactctcgaaccactctcctttaagaaagaagccgttctcatccaggccggtgaatacatgggccaactcctggagcaagcatctctgcacttctttgtcaccgcgaggatcaacgaaaccagagacgtgctggcgaagcagaaatcaactgtgttgaccattccggagattatcatcaaggtgcggggaacccaggtggtcggaagcgacatgaccgtgaccgtgcagtttaccaaccctctcaaggaaactttgcgcaacgtgtgggtccatctggatggtcccggcgtgacccgccctatgaaaaagatgttccgggaaatcaggccgaactctactgttcagtgggaagaagtgtgtcgaccatgggtttccggacaccgcaagctgatcgcaagcatgtcatccgactcgctcagacacgtgtacggagagctcgatgtgcagatccaaagacggccgagcatg

SEQ ID NO: 2172 - DNA, 2196 bp, Artificial Sequence
  derived and/or modified sequence
atgtccgaaacctcccggactgcctttggtggaaggcgggcggtgcctccgaacaactcgaacgctgccgaagatgatctgcctactgtcgagctgcagggagtggtacccagaggggtcaacctccaagagtttcttaacgtgacgagcgtgcatctgtttaaggaacgctgggataccaataaggtcgatcatcatactgacaaatacgagaacaacaaactgattgtgcggcgagggcaatcattctacgtccaaatagatttctcgcggccctacgaccctagacgggatctgtttcgagtggaatacgttattggcaggtacccccaggaaaacaagggtacttacattcctgtgcctatagtgtccgaactccaaagcggaaagtggggtgcaaagattgtgatgcgcgaggatcgttcggtgagactctcaatccagtcctcccctaagtgtatcgtcggaaagtttcggatgtacgtggcagtgtggaccccctacggggtccttcgaacctcaaggaaccccgaaactgatacttacattctcttcaatccatggtgcgaggacgatgcagtgtacctggacaatgaaaaggaaagagaagagtacgtgctgaacgatattggagtgatcttttacggtgaggtgaatgatatcaagacgagatcctggtcgtacggacaattcgaggatggaattcttgatacctgtctttacgtgatggaccgcgctcaaatggatctcagcggtcgaggcaaccctatcaaggtgtcgcgggtgggaagcgccatggtgaacgcaaaggacgatgaaggagtgctggtcggttcgtgggacaatatctacgcatacggcgtccctccctccgcctggaccggttcagtcgacatcctgcttgaataccgcagctccgaaaatcccgtgcggtacggacagtgttgggtgtttgcaggggtgttcaatactttcctccgttgtctgggaattcctgccagaattgtgaccaactacttttcagcacatgataatgacgcaaaccttcaaatggatatctttctggaagaggacggaaacgtgaattccaagctcaccaaggattcggtgtggaattaccattgctggaatgaggcatggatgactcgcccagatctccctgtcgggtttggtggttggcaagccgtggacagcacgccccaggagaatagtgacgggatgtaccgctgtggaccagcgtcggtgcaagcgataaaacacggacatgtgtgttttcagtttgatgcaccctttgtctttgccgaagtgaactcggatctgatttacattacggcaaaaaaggatggtactcatgtggtggaaaacgtggatgccacccatatcgggaagctcattgtgaccaaacaaattggaggcgacggtatgatggacatcaccgacacttacaagttccaggaaggtcaagaagaagaaagacttgcgcttgaaaccgcacttatgtacggagcaaaaaagcctctgaacactgagggcgtgatgaagagcagatccaacgtcgatatggattttgaagtggaaaatgcggtgctgggcaaagactttaagttgtcgattacctttcgcaacaatagccacaaccgctacactattactgcctacctctccgccaatatcactttttacactggagtccctaaagcagaattcaagaaagaaacttttgacgtgacgcttgaacccctgtcattcaaaaaggaggcagtcctcatacaggccggagaatacatgggacaattgcttgaacaggcatcgctccatttcttcgtgaccgccaggattaatgaaaccagagatgtcctggccaagcagaagagcaccgtgcttaccatccccgagatcatcattaaggtccgggggacccaagtcgtcggttccgacatgaccgtgacggtgcagttcacgaaccctttgaaggagactcttcggaacgtctgggtccacctggatggtccgggggtgactcggcctatgaaaaagatgtttagagagatccggcctaatagcactgtccagtgggaggaagtgtgccggccatgggtgagcggacatcgtaaacttatcgcctcaatgtcgagcgattccctgcgacatgtgtacggagagcttgacgtccagatacagcgtagacccagcatg

SEQ ID NO: 2173 - DNA, 2196 bp, Artificial Sequence
  derived and/or modified sequence
atgagcgagactagccgcacggcattcggcggccggcgggcagtccccccgaataatagcaatgccgccgaggacgacctgccaaccgtggagctgcagggcgtagtgcctcgcggagtgaatctccaggaattccttaacgttacgagtgtacacctgttcaaggagaggtgggatacaaacaaggtggaccatcacacagacaagtatgagaacaataagctgatagtacgccggggccaaagcttctatgtgcagatcgatttcagcaggccttatgatccccgccgcgacctgttcagggtagagtacgtcatcgggcgctatcctcaagaaaataaaggaacatatatccccgtgcccatcgtgagcgagctgcagtccggcaagtggggcgctaagatcgtgatgagagaggacagatccgtccgactctctatacaatctagcccaaagtgtatcgtgggcaagtttagaatgtacgtggcagtatggacaccatatggtgttctgcggacctcccgcaatcccgagacagacacctatattttgttcaacccgtggtgcgaggatgatgctgtttatctcgacaatgagaaggaaagggaagaatacgtcttgaatgacatcggggtgatcttttacggcgaggtaaacgacatcaagaccagatcttggtcctatgggcaatttgaggacggaattcttgacacatgtctgtacgtgatggaccgggcacagatggatctgtccggtaggggaaatccaatcaaagtctcccgggtgggctctgcaatggtgaacgccaaagacgacgagggcgtgcttgtcgggtcttgggacaacatttacgcgtatggtgtgcccccttctgcttggactggctccgttgacattctgctggaatatagaagctctgagaaccccgtgaggtacggacagtgttgggtgttcgccggggtgtttaacactttcttgcggtgtctgggtatcccggctcgaatcgtaactaactacttcagcgcccacgataacgacgctaacctccagatggatattttcttggaagaggacggcaatgtaaattccaaactgaccaaggatagcgtgtggaactatcactgttggaacgaagcctggatgactcggcccgacctgcccgtaggatttggcggctggcaggctgttgactccaccccgcaggagaacagtgacgggatgtaccggtgtggcccagcttctgtacaggccattaagcatggccacgtttgtttccagttcgacgcaccgtttgtgtttgcagaagtgaatagcgacctcatatacattacagcgaagaaggatggcacccatgtagtggagaacgtggacgcaactcatatcggtaaattgatcgtgaccaaacagatcggcggtgacggcatgatggatattacagacacctacaagtttcaggaggggcaagaggaagaacggctggccctcgagaccgcactgatgtatggggcaaaaaaaccgctgaacacagaaggggtgatgaaatctagatcaaacgtcgacatggattttgaagtggagaacgctgtgctggggaaggacttcaaacttagcatcaccttccgaaataattcccacaacagatatactataaccgcgtatcttagcgccaacatcaccttttacaccggagtaccgaaagcagagtttaaaaaagaaacattcgacgtaactctcgaaccgctgagttttaagaaagaggccgtccttattcaggccggtgaatacatgggccagctcctggagcaggcttccctgcacttttttgtgaccgccaggataaacgagacccgggatgttctcgctaagcagaagagtacagtgttgaccatcccggagatcattataaaggtcaggggaacgcaggttgtggggtccgatatgacggtgaccgtgcagtttaccaatcctcttaaagagacgctgagaaatgtctgggtacacttggacgggcccggggtgacacggcccatgaaaaagatgtttcgagaaataaggccgaattctactgtccagtgggaagaggtctgcagaccttgggtatctggccatagaaagttgatcgcctccatgtcttccgattccctgagacacgtgtatggagagctcgatgtgcagattcaacgaagaccatccatg

SEQ ID NO: 2174 - DNA, 2196 bp, Artificial Sequence
  derived and/or modified sequence
atgtcagaaacttcccgaactgcctttggagggagaagggccgtgcctcccaacaattcgaacgccgccgaagatgatctcccgactgtcgagctccaaggagtggtgcctcggggtgtgaaccttcaggaatttcttaacgtgaccagcgtccatctctttaaggagaggtgggacaccaacaaggtggatcaccacactgataagtacgaaaacaacaagttgatcgtgcgccgtgggcaatctttctatgtgcagattgatttttcccgcccttacgatccacgcagagatctgtttagggtggagtacgtgatcggaaggtacccccaagagaataagggaacttacatacctgtgcctattgtgtccgaacttcagtcggggaagtggggtgctaagattgtcatgcgagaggataggtctgtgaggctctcaatccaaagctcgccgaagtgtatcgtcggaaaattcagaatgtacgtggccgtttggactccctacggagtcctgcggacctcgagaaaccctgaaaccgatacctatatcttgtttaatccttggtgtgaggacgatgccgtctaccttgataacgaaaaagaacgggaagagtacgtgcttaacgatattggtgtgattttctacggtgaggtcaacgacattaagacgagatcgtggtcatacggtcaatttgaagatggtatcctggatacctgcctctacgtcatggacagagcgcaaatggacctgtcggggagaggtaaccccatcaaggtatctagggtcggcagcgcaatggtcaatgctaaagacgacgaaggtgtgctggtggggtcctgggacaacatttacgcatacggagtgccgcccagcgcatggaccggatcagtcgacatcctcctggaatacaggtcgagcgagaaccctgtgcggtacggtcagtgctgggtctttgcaggagtgtttaacaccttcctgagatgcctgggaattcctgcaagaattgtgactaactacttttcagcacatgacaatgacgcaaaccttcagatggacatctttttggaggaagatggaaatgtgaatagcaaacttaccaaggattccgtctggaactaccattgttggaacgaggcctggatgacccggcccgatctccctgtcggatttggtggatggcaggccgtggattccaccccgcaggagaactcagatggtatgtaccgttgtggacctgcatcggtgcaggcaatcaagcacggacacgtgtgctttcaatttgatgccccttttgtgttcgcggaggtgaacagtgatctgatttacatcaccgcgaaaaaggatggtacccacgttgtggaaaacgtcgatgccacccacattggaaagctcatcgtgacgaaacaaattgggggagacggcatgatggatatcactgatacttataagtttcaggaaggccaggaagaagagcgtctggcgctcgaaactgcgctgatgtacggcgcgaaaaagccattgaacacggaaggcgtcatgaagtcgcgctccaacgtggacatggactttgaggtggagaatgctgtgctggggaaggactttaaacttagcatcacgtttcggaacaactcccataaccgctacaccataacggcatacctgtcggcaaacataaccttttacaccggagtgcctaaggccgagtttaagaaggaaactttcgacgtgactcttgaacccctgagcttcaagaaagaagcggtgctgattcaagcaggagaatacatggggcaactgctggaacaggcatcgctgcatttctttgtcactgcccgcattaacgaaaccagggacgtcctcgcgaagcaaaagagcactgtcctcacgattcctgaaatcataatcaaagtccggggcacccaagtggtgggaagcgacatgaccgtgactgtgcaattcactaaccctctgaaggagacgctgcggaatgtgtgggtacatctggatggtcctggtgtgactagacccatgaagaaaatgtttcgtgagatccgaccaaattccaccgtgcaatgggaggaagtctgcaggccatgggtgtcgggacataggaagctcattgcatcaatgtcatcggactcccttcgccacgtgtacggtgagcttgatgtgcaaattcagagacggcccagcatg

SEQ ID NO: 2175 - DNA, 2196 bp, Artificial Sequence
  derived and/or modified sequence
atgagcgaaacttcgcggactgcgttcgggggaaggcgagcagttcctccaaacaacagcaatgcggctgaggacgatctgcctaccgtggaactgcagggagtggtgcctcgaggcgtgaatctgcaggaattcctcaacgtgacttcagtccacctcttcaaggagcggtgggacactaacaaggtggaccatcataccgataagtacgagaacaataagctgatcgtcaggcgggggcagtccttttacgtccaaatcgatttctcccgcccgtacgacccaagaagagacttgttcagagtggaatacgtgatcggccgctacccacaagaaaacaagggcacctacatacccgtgcctattgtcagcgagctgcagtccggaaagtggggagccaagattgtcatgagggaggatcggtcagtgcggctcagtatccagtcatcaccaaagtgcattgtcggaaagttcagaatgtacgtggctgtgtggaccccgtacggagtgctgcggacttccagaaacccagagactgatacctacatcctcttcaacccatggtgtgaggatgacgcggtgtacctcgataacgagaaggaacgcgaagaatacgtcctcaatgacatcggagtgattttctacggagaggtgaacgatatcaagacccgctcttggtcatatggacagttcgaagatggaatcctggacacttgcctgtatgtaatggaccgcgcgcaaatggacctgagcggccggggaaaccctatcaaagtctcaagagtcggttccgccatggtcaacgcaaaggatgacgaaggcgtgctcgtcggatcctgggataacatctacgcctacggagtccccccatccgcgtggacgggatctgtggatatccttctggaataccggtcctcggaaaacccggtgcgatacgggcagtgttgggtgttcgcaggggtgttcaacaccttcttgcgctgcctcggaatcccggcacggatcgtgaccaattacttctcagcccatgacaatgacgcgaatctccagatggacatcttcctggaggaagatggaaatgtcaactccaagctcacgaaggacagcgtgtggaattaccattgctggaacgaggcgtggatgactcggccggacctcccggtgggatttggcggatggcaggctgtggattcgaccccacaggagaatagcgacgggatgtatcgctgcggaccggcgtcggtccaagctatcaaacatggacacgtgtgtttccaattcgatgcgccatttgtgtttgccgaagtgaacagcgacctgatctacatcaccgcgaaaaaggatggaacccatgtcgtcgaaaacgtggatgccacccacatcggcaagctgatcgttaccaagcagataggaggagatgggatgatggatatcactgacacctacaaattccaagaaggacaggaagaggagcgccttgctctggaaacggctcttatgtatggagccaaaaagcccctgaacaccgaaggagtcatgaagtcgaggtcgaacgtggacatggattttgaagttgaaaacgccgtcctgggcaaagacttcaagctgtcgatcactttcagaaacaacagccacaatagatacaccattaccgcatacctgagtgccaatatcacgttttacactggcgtgccgaaggcagagtttaagaaggaaaccttcgacgtcaccctggagcccctgtcattcaagaaggaggcggtgctgattcaggctggagagtacatgggacaactcctcgagcaggcaagcctgcacttcttcgtgaccgcaagaatcaacgagactcgcgatgtgctggcaaaacagaaatcgaccgtcctgactatccctgagatcatcatcaaggtgagaggaacccaggtggtcggatcggatatgacggtgactgtgcaatttaccaacccgctgaaagagactcttcgcaacgtgtgggttcatctggacggtccgggcgtgactagaccgatgaaaaagatgttccgcgaaatccgcccgaacagcaccgtgcagtgggaagaagtgtgccgcccttgggtcagtggccatcgcaagctcatcgcgtccatgtcatccgactccctgcggcatgtctacggagagctggatgtccaaatccagcgccggccttcgatg

SEQ ID NO: 2176 - DNA, 2196 bp, Artificial Sequence
  derived and/or modified sequence
atgagcgaaacctcgcgcactgcatttggaggaagaagggcggtgccaccgaacaattcaaacgccgcggaagatgacctgcctaccgtggaactccagggagtcgtgccacggggggtcaacctgcaggagtttctgaacgtgacctcagtccacctgttcaaggagcggtgggacactaacaaggtcgaccaccatactgacaagtacgaaaacaataagctgatcgtgagacgggggcagtctttttacgtgcagatcgatttcagcaggccatacgacccgagacgcgatctgttccgcgtcgagtatgtcatcggaagatacccgcaagaaaacaagggaacctatatccctgtgccaattgtgagcgaactgcaatcgggaaagtggggagccaaaatcgttatgagagaggaccgctcggtccgcttgagcatccaatcctcccctaaatgtatcgtcgggaagttcagaatgtacgttgcggtctggactccgtacggtgtcctgagaacgtccagaaatccggagactgacacgtacatccttttcaacccttggtgcgaagatgacgcagtgtacctggataacgaaaaggaacgcgaggagtacgttctgaacgatatcggtgtgattttctacggagaagtgaatgacattaagactcgctcatggtcctacggacaattcgaagatggcatcctggatacctgtctctacgtcatggatcgcgcacagatggacctgtcggggagaggaaacccgattaaagtgtcacgcgtgggctccgctatggtcaatgcaaaagatgatgagggagttctggtgggctcctgggacaacatctacgcctacggcgtcccgccttcggcttggaccggctccgtggacattctgctggaataccgcagcagcgaaaatccagtgagatatggacagtgttgggtgtttgcgggagtgttcaataccttcctgcggtgtctgggtatccctgcacggattgtgactaactacttttcggcccatgataatgacgccaacctccagatggacatcttcctcgaggaggacggaaatgtgaactcaaaactcactaaggactcggtctggaactaccactgctggaacgaggcgtggatgacccggccagacttgcctgtgggattcggaggctggcaggccgtggactccactccacaagagaattccgacgggatgtaccgctgtggaccggcatcagtgcaggctattaagcatgggcacgtgtgcttccagttcgatgcgccgtttgtgttcgcagaagtcaattctgacctcatctatatcaccgcaaagaaagacgggacgcacgtggtagagaacgtggacgcaactcatatcggaaaactcatcgtgaccaagcagatcggaggggacggtatgatggatatcaccgacacttacaagttccaggaaggacaggaagaggaacgacttgcactcgagactgccctgatgtacggtgctaaaaagccactgaataccgagggggtcatgaagtcccgcagcaatgtggacatggattttgaggtggagaacgccgtgctcggcaaggatttcaagctctcaattactttccggaataactctcacaacagatacaccatcaccgcgtacctttcagccaacatcaccttctacactggagtgccgaaggctgagttcaaaaaagagacgttcgacgtaacccttgaaccactgagcttcaagaaggaagcggtgcttatacaggcgggggaatacatgggtcaattgctggagcaagcctcgttgcacttctttgtcacggcacgcattaacgaaacccgcgatgtgctggccaaacaaaaaagcaccgtgctgaccattccagagatcatcattaaagtgagaggcactcaggtggtgggatcagacatgaccgttacggtccaatttactaacccactgaaagaaaccctgcgcaacgtgtgggtgcacctggacggacccggagtgacccggccgatgaagaaaatgttcagggaaatccgcccaaactccactgtccaatgggaggaagtgtgccggccatgggtgtccggtcatcgcaagctgatcgcctccatgtctagcgactcgttgcgccatgtctatggagagctcgatgtgcagatccagaggcgcccatccatg

SEQ ID NO: 2177 - DNA, 2196 bp, Artificial Sequence
  derived and/or modified sequence
atgtcggaaacctcgagaaccgcgtttggaggccgtcgagcagtgccacctaacaactcgaacgcagcagaagatgacctccccactgtcgagctgcagggtgtcgtgccccggggagtcaaccttcaggagtttctgaacgtgacttccgtgcatttgtttaaggaacgttgggataccaataaggtcgaccaccatactgacaaatatgagaacaacaaacttattgtgcgtcgaggacaatcgttctatgtccagatcgacttctccaggccatacgatcctcggagagatctctttagggtggagtacgttattgggcgttatcctcaagaaaacaaaggtacctacatacccgtccccatcgtctccgagctccaatcaggaaagtggggcgccaaaattgtcatgcgcgaagatagatcagtgaggttgtctattcagagctcacctaagtgcattgtgggtaagtttcgcatgtacgtcgcagtgtggacgccgtacggtgtgcttcgcacctccagaaaccctgaaaccgatacttacattctgttcaatccttggtgtgaagatgacgcagtgtatctcgacaacgaaaaggaaagagaagaatacgtgctgaacgacattggagtgatcttctacggtgaagtgaatgacatcaagactaggtcatggtcatacgggcagtttgaagatgggattcttgatacctgcctgtacgtgatggacagagcacaaatggatctgtcgggccgtggtaaccctatcaaggtgtccagagtgggatcggcaatggtgaatgcaaaggatgatgaaggtgtccttgtgggctcctgggataacatctacgcatacggggtccctccttcggcatggactggatccgtcgacattttgctggaataccgctcgtcagaaaacccggtgcgctacggtcagtgctgggtctttgcgggagtctttaacaccttccttagatgtcttggtattcccgcccggatcgtgacgaattacttctcagcacatgataacgacgcaaaccttcagatggacatctttcttgaggaggacggtaacgtcaactccaagctcactaaggactcggtgtggaactaccattgctggaacgaagcatggatgacccgcccagacctgcccgtgggattcggagggtggcaagcagtggatagcaccccacaagagaactcagatggtatgtacagatgcggtccagcatccgtgcaggcgatcaagcatgggcatgtgtgttttcaatttgatgcccctttcgttttcgccgaggttaactcagatctgatttacattaccgcaaagaaagatggtacgcacgtcgtcgaaaatgtggatgcaacccatattggtaaactgattgtgactaagcagattggaggagacggtatgatggacatcaccgatacctacaagttccaggagggacaagaagaggaacgactggcactggaaactgcactcatgtacggggcaaagaaacctcttaatacggaaggcgtgatgaagtccaggagcaacgtggatatggactttgaagtggaaaacgccgtgcttgggaaggacttcaaactttcgattacttttaggaacaatagccataaccgctacactattaccgcctacctgtcggcaaatatcactttttacaccggagtccctaaggcagaattcaagaaggaaacgttcgatgtgacgcttgaacctctcagctttaagaaggaggcagtgcttattcaggccggagaatacatggggcaactgttggaacaggcatcgcttcatttcttcgtgaccgcaaggatcaacgagactagggatgtgttggctaagcaaaaatcgaccgtgctgactattcctgaaatcatcatcaaggtcagaggtactcaagtggtgggaagcgacatgactgtgaccgtgcagtttaccaacccactgaaggagactcttcgtaatgtgtgggtgcaccttgatggccccggggtgacccgtcccatgaagaagatgtttcgggaaatccgcccaaacagcaccgtgcagtgggaagaagtgtgtagaccatgggtgtccggtcatcgaaagctgattgcatccatgtcgtcagattctctccggcacgtgtacggcgagctggacgtgcaaattcaacgacgaccaagcatg

SEQ ID NO: 2178 - DNA, 2196 bp, Artificial Sequence
  derived and/or modified sequence
atgtccgaaacttctcgcactgcctttggaggtagacgcgctgtccctccaaacaattccaacgcagcagaggatgacctgcccacggtggaactccagggagtggtgcctcgcggcgtgaacctccaggagtttctgaacgtgacctccgtccacctgtttaaggaaaggtgggataccaacaaggtggatcatcacacggataagtacgaaaacaacaagctcatcgtgagaaggggccaatcgttctacgtccagatcgatttctcccggccttacgaccctaggcgcgacttgtttcgggtggaatacgttattgggcggtacccccaagagaataagggcacttacattcccgttccgatcgtgtcggaactccagtccgggaaatggggcgcaaagatcgtgatgcgtgaggatagatccgtcaggctttcgatacagtcgagccccaagtgtatcgtcggaaagtttcgcatgtacgtggcagtctggaccccttacggcgtgttgcggacctcaaggaaccctgaaaccgatacctacattttgtttaacccatggtgtgaggatgatgcggtgtacctcgataacgaaaaagaacgcgaggaatacgtcctgaatgatataggagtgatcttttacggggaggtgaacgatatcaaaacccgctcatggtcatacggtcagtttgaggacggtattctggatacctgtctttacgtcatggatcgagctcagatggatctgagtggccgcggaaacccgattaaggtgtcaagggtggggtcagctatggtgaatgcaaaagacgatgaaggggtcctggtcggctcatgggataacatttacgcctacggagtccctccctcagcatggactggatcggtggacattttgctggaatacagatcgtcagaaaatcccgtcagatacggccagtgttgggtgttcgccggtgtgtttaacaccttcctgagatgcctcgggatcccagcacgtattgtgacgaattacttctccgcacatgacaatgacgcaaacctgcaaatggacatttttcttgaggaggatggtaatgtgaactcaaaactcactaaggattcggtctggaattaccattgttggaacgaagcatggatgacccgccccgacctgccagtcggattcggaggttggcaggccgtcgactcgactcctcaggagaacagcgacgggatgtatcgctgtggacctgcaagcgtgcaagctattaagcatggacacgtctgttttcaatttgacgcgccattcgtctttgcagaagttaattcggatctgatttacattactgccaagaaggatggtacccatgtcgtcgagaacgtggatgcaactcatattggaaagctgattgtcaccaaacagattggcggagacggtatgatggatattactgatacttacaagtttcaggaaggacaggaagaagaacggcttgcgctggaaaccgcactcatgtacggagcgaagaagcccctgaacactgaaggagtgatgaaatcgcgttcgaatgtggacatggatttcgaggtggaaaatgccgtcctcggaaaggactttaagctgagcatcaccttcaggaacaattcccataaccgatacactatcaccgcatatctttcagcgaacattactttttacactggagttcccaaggcagagtttaagaaagaaactttcgatgtgactctggaaccactttcatttaagaaagaggcggtgctgatccaggcaggggagtacatgggacaacttttggagcaagcatcccttcactttttcgtgaccgcaagaattaacgaaactcgggacgtgctggcaaagcaaaaatctaccgtgctcaccatacctgaaatcatcatcaaggtgcggggaacgcaggtggtgggtagcgatatgaccgtgaccgtgcagtttactaaccctctgaaggagactctgcgaaacgtgtgggtgcatcttgatggacccggcgtgaccagacctatgaagaagatgtttcgcgaaatcaggccaaattccaccgtgcagtgggaagaagtctgtcgcccatgggtcagcggacatagaaagctcattgcatcaatgtcgtcggactcgcttagacatgtgtacggggaacttgatgtgcaaatacagcgacggccctcaatg

SEQ ID NO: 2179 - DNA, 2196 bp, Artificial Sequence
  derived and/or modified sequence
atgtctgaaacttctcggactgccttcgggggacggcgcgccgtacctcccaataattccaatgcagccgaagatgacctcccaacagtcgagcttcagggagttgtacctcggggcgtgaacctccaggagtttctgaatgtgacttccgtgcaccttttcaaggagcgatgggacacaaacaaggttgaccatcacacagataagtacgagaataacaaactcatagtcagacgagggcagagcttctatgtacagatcgacttctcaagaccctacgatccacggcgagatctgttcagagtagagtatgtaatcggacgctatcctcaggaaaacaagggcacttatatcccagtcccgatcgtgagtgaactccagtccggcaagtggggagctaaaattgtgatgagagaagataggtctgttcgattgagcatccaatcttcgcccaaatgtatagtgggcaaattccggatgtatgtggctgtgtggacaccttatggggtcctacgtacctcacgcaaccccgaaacagatacctacatactgtttaacccctggtgtgaggacgacgccgtatacctggataacgagaaagagagagaggaatacgtgctgaacgatatcggcgtgatattctacggagaagtcaatgatatcaagacaaggagctggagttacggacagtttgaagatggaatcctggatacctgcctctatgtcatggacagagcacaaatggatctgtctgggagaggcaatccaattaaagtgagtcgcgtgggatcagcaatggtgaatgccaaagatgacgagggcgttctggtcggctcttgggataatatctacgcatatggggtgccaccgtcagcgtggacaggttctgtcgacattctactagaataccggtcatctgagaaccccgtgcggtacggccagtgctgggtgtttgctggagtgtttaacacatttctccggtgcttaggaatccccgcaagaatcgtgacaaactatttctctgcccacgacaatgacgctaatttacagatggatatcttcctggaggaggacgggaacgtaaacagcaagttaacgaaagactcggtttggaattaccattgctggaacgaggcctggatgacccgccctgacctgcccgttggatttggggggtggcaagcagtggactctacgcctcaagaaaactcggacggcatgtaccggtgcggccccgcatcagtccaggccataaagcacggccacgtatgctttcagttcgacgcaccatttgtcttcgcggaggtgaattctgacctcatctacatcaccgcaaaaaaagacggaacccatgtcgtagaaaacgtggacgccacccacatcgggaaactaatcgttactaaacagattggaggagatggaatgatggacattacggacacttacaaattccaggagggtcaagaggaagagagattggccctggagacagctctgatgtatggagcgaaaaaacctttgaacactgaaggcgttatgaagagtagaagcaacgtggatatggactttgaagtggagaacgctgtgctgggaaaagatttcaagttgtcaataaccttccgcaacaattctcataaccggtacactatcactgcttacctgagtgccaatatcactttttatacaggcgttcccaaagcagagttcaagaaggaaacctttgacgtgacactcgagcccctctcctttaagaaagaggctgtgctaattcaagctggggaatacatgggccaactcctggaacaggcatctctgcattttttcgtgactgcgcggattaatgaaactagagacgtgttggcaaagcagaagtccaccgtgttgacaattcccgaaattataataaaagtccgtggaacacaagtggttggatcagatatgaccgttacagtccagtttacgaacccactgaaggaaaccctccgaaatgtttgggtgcaccttgatggcccaggcgtgacgagacccatgaagaagatgttccgggagatccgacccaatagcactgtacaatgggaagaagtgtgcaggccgtgggtgtcaggtcacagaaaattgattgcctcgatgtcgtctgacagccttcggcatgtgtacggggaacttgatgtgcagatccaacgcaggccaagtatg

SEQ ID NO: 2180 - DNA, 2196 bp, Artificial Sequence
  derived and/or modified sequence
atgtccgaaaccagccggaccgccttcggcgggcgccgcgcggtgcctccaaataactcgaacgccgcggaggacgacctgccaaccgtggaactgcagggtgtggtgcccagaggcgtcaacctgcaggagttcctcaacgtgacctccgtgcatctgttcaaggaacgctgggataccaacaaggtggatcaccataccgataagtatgaaaacaacaaacttattgtgagaaggggacaatcgttttacgtgcaaatagacttttcgcgcccctacgatccacgtagagatctgtttcgggtggaatacgtcatcggaaggtacccacaagaaaacaagggcacttacattccagtccctattgtgtcggaactccagtcgggaaagtggggggcgaagattgtgatgcgagaagatcgttctgtccgcctctcaattcaatccagtccgaagtgtatcgttggtaagtttcgaatgtacgtggcagtgtggaccccttacggtgtgcttcgaacctccagaaacccagagactgacacttacattctcttcaacccttggtgtgaggacgacgcggtgtacttggacaacgaaaaggaaagagaagaatatgtgctcaatgatatcggtgtcatcttttacggagaggtgaacgacattaagactaggagctggagctacggtcaatttgaagatggaattcttgatacttgtctgtacgtcatggatagagcgcagatggacctttcgggtagaggaaatcccattaaagtgtcaagagtcggatcagcaatggtaaatgcaaaggacgacgaaggcgtcctcgtgggatcatgggacaacatttacgcttacggcgttccaccatccgcatggaccggatccgtggatatcctcttggaataccggtcctcggagaatccagtgcggtacggccaatgctgggtgtttgcaggggtgtttaacacgtttctgcggtgtctgggtattcctgcaagaattgtgactaactacttctcagcacatgataatgatgccaacctgcaaatggatatctttcttgaagaggatggaaacgtgaattcgaagctgaccaaagattccgtgtggaactaccattgttggaatgaagcctggatgactaggcctgacctccctgtgggattcggaggatggcaggcagtcgacagcacgccgcaggagaactcagatggaatgtatcgctgcggtccagcgagcgtgcaagcgattaagcatggacatgtctgctttcaatttgatgccccatttgtgtttgccgaagtcaactcggatcttatctacataaccgcaaaaaaggacggaactcatgtggtggaaaacgtggacgcaactcatattggaaaattgattgtgacgaagcaaatcggaggagacggtatgatggacattaccgacacttacaaattccaagaaggtcaggaggaagaaaggctcgcacttgaaaccgcgctcatgtacggtgccaaaaagccactgaacacggaaggtgtgatgaagtcaagaagcaatgtcgacatggacttcgaggtcgaaaatgctgttctgggaaaggactttaaactctcgatcacttttcgcaataactcacacaacaggtacaccatcactgcatacctgagcgcgaacataactttttacaccggagtgcccaaggcggagttcaagaaagaaacttttgacgtgactctcgaaccactttcctttaagaaggaggcagtgctgatccaggctggcgagtacatgggacaacttcttgaacaggcctcgctgcatttcttcgtgacggctcggattaacgaaaccagggacgtgctggcaaaacagaaaagtactgtgctcaccatacctgagattatcattaaagtccggggaacgcaagtggtcggtagcgatatgactgtcaccgtccagttcactaaccctctcaaagagactctgcggaacgtgtgggtgcacctggacgggcctggcgtgactcgccctatgaagaagatgttcagagaaattcggccaaactccactgtgcaatgggaggaagtgtgccggccatgggtttcaggacatcggaagttgatcgcatcaatgtcgtccgattccttgagacatgtgtacggtgagcttgacgtccagattcaacggcggcctagcatg

SEQ ID NO: 2181 - DNA, 2196 bp, Artificial Sequence
  derived and/or modified sequence
atgtccgaaacttcccgcaccgcatttggaggtcggagagcagtgccacccaacaattcaaatgcagccgaagatgacctcccgactgtggaactgcagggggtggtgcccagaggagtgaatctccaggaatttctcaacgtgacctccgtgcatctgttcaaggaacgatgggacaccaataaggtggatcatcatactgataagtacgagaacaacaaacttatagtgcgtcgtggacaatctttctacgtccaaatcgacttctcccgcccttacgatccacgccgtgatctgtttagggtggagtacgtgatcggcagataccctcaggaaaacaaaggaacctacattcccgtgcctattgtgagcgagctgcagtccgggaaatggggggcaaagattgtgatgagggaggaccggtccgtgagactctcaattcagtcctcaccaaagtgcatagtgggcaagttcagaatgtacgtcgccgtgtggaccccctacggtgtgctgcgaacctcccggaatccagaaaccgatacctacattcttttcaatccttggtgtgaagatgatgcagtgtacctcgataatgaaaaggagagagaagaatacgtgctgaatgacataggggtgatcttttacggagaagtgaacgacattaagaccagatcgtggtcctacgggcagttcgaggacgggatcttggatacgtgcttgtatgtgatggatcgcgcccaaatggatcttagcggacggggtaatcctatcaaagtctcaagagtcggatcggcaatggtgaacgcaaaagacgatgagggcgtacttgtgggcagctgggataacatttacgcatacggtgtgccaccttcagcctggactggttcagtggatatactgcttgagtacagatcctccgaaaatcctgtgagatacggacagtgttgggtgttcgcgggcgtctttaacacctttcttcggtgtctgggtatacccgcgagaattgtcaccaattacttttccgcacatgataacgacgctaatctccagatggacattttcctggaggaggatggcaacgtgaactccaagctgactaaggactcggtgtggaattaccattgctggaacgaagcgtggatgacgcggcctgacctgcctgtcggatttggcggatggcaggctgtcgattcaaccccacaggaaaattcggatggtatgtaccgatgtggcccagctagcgtccaagccatcaagcatggacatgtgtgtttccaatttgatgctcctttcgtgtttgcggaagtcaactcggacttgatttacatcaccgcaaagaaagacggtacccacgtggtggaaaacgttgacgcgacccatattggaaagctgattgtgactaaacaaattggtggtgatggtatgatggatatcactgatacctacaaatttcaagaaggccaagaagaagagagactggcactggaaaccgcccttatgtatggtgcaaaaaagcctctgaacactgaaggagtgatgaagagcaggtcaaacgtcgatatggattttgaagtggagaacgccgtgctgggaaaggactttaagctgagcattaccttcaggaacaattcccataaccggtacaccataactgcatacctgtcggccaatatcacgttttacaccggagtgcctaaagccgagtttaagaaagagacttttgacgtgacgctggagccgcttagcttcaagaaggaagcagtgctgattcaggccggcgaatacatgggacaacttctggaacaggcatcccttcatttctttgtcaccgcacggatcaacgaaacgagggatgtccttgccaaacagaagagcacggtgctgactattccagaaatcataatcaaagttcgtggtacgcaggtggtcggatcagacatgaccgtgactgttcagttcactaatcctcttaaggagactctgcgcaacgtgtgggttcaccttgatggtcctggagtcactcgccctatgaagaagatgtttcgtgagatcaggcccaattcaaccgtccaatgggaggaagtatgtcgaccttgggtcagcgggcatagaaaacttattgcctccatgtcatccgatagcctcaggcacgtgtacggtgaactggatgtgcagatccaacggcggccatccatg

SEQ ID NO: 2182 - DNA, 2196 bp, Artificial Sequence
  derived and/or modified sequence
atgtccgaaacttcacggactgcctttggggggcgaagggcagtgccccctaacaactccaatgcagcagaagatgatctgccaaccgtcgagcttcaaggggtcgtgccgcggggtgtgaacctccaagaatttcttaatgtgacttcagtgcaccttttcaaggaacggtgggacaccaacaaggtcgatcatcacaccgataagtacgagaacaacaagttgatcgtgcggagagggcagagcttttacgtgcaaattgacttctcccgtccatacgatccgcgaagagatctgtttagagtggaatacgtgattggtcgatacccccaggagaataagggcacttacattccagtgcccatcgtgtctgaacttcagtcaggaaagtggggagcaaagattgtgatgagagaagatcggtcggtgcggctgtccatccaatcctcccccaagtgcattgtcggtaaattcagaatgtacgtcgcagtgtggacgccatacggcgtgctccggaccagcagaaatccagaaactgatacttacatcttgtttaacccttggtgtgaagatgatgcagtttacctggataatgaaaaggaaagagaagaatacgtgcttaatgatattggtgtgattttctacggggaggtgaacgacattaagactagatcgtggagctacggacagtttgaggacggaatactggatacttgcttgtacgttatggacagggcgcaaatggacttgtcgggccgcggaaatccgataaaggtgtccagagtgggtagcgcaatggtgaacgccaaggatgacgagggagtgcttgtcggtagctgggataacatctacgcctatggagtccctccaagcgcatggaccggatccgtggatatccttttggagtaccgctcatcggaaaaccctgtgcgatacggtcaatgttgggtgtttgctggggttttcaatacttttctgaggtgtcttggcatccctgcacgcatcgtgactaattacttctccgcccatgataacgacgcaaatctgcaaatggacatctttttggaggaagatggcaacgtgaactccaagctgaccaaggactctgtctggaattaccactgctggaatgaagcctggatgacccgaccagatctgcctgttggatttggaggatggcaagcagtcgatagcactcctcaggagaactccgatgggatgtaccggtgcggtcctgcgagcgtgcaagcgattaaacatggccacgtctgttttcaatttgatgcgccatttgtgtttgcagaggtgaactcggatttgatttacattaccgccaaaaaggatgggacccatgtcgtcgagaatgtggatgcaactcacatcggaaagctgattgtcaccaagcaaattggtggagacgggatgatggatattaccgatacttataagttccaagagggacaggaggaagaacgcttggccctggaaaccgcgctgatgtacggggctaagaagcccctcaacactgagggagtgatgaagtcacgaagcaacgtggatatggattttgaagtggaaaatgcagtgctcggaaaggatttcaagctgtccattacctttcggaacaacagccacaaccgctacactattaccgcatatctgtcggcaaatatcactttttacaccggggtgcctaaggcagaattcaagaaagaaacctttgatgtgaccctggaaccgctctcatttaagaaggaggcagtcctcattcaagcaggagaatacatgggtcagctgcttgaacaggcgtcacttcatttcttcgtgactgccaggattaatgaaactcgggatgtgcttgccaaacagaagtcgactgtcctgactatacctgagatcatcattaaggtcagaggtactcaggtggtgggctcggatatgactgtgaccgtgcagtttactaatccacttaaggaaactctccgcaacgtgtgggtgcatctggacggaccaggtgtgactagacccatgaagaaaatgttccgcgaaattcgcccaaattccactgtccagtgggaagaagtctgtcgtccatgggtgagcggacatcggaaacttatagcatcgatgtcgtcggatagccttaggcatgtgtacggggagctggacgtccaaatccagagacgtccctccatg

SEQ ID NO: 2183 - DNA, 2196 bp, Artificial Sequence
  derived and/or modified sequence
atgagcgaaacgagtagaacagcatttggcggtcgacgagcagtgccgccaaacaacagcaatgcagcagaagatgatctacctacggttgagttacagggcgttgttccaagaggtgtgaacctgcaagaattcctgaacgtcacaagtgttcacctgttcaaggagagatgggatactaacaaggtagaccaccacaccgataaatatgaaaacaacaaactcatcgtaagaaggggccagagtttttatgttcagatcgatttttccagaccctatgacccacggagagatttatttcgagttgagtacgtcataggacggtaccctcaggagaacaagggcacctacatccctgtcccaattgtctcagaattacagtctgggaagtggggcgccaagatcgttatgcgagaggacagaagtgtgagactgtctatccagagttcacccaaatgcatcgtcggcaagttcaggatgtacgtcgcagtttggactccctacggggtgctgcgaacctctcgaaatccggagacagatacctacatcttattcaatccctggtgcgaggacgatgctgtgtacctggacaatgagaaggaaagagaggaatacgtgctgaatgacataggcgtaattttttatggtgaggttaatgacatcaagacaagatcctggtcttacggccagtttgaggacgggattctggatacatgtctctatgtgatggacagagcgcagatggacttgtccggcagaggcaaccctatcaaggtctctcgagtgggtagtgccatggttaacgcgaaagatgatgaaggggttctggtgggctcctgggataatatttatgcttacggtgtgcctccaagtgcttggactggctccgtggacattctactggagtacaggtctagtgagaacccagttcgatacggtcagtgttgggtgtttgctggggtgttcaatacttttctcagatgcctcggtatcccagctcgcatagtcactaattatttttctgcgcacgataatgatgccaacctccagatggacatcttcttggaggaagatggaaatgttaactccaagctaactaaagacagcgtgtggaactatcactgctggaatgaagcttggatgaccaggccagacctacccgtgggctttggcggctggcaggctgtcgactctactccccaagagaattccgacggcatgtatagatgtggaccggcctctgtgcaggccatcaaacatggccatgtgtgctttcagttcgacgccccctttgtctttgctgaggttaattccgacctgatctacatcaccgctaagaaagatggaacacacgtcgttgaaaatgtggacgccactcacattgggaagctgatcgtcaccaagcaaatcgggggcgacgggatgatggacataactgacacctacaagtttcaagaggggcaggaagaagaaagacttgctctagagaccgctctgatgtatggcgccaagaagccgctgaataccgaaggcgtcatgaagtctcgtagtaacgtagacatggattttgaggtggaaaatgctgtgctgggcaaggactttaagctgagcataaccttcagaaacaactctcacaataggtataccatcaccgcatacctcagcgctaatatcactttctataccggagtccctaaggcagaattcaagaaggaaactttcgacgtgacgctcgagcctcttagcttcaaaaaagaagcggtgctgatccaggctggggagtatatgggacagctgctcgagcaggcctctttgcatttttttgttaccgccaggataaatgagacaagggacgtgctggctaagcagaaatcaacagtgcttaccatccccgaaatcattataaaggtgaggggcacccaggttgtgggttcggacatgaccgtaacagtccaatttaccaatcctctgaaggaaactttgagaaacgtttgggtgcacctggatgggcccggggttacacggccaatgaaaaaaatgttcagggagattaggcctaatagtacggtgcagtgggaagaagtgtgtcgaccctgggtcagtggccaccgaaaactcatagccagcatgagttctgattccctaagacatgtatacggggaacttgacgtgcagatacaaagaagacctagtatg

SEQ ID NO: 2184 - DNA, 2196 bp, Artificial Sequence
  derived and/or modified sequence
atgtccgaaacctcgcgcaccgctttcggaggaaggcgcgctgttccgcccaacaattccaacgccgccgaggacgaccttcctaccgttgagcttcaaggagtggtgccacgcggagtcaacctgcaagaattcctgaatgtgaccagcgtgcacctcttcaaggagcgatgggataccaataaagtcgaccatcacactgacaagtacgagaacaataaactcatcgtccgccggggccagtcgttttacgtgcagatagacttctcccggccgtacgacccgcggcgggacctcttccgtgtcgagtacgtcatcggaagatacccgcaagagaacaagggaacttacatcccggtgccgatcgtgtcggagctgcaatcaggaaagtggggagcaaagattgtgatgagagaggaccgctcagtcagattgtcgattcaatcctctccgaagtgtatcgtcggaaagtttcgcatgtacgtggcggtctggacgccatacggagtgctgcgcacttccagaaaccccgagactgacacgtacatccttttcaacccgtggtgcgaggacgacgccgtctacctggataacgaaaaagagagagaggaatacgtcctgaacgacatcggagtgatcttctacggagaggtgaatgacatcaagaccagatcatggagctacggacaattcgaagatggcatcctggatacttgcctgtatgtcatggaccgcgcccaaatggacctgagcggcaggggcaacccaatcaaagtgagccgcgtgggctctgctatggtcaacgccaaggacgatgaaggtgttcttgtcgggtcctgggacaacatctacgcctacggagtgccaccatcagcctggacgggatcggtcgatatcctgctggaataccggagctctgagaatcctgtgcgctatgggcaatgctgggttttcgctggagtgttcaacacctttcttcgctgcctgggcatcccggctcgcatcgtgaccaactacttctcagcccacgataatgatgcaaatctccagatggatatcttcttggaggaagatgggaacgtgaatagcaagctcacgaaggactcagtgtggaactaccattgctggaatgaagcgtggatgacgcggccggatctcccggtgggattcggtggatggcaggccgtggattcgactccgcaagaaaacagcgatggtatgtacaggtgcggccctgcgtcagttcaggcgatcaagcacgggcacgtgtgcttccagttcgacgctccatttgtgttcgcggaagtgaatagcgaccttatctacattaccgccaagaaagacggtacccatgtggtggaaaatgttgatgcgacccatatcggtaaactgattgtgaccaagcagatcggcggagacgggatgatggacatcaccgatacttacaagttccaggaaggacaggaagaagagcgcctggccttggaaaccgccctgatgtacggagcgaagaaaccgctgaatactgaaggtgtgatgaagtcgcggagcaacgtggatatggattttgaggttgaaaacgctgtgctgggaaaggatttcaaattgagcatcactttccgcaacaattcgcataatcgctacactatcaccgcctacctttcggccaacatcactttctacactggcgtccccaaagctgaattcaaaaaagaaacttttgacgttactctggaaccgttgtcgttcaagaaggaagcggtgctgatccaggccggagaatacatggggcagcttctggagcaggcctccttgcacttcttcgtgactgcacgcatcaacgagactcgggatgtcctggccaagcagaagagcacggtgctgacgatcccggaaatcatcatcaaagtccgcggcacccaagttgtgggatccgatatgacggtgactgtgcaattcactaaccctctcaaggaaaccctccggaacgtgtgggttcatttggacggaccaggcgtgacccggcctatgaagaagatgttcagagaaattcgcccgaactcgactgtgcagtgggaggaagtgtgccgcccatgggtgtcgggacaccggaaactgatcgcttccatgagctcggattcgcttcgtcatgtgtacggagaactcgatgtgcaaatccagagacggccgtcgatg

SEQ ID NO: 2185 - DNA, 2196 bp, Artificial Sequence
  derived and/or modified sequence
atgagcgaaacgtcccggacagcattcggggggaggcgggcagtaccccccaacaatagtaacgccgccgaagatgacctgcccaccgttgaactgcaaggagtggttccaagaggagtgaacctgcaggagtttcttaacgtcacgtccgtgcatttgttcaaagagcggtgggacacaaataaagtggatcatcacacggacaagtacgagaacaataaactgattgtgcgcagaggtcaatcattctatgttcagattgatttcagcaggccatacgacccccgtagagatctattccgggtggaatacgttataggacgatatcctcaggaaaacaagggaacctacattcccgtgcctatcgttagcgagctccagagcgggaagtggggcgcaaagattgtgatgcgcgaggatcggtccgtgcgcctaagcatacagtccagccccaagtgtattgtgggtaaattcagaatgtacgtggccgtctggaccccttatggagtcctacggacatcacgtaatcctgagaccgacacttatatcctgtttaatccttggtgcgaagacgacgcagtgtatctcgacaatgagaaggagcgggaggaatacgtgctcaatgatataggcgtgatattctatggggaggtcaatgacataaaaacgcgatcttggtcttatgggcaattcgaggacggcattcttgacacgtgcctatacgtgatggaccgggctcagatggatttgtccggccgcggaaatcctatcaaggtgtctagggtggggagcgcaatggtaaacgccaaggacgatgagggagtcctggtgggatcctgggataacatatatgcctatggggtgcctccttcagcctggaccggctccgttgacatcctgctcgaataccgctcttcagagaatcccgtgcggtacggtcaatgctgggtgttcgcgggggtatttaacaccttccttcggtgcctaggcatcccagcccgaattgttacaaactacttttcagcccacgacaatgacgccaacctccagatggatatttttttagaggaggatggtaatgtcaatagcaagttgacgaaagactctgtatggaactatcactgctggaacgaggcatggatgacccgtcccgacttgcctgtcggattcggagggtggcaggccgtcgattcaacaccccaggaaaatagcgatggaatgtataggtgcgggccggcaagcgtccaagctattaaacatggacacgtttgcttccagtttgatgctcctttcgtatttgccgaggttaatagcgacttgatctatattactgccaagaaggacggcacgcatgtcgtcgagaacgtggacgcaacccacatcggtaaactcatcgttactaaacagataggaggcgatggtatgatggacattaccgacacttacaaatttcaagaaggccaggaggaagagaggctagccctcgagactgccctcatgtacggtgccaaaaaacctttaaacactgagggagttatgaagtcacgcagcaacgtggatatggacttcgaggtcgagaacgcagtacttggaaaggatttcaagttgagtataacattcaggaacaacagccacaatcgatacacgataaccgcctaccttagcgctaatatcaccttctacaccggagtgccgaaggctgagtttaaaaaggagacttttgacgtgaccctcgaaccactgagtttcaagaaagaggccgtcctcatccaagccggggaatatatgggccagctgctggagcaggcatccttacatttcttcgtcactgcgaggattaatgaaacgagggatgttctggccaagcaaaaaagcacagtgctcaccattccagagatcatcatcaaagtgcgcgggacgcaggttgtcggttcggacatgactgtgacagtccagtttaccaatcccctgaaggagacgctacgaaatgtctgggtgcatctagatggacccggcgtcactcgacctatgaagaagatgttccgtgagatccgccctaattcaacggtccagtgggaagaggtttgccggccatgggtcagtggccacagaaagctgatcgccagtatgtctagtgattccctccggcatgtctacggggagttggacgtacagatccagcgacgacccagcatg

SEQ ID NO: 2186 - DNA, 2196 bp, Artificial Sequence
  derived and/or modified sequence
atgtcggaaacatccaggaccgccttcggcggccgtcgcgccgtacctccaaacaactcaaacgctgctgaagatgacctccccaccgtggagctgcagggagtggtgcctaggggggtgaacttgcaggaatttttgaatgtgacatctgtacacctgtttaaagaaagatgggatacaaataaggttgatcaccacacagacaaatatgagaataataaactaatagtccgccgcggacagtcattctatgtacagattgatttctcccggccttacgatccaagacgcgatctgtttcgtgtagaatacgttattggacgctaccctcaagagaataaagggacgtacataccagtaccaatcgtgtcagaactccagtccggaaagtggggggctaaaatcgtgatgcgggaggatcggtcggtgaggctgagcattcaatcctctcccaagtgcatagtggggaagttcaggatgtatgttgccgtgtggacaccatatggagtcttgcgcacaagccggaatcccgagaccgacacttacatcctgttcaacccttggtgcgaagacgacgcagtctaccttgacaacgaaaaagagcgagaagaatacgtactgaacgatatcggggtcatattttacggagaagtgaacgacatcaagaccaggagctggtcctatggccagttcgaggacggtattctggatacctgtctgtacgtcatggaccgcgcccagatggatttgtctggaagaggtaacccaattaaggtgagtcgtgtgggctcagcaatggtgaatgctaaagatgacgagggcgtgctagtcgggtcttgggacaacatatatgcctacggagtcccaccgtctgcatggaccggcagcgtggatatcctgctggagtatcgttcttcagagaatcctgttcgatacggacagtgttgggtcttcgccggcgttttcaatacgtttcttagatgcctgggtattccagctcgcatcgtgacaaattacttcagtgctcacgacaatgatgccaatctccagatggacatctttctggaagaggatggcaacgtgaatagcaagcttacaaaggactctgtgtggaactatcactgctggaacgaggcttggatgaccaggcctgatctgcctgtgggattcggaggctggcaggcagtagattcaacgcctcaagaaaatagtgacgggatgtaccgttgtgggcccgcgagcgtacaagcaatcaagcacggccatgtgtgttttcagttcgatgctcccttcgtgttcgctgaagtgaattccgacctgatttatataacagctaagaaagatggcacccacgtggtggagaatgtggacgctacccatataggcaaattgatcgtgacaaagcaaattggtggggacggaatgatggacatcaccgatacctataagtttcaggagggccaagaggaggaacgcttggcactcgaaacggccctcatgtacggggcgaagaagcccttgaatactgagggagtgatgaaatctcgctcaaacgtcgatatggacttcgaggtggagaatgcggtgctgggcaaggactttaagctatctattactttccggaacaactctcataacaggtacaccatcacggcatacttgagtgcaaatataacgttttatacaggagtgcctaaggcggagttcaagaaggaaaccttcgacgttacactcgaaccactgtccttcaaaaaggaagcggtgctgattcaggctggggagtacatgggccagctgctagagcaagcatccctgcatttttttgttacagctcggatcaacgagacacgcgacgtgttggccaagcagaaatcaactgttctgacaatcccagagataattatcaaggtgcgaggcacccaagtagtcggaagcgacatgacagtgactgtacaatttactaacccgctgaaggagacactgcggaacgtgtgggtgcatctcgatgggccaggcgtaaccagacccatgaagaagatgtttagggagatccggccaaacagcacggtacaatgggaggaggtttgccgaccgtgggtcagcggccaccgtaagctgattgccagtatgtccagtgacagtcttcgccacgtctacggggagctggatgtgcagattcagaggcggccctcgatg

SEQ ID NO: 2187 - DNA, 2196 bp, Artificial Sequence
  derived and/or modified sequence
atgagcgaaacttcaaggaccgcctttggcggaagaagggccgtccccccaaataactcaaatgctgctgaggatgatctgcccaccgtggagcttcagggtgttgtgccacgcggggtcaacctccaggaatttctcaacgtgacgtcagtgcacctgtttaaagaaagatgggacaccaacaaagttgaccatcacaccgataagtacgaaaacaacaaactgatcgttaggcggggacaaagcttttatgtgcagatcgatttttctagaccatacgatccaagacgagatctcttccgcgtggaatacgttatagggagataccctcaggagaataaaggaacatacatcccagtgcccatagtttcagaactgcagtctggaaaatggggcgctaaaatcgtcatgagagaggatcggagtgtgcggctgagcatccagtccagccccaaatgtatagtggggaagtttcgcatgtacgtcgcggtctggactccttacggcgtcctgagaacatcgcgaaatcctgagactgacacctacatcctctttaacccctggtgcgaggatgacgctgtctaccttgacaatgaaaaggagagggaggaatacgtactgaacgacatcggcgtcatcttctacggcgaagtcaacgatatcaagacgagatcttggagctacgggcaatttgaagacggtatcctggatacttgcctgtatgtgatggatagggcacaaatggatctgagcggtcgcggaaacccaataaaggtgagtagagtcggctcagccatggtgaatgctaaagacgacgagggggtgctggtgggaagttgggacaacatttatgcttatggggtacctccttcagcttggacgggcagcgtcgatattctgctggagtacaggagctctgagaaccccgtgaggtacggccagtgctgggtattcgccggcgtgttcaacactttcctgcgatgcttggggatacccgcaagaatcgtgacgaattatttttctgcgcacgacaacgacgccaacttgcagatggatatcttccttgaagaagacggcaatgtgaatagcaagctgaccaaagactctgtatggaactatcattgttggaatgaggcttggatgactaggccagaccttccagttggtttcggcggttggcaggcagttgatagcacaccacaagaaaactctgacggcatgtaccggtgcggaccagcatccgtacaagcgatcaagcacggtcacgtatgctttcagttcgacgcccctttcgtgttcgcagaagtgaacagtgacttgatttatatcactgcaaaaaaggatggcacccacgttgtggaaaacgtcgatgctacccatatcggaaagctgatagtcactaaacagatcggaggagatgggatgatggatattacagacacatacaagttccaggaaggacaggaggaagagcgcctggccctggaaaccgcacttatgtacggagctaaaaagccgctgaacactgagggcgtcatgaaatctagaagcaacgttgatatggatttcgaggttgaaaacgctgtgcttgggaaggactttaagctgagcatcacttttagaaataactcccacaataggtatactataaccgcttacctttcggccaatatcaccttctatacaggggttcctaaggctgaatttaaaaaagaaacctttgacgtgaccctggagccattatcatttaaaaaggaagccgtgctgatacaggcgggggagtacatgggacaactcctggagcaggctagcctgcactttttcgtgactgcacgcatcaacgagacaagagacgtgctggctaagcagaagtctaccgttctgaccatccctgaaattatcatcaaagttcgcggaactcaggtcgtgggatctgacatgacggtcaccgtccagtttacaaatcctctgaaagagacattgcgcaacgtgtgggtccatctcgacggacctggggtcactcgccctatgaaaaaaatgttcagggagatcagacctaatagtaccgtgcagtgggaggaagtctgccggccttgggtatcaggccataggaagctgatcgcctctatgagtagcgattctctgagacacgtgtacggggaacttgacgttcaaattcaacgaagaccgtctatg

SEQ ID NO: 2188 - DNA, 2196 bp, Artificial Sequence
  derived and/or modified sequence
atgagtgaaacatccagaacagcttttggtggcagacgcgctgtgccccccaacaactctaatgcggcagaggacgatctgcctacagtggagttacaaggagtcgtgccaaggggtgtgaacctacaggagttcttgaatgtgacctcagtgcacctgttcaaggaacggtgggacaccaacaaagtagatcaccacactgacaaatacgaaaataacaaattgatagtaaggaggggccaaagcttctatgtgcagattgacttttctcgaccctacgatcctaggagggatctgttccgcgtagagtatgtcatcgggagatatccccaggagaataagggcacatacattcctgttcccattgtgagcgagttacaatctggaaagtggggggccaagatcgtgatgcgtgaagacagaagcgtgcgactaagcatccagagctctcccaagtgcatcgtggggaagtttcgaatgtatgttgcagtgtggaccccttacggcgtgctccgcacatctaggaacccggagaccgatacatatatcctctttaatccctggtgtgaggacgacgccgtttacctcgacaacgaaaaagaaagggaagagtacgttctcaatgatattggagtgattttctacggggaagtcaacgacatcaagacccgtagttggagctacggccaatttgaggatggtatcctcgatacctgcctgtatgtaatggaccgcgcacaaatggaccttagcggccgtggcaacccaatcaaagtttcgcgcgtcggcagcgccatggttaatgcaaaggatgacgagggtgttctggtgggcagttgggacaatatatatgcttacggggtacccccttccgcctggacaggcagcgtcgacatcctcttagagtatcgctcatccgaaaaccctgtcagatacggacagtgttgggtgttcgctggagttttcaatacttttctgaggtgtctggggatccccgctagaattgttacaaattattttagcgcccacgacaacgacgcaaacttgcagatggacatctttctagaagaagacgggaacgtgaatagcaagctgaccaaagacagcgtgtggaattaccactgctggaacgaggcatggatgactcgaccggatcttccagtgggatttggcgggtggcaggctgtggactctacacctcaggaaaattccgatggcatgtatcggtgcgggccagcttctgtgcaagcgattaagcacggccacgtctgttttcaattcgatgctcccttcgtattcgctgaggtgaatagtgacttgatctacattaccgccaagaaggatggcacccacgttgtggagaatgtggacgcaactcacattggcaaactaattgtgaccaagcagattggcggcgatggaatgatggacatcactgatacttataagtttcaggaaggccaggaggaagagagactggctctagagactgcactgatgtacggagctaagaaacccctgaatactgagggggtgatgaagtcaaggtcgaacgtggatatggactttgaagtggaaaacgcagtactcgggaaggatttcaaactgagtataaccttcaggaacaatagccacaatagatatactataacagcttacctgagcgcaaatataacattctataccggagtcccgaaagcagaattcaaaaaggagaccttcgacgtgacattggagcccctgtctttcaaaaaagaagcagtccttatacaagccggcgaatacatggggcagttgctggaacaggcctctttgcatttttttgtcaccgctagaataaacgaaacgagagatgtgttggcaaagcaaaagtcgactgtgctcacaattcccgagataattatcaaggtgcgcgggacacaagttgtaggaagtgacatgactgtgacggtacagttcaccaaccctttaaaggaaacactgcgcaacgtctgggtgcatctggacggacccggggttacccgaccaatgaagaagatgttcagggagatcaggcctaattcaacagtgcagtgggaggaagtgtgtcgaccttgggtttccggacatcggaagctgattgcctcgatgagttccgacagcctgcggcacgtgtacggggaactggatgtacaaatccaacggcgaccatcgatg

SEQ ID NO: 2189 - DNA, 2196 bp, Artificial Sequence
  derived and/or modified sequence
atgtccgagacaagtcgcaccgcctttggcggtcgcagggcagtgccacctaataactcaaacgccgcggaagacgatctgcccacagtggaactccaaggcgtcgtccctagaggtgtgaaccttcaggagtttctgaacgtgacctccgtccacttgtttaaagagagatgggacaccaacaaagtcgatcaccatacggataagtacgaaaataataagctgattgtcaggagaggtcagtccttctacgtccagatcgacttctcccgtccctacgacccacgtagggatttattcagggtagagtacgtaatcggtcgatatccccaggaaaataagggaacatatatccctgtccccatcgtgtccgaactgcagtccggaaaatggggagctaaaattgtgatgcgagaggacagatctgtgagactgtccattcagtctagtccaaagtgcatcgttgggaagttccgaatgtacgttgccgtatggacaccatacggagtactgagaaccagcagaaatccagagactgacacctatatcctgttcaatccgtggtgcgaagatgacgcggtgtaccttgataatgagaaagaaagagaggagtatgtgctgaatgatataggagtcatattctatggggaagtcaacgacatcaaaactcgatcttggtcttacggtcagtttgaggatgggatactcgatacctgtctgtatgtaatggaccgagcacaaatggatctgtctggaagggggaacccgatcaaggtctcccgagtgggctctgctatggtgaacgccaaagatgacgaaggcgttctggttggctcctgggacaacatctacgcttacggcgtgcctccgagcgcctggacaggatccgtggatattctgctcgagtaccgatccagtgaaaaccccgtgaggtatgggcaatgctgggtgttcgcaggtgtcttcaatactttcctgaggtgcctgggcatcccggctaggatcgtcaccaactacttcagcgcccatgacaacgatgccaatctccaaatggacatcttccttgaggaagatgggaacgtaaattctaagcttacaaaggattccgtctggaactaccactgctggaatgaggcatggatgactcgtcccgatctacctgtggggttcgggggttggcaggccgtcgactcgacgccgcaagagaatagtgacgggatgtatcgatgcggcccggcctctgtgcaggcaatcaagcatggccacgtatgcttccagtttgacgcccccttcgtgttcgctgaggtgaactccgatctcatctacattaccgccaaaaaggacggcacacacgttgtcgaaaatgtagacgccacacatataggtaaactaattgtgactaagcagattggcggtgatgggatgatggacatcaccgatacatacaaatttcaggagggccaggaggaagaaaggctggccctggaaacagccctcatgtacggtgccaagaaaccgctgaacactgaaggcgtgatgaagagcagaagtaatgtcgatatggattttgaggtggaaaacgcagtgttgggtaaggattttaagctgtctatcacttttcgaaataatagccataatcgctacacgatcacagcgtatctttcagcgaacatcacattttacactggtgttcccaaagctgagttcaagaaggagacctttgatgtgactttggagccactatctttcaagaaggaggccgtgctgatccaagctggagaatacatgggccaattactggaacaggcaagcttgcatttctttgtgactgctcgtatcaatgaaaccagggatgtgctggccaagcagaaatccaccgtcctgaccatccctgagatcatcatcaaagttcgaggaacccaagtcgtcggctcagatatgacagtgactgtacaattcacaaatcccctgaaagaaacactgaggaacgtgtgggtgcatttggatggccccggcgtgaccaggccaatgaaaaagatgtttagggagataagacccaattcaaccgtccagtgggaggaagtttgtcgaccttgggtgtctggccaccgtaagctgatcgcctcaatgtcatccgactcactgagacatgtatacggtgaactcgacgtgcagatacagcgaagaccatcaatg

SEQ ID NO: 2190 - DNA, 2196 bp, Artificial Sequence
  derived and/or modified sequence
atgtctgaaacttctcggacagccttcggtggtcggcgagcagtgcctcctaacaatagcaatgctgcagaagacgatctgcctaccgtggaactccagggcgtggtgccccgcggcgttaacttgcaggaattcctcaatgtgaccagtgtgcacctgttcaaggaaagatgggacacgaataaggtggatcatcacacagataagtacgaaaacaacaagctgattgtgaggcgcggacagtcattctatgtgcagatcgactttagtcgaccctacgaccccaggcgggacctgtttcgggtcgaatatgtgattgggcgatacccacaggaaaataaagggacttacataccagtcccaattgtgtccgagctgcagtccggaaagtggggagccaagatcgtgatgcgagaagaccggtctgttagactttcgatacagtcgtctccaaagtgcatcgtggggaaattcagaatgtacgtggcagtttggacgccgtatggcgttctgcggacgagtagaaaccccgagaccgatacgtacatcttgtttaatccatggtgcgaagatgacgctgtgtacttagataacgagaaagagcgggaggagtacgtcttgaatgatattggggtaatcttttacggcgaggtaaatgacatcaaaacgaggagttggtcatatggacagttcgaggacgggatcttggatacctgcctgtacgtgatggatcgcgcacagatggacttgagtggtcgcggtaaccccatcaaagtgtctcgcgttggttctgctatggtgaacgcaaaggacgacgaaggcgtgcttgtaggatcctgggacaacatttacgcttatggcgttccacctagcgcatggacagggagtgtagacatcctcctcgaataccgctccagcgagaatcccgtcaggtacggccagtgttgggtttttgcaggggtgtttaacacattcctaagatgtctggggatccccgcccgaattgtgacaaattacttcagcgcacacgacaatgacgccaacctccaaatggatattttcctcgaggaagatgggaatgttaacagtaaacttaccaaggactccgtgtggaactaccactgttggaatgaggcctggatgacaaggcccgacctgccagtgggttttggaggatggcaagccgttgactccactccccaggaaaactcagacggaatgtatcgatgtggacctgcgtccgtgcaggcaattaaacatggacatgtctgttttcagtttgacgcaccgttcgtttttgccgaagttaactccgaccttatctacattacggccaagaaggatgggactcacgtcgtggaaaatgtggatgcaacccacattggtaagttgatcgttaccaagcagataggaggtgatggcatgatggatatcaccgatacatataagttccaagaaggtcaggaggaggaacggctggctctggaaacggccctaatgtacggagccaagaaaccgttgaatacagagggcgtgatgaaaagccgatctaacgtggacatggactttgaggtggagaacgctgtcttggggaaggactttaaactgagcattacattcagaaacaactctcataacaggtacactattactgcctatttaagcgcaaatattacattctatacaggggtgccgaaggccgaattcaaaaaggaaacattcgatgtgacactggagcccctgtcatttaagaaggaagcagtactgattcaagctggagagtatatgggtcaattactggagcaagcatctttgcattttttcgtgacagcaaggatcaacgagactagagacgtcttagcgaaacagaaatccactgtcttaaccatcccagaaattattatcaaggtgagaggcacccaagtggtgggcagcgatatgactgtgactgtgcaattcacaaacccacttaaggaaaccctaaggaacgtgtgggtacacctggatggcccaggagtgacgcgcccaatgaaaaaaatgtttcgggaaatccgtcctaactcaacagtccaatgggaggaggtgtgcagaccttgggtctctggccatcggaagctcatagcctctatgagctctgatagtttacggcacgtttacggtgaacttgatgtccagattcagcggcggccctccatg

SEQ ID NO: 2191 - DNA, 2196 bp, Artificial Sequence
  derived and/or modified sequence
atgtctgagacttctaggacagcctttggtggcagaagggcagttccccccaataatagcaacgccgctgaggacgatctgccaacagtggaattgcagggcgtggtgccgcgaggagtgaacctgcaggaatttctgaacgtgacatccgtccatctgtttaaggagagatgggacacaaacaaagtggaccaccatactgataagtacgagaacaacaagttgattgtccgccgcgggcagagtttttatgtccagatcgacttttctaggccctacgacccaaggcgggacctgtttcgggtggaatatgtgatcggacggtacccccaagagaacaaggggacgtacatccctgttcctatagtctctgagttgcagtcgggtaaatggggggctaaaatagtgatgcgggaagatcgcagcgtgaggctaagcatccagtcctcaccaaagtgcatcgtgggaaagtttcgaatgtacgtggcagtctggacgccctacggggttctccgtaccagtagaaaccccgagacagatacttatatcttgttcaacccgtggtgcgaagacgatgccgtttatttagacaatgagaaggagcgagaagaatacgttcttaacgacataggcgttattttctacggcgaggtgaacgacataaagactaggtcctggagttacggccagtttgaggacggcatactggacacctgtttgtatgtcatggatcgggcacagatggacttgtccggcagaggaaacccaatcaaggtatctcgggtcggcagcgccatggtgaacgctaaagacgacgagggcgtgctcgtcggcagctgggataatatctacgcttacggggtacccccgtctgcttggacagggagtgtggacatcctgcttgagtatcgctcaagcgaaaaccctgttagatatgggcagtgctgggtcttcgcaggagtgttcaatacgttcctgagatgccttggaattccagcccgcatcgtcacaaattacttttccgctcacgacaatgacgctaatttgcagatggacattttcctggaggaggacggaaatgtcaattccaagctgaccaaggactcagtgtggaattaccactgctggaatgaggcctggatgacaaggcccgatctgccagttggatttggcggctggcaggccgtggactccaccccccaagagaattccgacggcatgtatcgctgcggaccagcctctgtgcaggctatcaaacatggacatgtgtgcttccagtttgacgcaccgtttgtttttgccgaagtcaactctgacttgatttatatcacggccaaaaaagatggcacccatgttgttgaaaatgtggacgccacgcatatcggcaaattaatcgtcaccaaacagattggaggagacggcatgatggacatcaccgacacttataaattccaggagggacaggaagaagagcgcctcgctctcgagaccgctttgatgtatggagccaagaaacctctgaataccgagggggtaatgaagtcaaggagtaatgtagatatggattttgaggttgaaaatgctgtgctgggtaaggacttcaagctctccatcacatttcgaaacaactcccacaatagatataccattaccgcctatcttagcgcaaatatcaccttttatacgggcgtgcccaaggctgagtttaagaaggagacttttgatgtcactctggagcccttatctttcaaaaaagaagccgtcctgattcaggctggcgaatatatggggcagctactcgagcaggcctccctccacttcttcgtgacagcccgtataaatgagactcgcgacgtgttggctaaacagaagtccacagtcttgacaattccggagataattatcaaggtccgcggcacccaggttgtgggctccgacatgactgtcacagtgcagttcacgaaccctctcaaagagacactgcggaacgtgtgggtgcaccttgatgggcccggcgtcacccgcccaatgaagaaaatgttcagagaaattaggcctaatagtaccgttcagtgggaagaagtgtgtcggccttgggtgtctgggcatcgcaaactcattgcctcaatgtcctcagatagcttgcggcacgtctacggcgagctggatgtgcaaatccagagacgcccaagtatg

SEQ ID NO: 2192 - DNA, 2196 bp, Artificial Sequence
  derived and/or modified sequence
atgtccgaaacatcccgcacggcttttggcgggaggcgagccgtccctcctaataactcaaacgccgccgaagacgatctcccaaccgttgagctgcagggtgttgtgccccgcggcgtgaacctgcaagagtttctgaatgtgaccagtgtgcacctgtttaaggagcggtgggacaccaataaggtggaccatcacactgataaatacgaaaacaataaacttatcgtccggcgcggtcagtcattttacgtacaaattgacttttctaggccgtacgatccacgcagagacttgttcagagtggagtatgtgattggacgctacccccaagagaacaaaggcacatacatcccagtgcccatcgtatcagagctccagagcgggaagtggggagcaaagatcgtgatgagagaggatagatcggttcgtctctccatccaaagttctcccaagtgtatagtgggcaaattcagaatgtacgtggcggtctggaccccctatggggtcctccgaacgagtaggaaccccgagacagacacttacattctgttcaacccctggtgtgaggatgacgccgtgtacttggacaatgaaaaggagcgggaggagtacgtactgaatgacattggcgtgatcttctacggagaagttaatgacatcaagacgcgttcttggagctatgggcagtttgaggacggcattttggatacttgcttgtatgtgatggacagggcccaaatggatctttcaggcaggggtaacccaatcaaagtcagtcgcgtcggatctgcaatggtaaatgccaaagacgatgagggtgtgcttgtgggcagttgggataatatctatgcttatggcgtgcccccaagcgcatggacagggagtgttgatatacttctggagtatcgctcaagcgagaacccagtccggtacgggcaatgttgggtattcgcgggcgtgtttaacacctttctgcgctgcctaggtataccagcacggatcgttaccaattatttttcagcacatgataatgatgccaacctgcaaatggatatctttctcgaagaagacgggaacgtcaattccaaactgactaaggactccgtatggaattaccattgctggaatgaggcatggatgactcgccctgatctgcctgtgggctttggcgggtggcaagcagtggactcaactccccaggaaaacagcgacggtatgtataggtgtggcccagcctccgtgcaggctatcaagcatggtcacgtgtgctttcagtttgacgctcccttcgtgtttgcagaggtaaacagtgatctgatctacatcactgctaagaaagatgggacacacgtggtggaaaacgtggacgccactcacatcggcaagctgatagtgaccaagcagattggcggggacggcatgatggacataactgacacatacaagttccaggaagggcaagaggaagagcggctggctcttgagaccgcactgatgtacggtgcgaagaagccgttaaatacagaaggggtcatgaagtctcgtagcaacgttgatatggattttgaagtagagaacgcagtgctcgggaaagacttcaaactcagcattacattccgcaataattcccacaataggtacactattacagcctacctgtcagctaacatcacattttacaccggcgttcccaaggctgaatttaaaaaggagacttttgatgtaacattggaaccattgtccttcaaaaaagaggctgtgttgattcaagctggtgagtacatggggcagctcctggagcaagcttccctacattttttcgtcaccgcccgcataaatgagaccagggatgtgctcgcaaagcagaaaagtacggtcctcaccatacccgagatcataataaaagtgagaggcacccaagtggtcggcagtgatatgaccgtgacggttcagttcaccaaccccttaaaagagacacttcggaacgtttgggtgcacctcgacggcccaggagtgacccggcctatgaaaaagatgtttcgagaaatacgtccaaacagtaccgtgcagtgggaggaggtgtgtagaccttgggtaagtggacatcggaagctgatagcatccatgtcctccgactctctgagacacgtgtacggcgagctggatgttcagattcagcggcggcccagcatg

SEQ ID NO: 2193 - DNA, 2196 bp, Artificial Sequence
  derived and/or modified sequence
atgagcgaaacctccagaactgcattcggagggagacgcgcagttccaccaaacaatagtaacgcggccgaggacgatcttcctacagttgaacttcaaggagtggtgccacgtggggttaacttgcaagaatttcttaacgtcacgagtgtacacctgtttaaagagcgatgggacaccaacaaggttgatcatcatacggataaatatgagaataacaaattgattgttagacgaggacagtcattctacgtccaaatcgacttttctagaccctacgatccgcgacgagatctgtttagggttgagtacgtaattggtcgttacccacaggaaaataaaggaacatatattcctgtccccatcgtgtccgaacttcaatcgggtaagtggggcgccaagattgtgatgcgggaggatcgttcagtgagattatcgatccaaagcagccctaaatgcattgtaggaaagttccgaatgtacgtagcggtttggacaccttatggtgttttacgtacttctagaaacccagagacagatacatatattttatttaatccatggtgtgaggatgacgccgtgtatctggacaatgagaaagaacgggaagaatatgtcctcaatgatattggagttatattctatggtgaagttaacgatattaagacccgttcatggtcttatggccagtttgaagacggaattttggatacatgtctgtacgtcatggacagagctcaaatggatttaagcggacggggtaatccaattaaagtatcacgagttggttctgctatggttaacgcaaaagacgatgaaggcgttctggttggatcatgggataatatttatgcttatggagttccacctagtgcgtggacaggaagcgtggatatcttgttggaatacagatcttcagagaacccagttcggtacggacaatgttgggtcttcgctggagtatttaacacgtttttgcgctgcttgggaattccggcacgaatcgttacgaattatttttccgcccatgataatgacgcaaaccttcagatggacattttcttggaggaagacggaaacgttaactccaaattaacaaaggattcagtgtggaattaccactgctggaatgaagcgtggatgacccgtccagatctaccagtgggattcggaggctggcaggcagtcgactcaacgccacaagagaactctgatggaatgtatcgttgtggaccagctagtgtccaggccataaagcatggacatgtttgcttccaatttgacgcgcccttcgtgtttgccgaagtgaattcagatttgatttatattacggctaaaaaagacggaactcacgtagttgagaatgtcgatgctacacatatcggaaagttgatcgttactaagcagattggtggcgacgggatgatggatataacagatacttataagtttcaagaaggacaggaagaagaaagattggcgcttgaaacagcactaatgtacggagctaaaaagcccttgaacacggagggagtcatgaaaagccggagtaatgtagatatggatttcgaggttgaaaatgctgtactaggtaaagatttcaaactcagtattacctttcggaataattcacataaccggtatacgattacagcgtacttgtcggcaaacattacattctatacaggagtccccaaggcagagtttaagaaagagacttttgatgtaactcttgaaccactatcgttcaaaaaagaagctgtattgattcaggctggagagtatatgggtcaattgctagaacaagcgtctctccatttctttgtcacggctcgaatcaacgagacacgagacgttctcgcaaagcagaagagcactgttctcaccatcccggagatcataattaaagtacgtggaacgcaagttgtcggatccgacatgactgtaacagttcagttcactaacccactgaaagaaactttgcgcaacgtctgggttcaccttgatggaccaggagtcacaagaccaatgaaaaagatgtttagagaaattagacctaattcaactgtacaatgggaagaggtttgtagaccatgggtgtctggacatcgcaagctaattgctagtatgtcttccgattcactacgccatgtatatggtgagctcgatgtacaaatacaacgtcgaccatcgatg

SEQ ID NO: 2194 - DNA, 2196 bp, Artificial Sequence
  derived and/or modified sequence
atgagtgagacttctcgcacagccttcggcggccgtagggcagtacctccaaacaacagcaatgcggcagaggacgatttgcccactgtggaattgcagggagtcgttccgcgaggtgttaacctgcaggaatttctgaacgtcacgtctgtgcatctctttaaagagaggtgggataccaataaagtagatcatcataccgacaaatatgagaacaacaagctcattgttaggagaggtcaaagcttttatgtgcagatagacttttcacggccgtacgatcccaggagggatctgtttcgagtcgagtacgtcatcgggcggtacccccaggagaacaaaggcacttacatccctgttcccattgtgtctgagctgcaaagcggtaagtggggggccaagatcgtgatgcgagaagatcgtagcgttagactgagtatccagagctcgcccaaatgcatcgttgggaagtttagaatgtacgtggctgtttggacgccctatggagtgctcaggacttccaggaaccccgagacagatacttacatcctcttcaatccatggtgtgaggatgacgctgtgtatctggacaacgagaaggagcgcgaggagtacgttctgaacgatataggtgtaatcttttacggagaagtgaatgacattaaaactagatcatggtcctatggccagttcgaagatggaatactggatacttgtttgtacgttatggacagagcgcagatggacttgagcggaagaggtaatcccatcaaggtgtcacgcgttggcagtgcaatggtcaacgctaaggacgacgaaggagtgttagtcggctcctgggacaacatctacgcctatggtgtgcctcctagcgcgtggaccggaagcgtggatatcctattggaataccggagctcagagaaccctgtaaggtatggacagtgttgggttttcgctggagtgttcaacacattcctgcggtgtctgggaatccccgctcgcattgttaccaactacttcagtgctcacgacaacgatgcaaatctgcagatggatatcttcctggaggaggacggcaatgtgaatagcaaattgaccaaagatagtgtctggaattaccattgttggaacgaggcttggatgacgcgtccagacctgcccgttggatttgggggctggcaggctgtcgattctaccccacaggaaaacagcgacggaatgtacagatgcggccctgcctccgtccaggctattaagcatggacacgtatgcttccagttcgacgctcccttcgtcttcgccgaagtgaattccgatctcatttacattactgcgaaaaaggatggcacccatgtcgtcgaaaatgtggatgcgacccatatcggcaagctgatcgtgaccaaacaaattgggggagatggcatgatggacataaccgatacttacaagttccaggaggggcaagaggaggagcgtctagctttggagactgcactcatgtatggggcaaagaagcccctgaataccgaaggcgtgatgaagagccggagcaatgtggacatggacttcgaagtcgagaacgcagtgctcggcaaagatttcaaactgtctatcacattccggaacaactcccacaaccgatatactataactgcttacctgtccgccaacatcactttttacacaggcgtacccaaggccgagttcaaaaaagaaactttcgatgtgaccttagagccattgtcatttaaaaaagaagcggtactgatccaggccggcgagtatatgggccagcttttggagcaggctagcctccactttttcgtaaccgcacgcattaacgagaccagagacgtgctcgccaagcagaagtcaacagtgctcaccatacccgaaattataatcaaggtgcggggtacacaggttgttgggtctgacatgacagtgactgtacagtttactaatcccttgaaggagaccctgaggaacgtgtgggtccatctagacggaccaggcgtaacgcgtcccatgaaaaaaatgtttcgtgaaattcgaccaaacagcaccgtgcagtgggaggaggtgtgccgaccatgggtgagcggtcatcgaaagctgatcgcctccatgtcctctgactcactgagacacgtgtacggtgagctggatgtgcagatccaaagacgaccctccatg

SEQ ID NO: 2195 - DNA, 2196 bp, Artificial Sequence
  derived and/or modified sequence
atgtccgagaccagccgtactgcctttggaggtaggcgcgccgtgccacccaataacagtaatgcagcggaggatgatctccccacagtggagcttcagggagtggtgcctagaggtgtcaaccttcaggagttcttgaatgtgacatcagtgcacttatttaaggagcgttgggacaccaataaggtggatcaccacactgataaatatgagaataataagctcatcgtgaggagaggccagtccttttacgtgcagatcgatttctcaagaccctacgatccccggagagacctctttcgcgtcgagtatgtgattggccgataccctcaggaaaataaaggcacctatatccctgtgcctattgtctccgagctccagtctggaaagtggggcgccaaaattgtgatgagagaggacagaagtgtaaggctctcaattcagtcctcaccaaagtgcattgtcggaaaattccggatgtacgtggctgtgtggacaccatatggagtcctcaggacatccagaaaccctgagactgatacctatatcttgtttaatccatggtgcgaagacgacgctgtttacctggataatgaaaaagagcgcgaagagtatgtactgaacgacataggagtgattttttacggcgaagtcaacgatattaagacccggtcgtggtcctacggccagtttgaagacggaatcctggacacctgtctgtatgttatggatcgggcgcagatggacctgtcaggtcggggcaatcctattaaggtgtctagagtgggaagtgctatggtcaacgcaaaagatgacgagggcgtgttagtggggagctgggataatatctacgcctacggtgtgcctccgtccgcttggacgggttccgtggatatattgctcgagtaccggtcatcagaaaatccagtccgctacggacagtgttgggtgttcgctggggtgttcaacacatttctccgttgtctgggtatccccgccagaattgttactaattacttcagcgctcatgacaacgacgccaatctgcagatggatatttttctagaggaggacggcaacgtgaactcaaagctgacaaaagattccgtgtggaattatcactgctggaatgaagcctggatgactcgccccgacctccccgtcggctttggcgggtggcaggctgtggacagtaccccccaggagaactctgacggaatgtatagatgcgggccagcttctgttcaggccatcaaacatggtcatgtgtgtttccaatttgacgctccgttcgtgtttgccgaagtgaattctgacttgatctacatcactgctaagaaggacggcacccatgtggtcgaaaacgtggacgccacccacattggaaagcttatcgtaactaaacagatcggcggggatggaatgatggatatcaccgacacctacaagttccaggaaggccaagaagaagagaggttggccctcgagaccgccctgatgtacggggcgaaaaaacctcttaacactgagggtgtcatgaaatcaaggtcaaacgtcgacatggattttgaggtagaaaacgctgtgctagggaaggactttaaactgtcaatcaccttcaggaataacagccataatcgctacacaataaccgcctacttgtctgccaatattaccttttacacgggtgtacctaaggccgagtttaagaaggaaacctttgacgtcacgttggagccgctttcttttaagaaggaagctgtgcttatccaggccggcgagtacatgggccaacttctcgaacaggctagcttacactttttcgttaccgctcggattaacgagaccagagatgtcttggccaagcaaaagtctacagtactgaccattcccgaaattataataaaggtccgcggtacgcaggtggtcgggagcgacatgacagtcaccgtccagtttactaatcctttgaaagaaaccctgaggaatgtgtgggtgcatctagacggccctggcgtcacccggcccatgaagaagatgttccgggagatccggccgaatagcactgtgcagtgggaagaagtgtgcagaccatgggtttctggccaccgaaagctgatagcctcaatgtcatccgattcccttcgccacgtctatggggaactggacgtccagattcagcgccgaccctcaatg

SEQ ID NO: 2196 - DNA, 2196 bp, Artificial Sequence
  derived and/or modified sequence
atgagcgagacttcgcgcaccgccttcggcggacggagggccgtcccgccgaacaattccaacgccgccgaggatgacctgccgaccgtggagctgcaaggagtcgttccacggggagtcaacctgcaggagttcctgaacgtcacctccgtgcacctcttcaaagaacgctgggacaccaataaggtggatcaccatactgataagtatgaaaataataaacttatcgtacgaagaggtcagtcattctacgttcagatcgacttctcgcgaccgtacgatccacgcagagatcttttcagggtggagtacgtaatcggacgctacccgcaagaaaataagggaacttacatcccagtccctatcgtctcggaactccaatccggtaagtggggtgccaaaatcgtgatgcgcgaggatcgctcggtcagactgtcgatccaatcttccccaaagtgcatcgtggggaagttccggatgtacgtggcagtctggaccccttacggcgtgctccggacgtcgaggaacccggaaactgacacgtacattctgttcaatccgtggtgtgaagatgacgcggtctacctggataatgagaaggaaagagaagagtacgtgctgaacgacatcggcgtgatcttttacggagaggtgaacgatattaagacccggtcatggtcatacggacaattcgaagatgggatcctcgacacctgcctgtacgtcatggaccgtgcacagatggacctgagcgggcgcggaaacccgatcaaggtgtcccgcgtgggttcagcaatggtgaacgcgaaagacgacgagggagtgctggtcggctcgtgggataatatctatgcgtacggagttccgcctagcgcctggactgggagtgtggacatcctgctcgaataccgctcgtccgaaaacccggtccgctacggccaatgttgggtttttgctggtgtgttcaacacttttctccgctgcctgggaattccagccagaatcgtgactaactacttctctgctcacgacaacgatgcgaacctgcaaatggatatttttctcgaagaggacggaaacgtgaatagcaaactgaccaaggactccgtgtggaattatcattgttggaacgaagcgtggatgacccgccccgatcttccagtgggattcggaggatggcaggctgtggactcgaccccgcaggaaaactcagatggaatgtacaggtgcgggcctgcaagcgtccaggcaatcaagcacggccatgtgtgcttccagttcgacgcccctttcgtgttcgcggaagtcaattcagacttgatttacatcaccgccaagaaggacggaacgcacgtcgtcgagaatgtggatgccactcatatcggcaagctcattgtgaccaagcaaatcggaggggacggaatgatggatatcaccgacacttacaagtttcaggaggggcaggaagaggagcggctggctctcgaaaccgctctgatgtacggagccaaaaagccactgaacactgaaggcgtgatgaagtcacggtccaacgtggacatggactttgaggtggagaatgcggtcctgggcaaagacttcaaactgtccatcaccttccgcaacaattcacacaaccgctacacgattactgcatacttgagcgctaacatcaccttttacactggagtccccaaagcggagttcaagaaggaaacttttgacgtgactctcgaaccgctctcgtttaagaaggaagccgtgttgatccaggccggcgaatacatgggacaactgctggaacaggcgtccctccacttcttcgtgactgcccggatcaatgaaactcgggacgtgctcgcaaaacagaagtccacggtgcttaccatccccgaaatcatcatcaaggtcagaggtacccaggtggtgggcagcgatatgaccgtgaccgtgcagttcaccaaccctctcaaggagactctgagaaacgtgtgggtgcatttggacggaccgggcgtgacccggccaatgaagaaaatgttcagagaaattcggcccaactcgactgtgcagtgggaggaggtctgccggccgtgggtttccgggcataggaaattgatcgcctcgatgagcagcgacagccttagacacgtctacggagagctggatgtgcagatacaacggcgaccttcgatg

SEQ ID NO: 2197 - RNA, 2342 nt, Artificial Sequence
  derived and/or modified sequence
gggaaauaagagagaaaagaagaguaagaagaaauauaagagccaccaugagcgagacuucgcggacggccuuugguggacggagggccgugccuccgaacaauucaaaugcagccgaggacgaucugccgacggucgaauugcagggcgucguaccacgcggagugaaucuccaagaguuccuuaacgugaccucgguacaucuguuuaaggagcggugggacacgaauaagguggaucaucacaccgacaaauaugaaaacaacaagcucaucgucagacgcgggcagagcuuuuauguccagauugacuucucgcgaccuuacgaucccagacgagacuuguuccggguggaguaugugaucgggagguauccgcaagagaacaagggaacuuacaucccgguccccauuguaucggagcuucaguccgggaaguggggugcaaagaucguaaugcgcgaggaccggucggugcgguuguccauucaguccagcccaaaaugcaucgucgggaaauuucggauguacguagcgguguggacucccuauggugugcuuagaacaagccggaaccccgaaacugauacguacauucucuuuaacccguggugcgaggaugacgcggucuaucuggacaacgagaaggagcgcgaggaguacgugcucaaugacaucggagugauuuucuacggagaggugaaugacaucaagacgcggucguggucguaugggcaguuugaagaugggauucucgacaccugucucuaugucauggauagggcgcagauggaccugucgggaaggggaaaccccaucaaagucucgcgaguggguagcgcgaugguaaacgcgaaggacgaugaagggguccucgucggaucaugggacaacaucuacgcuuacggcgugccaccgucggccuggaccgggagcgucgacauccugcuggaauaccggucaagcgagaacccggugcgcuacgggcaguguugggucuuugcuggugucuuuaacacuuuccuucgcugucucgggauucccgcgagaauugucacgaacuacuuuucggcacaugauaaugaugcgaaucuucaaauggacaucuuuuuggaggaggacgguaaugucaauucaaaauugacgaaggacuccguguggaauuaucacuguuggaaugaggccuggaugacucggccugaucucccggugggcuucggugguuggcaggcuguagacucaacaccccaagaaaacuccgaugguauguacagaugcgggccugcgucagugcaggcgauuaagcauggacacguaugcuuccaguucgaugcacccuuugucuuugcggaagugaauagcgaccuuaucuacaucacagccaaaaaggacgggacucauguaguggagaacgucgaugccacacauauuggaaaguugauuguaacgaagcagaucggcggugauggaaugauggacauuacugacacauacaaguuccaggaggggcaggaagaagaacgccuugcauuggaaacggcguugauguauggggcgaagaaaccccuuaacacagaaggagugaugaagucgagaagcaauguggacauggauuucgagguggagaaugcagugcugggaaaagauuucaaguugucaaucaccuuucgcaacaauucccacaaucgauauacaaucacagcauaucucucggccaauaucacauucuacacgggcgugccuaaagcggaguucaagaaagaaacguuugacgugacgcucgaaccuuugucguucaaaaaggaggcaguacucauucaggcgggagaguacaugggccagcuucuugagcaagcgagccuccacuucuucguaacugcacgcaucaacgaaacccgcgacguacucgcaaaacagaaaucgacgguguugacgauccccgaaaucaucaucaaagugagagguacacaagucguaggcucagauaugaccgugacaguccaguucacuaaucccuugaaagagacacugcggaacgucuggguccaccuugauggacccggggucacaaggcccaugaagaaaauguucagagaaauccgaccuaacucgacggugcaaugggaggagguaugcaggccguggguauccggacaccgaaagcugauugccucgaugucgagcgauucccugcggcacguauacggggagcucgacgugcagauccagaggcgcccaucaaugugauaagcugccuucugcggggcuugccuucuggccaugcccuucuucucucccuugcaccuguaccucuuggucuuugaauaaagccugaguaggaag

SEQ ID NO: 2198 - protein, 2229 aa, Artificial Sequence
  derived and/or modified sequence
MFPGCPRLWVLVVLGTSWVGWGSQGTEAAQLRQFYVAAQGISWSYRPEPTNSSLNLSVTSFKKIVYREYEPYFKKEKPQSTISGLLGPTLYAEVGDIIKVHFKNKADKPLSIHPQGIRYSKLSEGASYLDHTFPAEKMDDAVAPGREYTYEWSISEDSGPTHDDPPCLTHIYYSHENLIEDFNSGLIGPLLICKKGTLTEGGTQKTFDKQIVLLFAVFDESKSWSQSSSLMYTVNGYVNGTMPDITVCAHDHISWHLLGMSSGPELFSIHFNGQVLEQNHHKVSAITLVSATSTTANMTVGPEGKWIISSLTPKHLQAGMQAYIDIKNCPKKTRNLKKITREQRRHMKRWEYFIAAEEVIWDYAPVIPANMDKKYRSQHLDNFSNQIGKHYKKVMYTQYEDESFTKHTVNPNMKEDGILGPIIRAQVRDTLKIVFKNMASRPYSIYPHGVTFSPYEDEVNSSFTSGRNNTMIRAVQPGETYTYKWNILEFDEPTENDAQCLTRPYYSDVDIMRDIASGLIGLLLICKSRSLDRQGIQRAADIEQQAVFAVFDENKSWYLEDNINKFCENPDEVKRDDPKFYESNIMSNFTLSAINGYVPESITTLGFCFDDTVQWHFCSVGTQNEILTIHFTGHSFIYGKRHEDTLTLFPMRGESVTVTMDNVGTWMLTSMNSSPRSKKLRLKFRDVKCIPDDDEDSYEIFEPPESTVMATRKMHDRLEPEDEESDADYDYQNRLAAALGIRSFRNSSLNQEEEEFNLTALALENGTEFVSSNTDIIVGSNYSSPSNISKFTVNNLAEPQKAPSHQQATTAGSPLRHLIGKNSVLNSSTAEHSSPYSEDPIEDPLQPDVTGIRLLSLGAGEFKSQEHAKHKGPKVERDQAAKHRFSWMKLLAHKVGRHLSQDTGSPSGMRPWEDLPSQDTGSPSRMRPWKDPPSDLLLLKQSNSSKILVGRWHLASEKGSYEIIQDTDEDTAVNNWLISPQNASRAWGESTPLANKPGKQSGHPKFPRVRHKSLQVRQDGGKSRLKKSQFLIKTRKKKKEKHTHHAPLSPRTFHPLRSEAYNTFSERRLKHSLVLHKSNETSLPTDLNQTLPSMDFGWIASLPDHNQNSSNDTGQASCPPGLYQTVPPEEHYQTFPIQDPDQMHSTSDPSHRSSSPELSEMLEYDRSHKSFPTDISQMSPSSEHEVWQTVISPDLSQVTLSPELSQTNLSPDLSHTTLSPELIQRNLSPALGQMPISPDLSHTTLSPDLSHTTLSLDLSQTNLSPELSQTNLSPALGQMPLSPDLSHTTLSLDFSQTNLSPELSHMTLSPELSQTNLSPALGQMPISPDLSHTTLSLDFSQTNLSPELSQTNLSPALGQMPLSPDPSHTTLSLDLSQTNLSPELSQTNLSPDLSEMPLFADLSQIPLTPDLDQMTLSPDLGETDLSPNFGQMSLSPDLSQVTLSPDISDTTLLPDLSQISPPPDLDQIFYPSESSQSLLLQEFNESFPYPDLGQMPSPSSPTLNDTFLSKEFNPLVIVGLSKDGTDYIEIIPKEEVQSSEDDYAEIDYVPYDDPYKTDVRTNINSSRDPDNIAAWYLRSNNGNRRNYYIAAEEISWDYSEFVQRETDIEDSDDIPEDTTYKKVVFRKYLDSTFTKRDPRGEYEEHLGILGPIIRAEVDDVIQVRFKNLASRPYSLHAHGLSYEKSSEGKTYEDDSPEWFKEDNAVQPNSSYTYVWHATERSGPESPGSACRAWAYYSAVNPEKDIHSGLIGPLLICQKGILHKDSNMPMDMREFVLLFMTFDEKKSWYYEKKSRSSWRLTSSEMKKSHEFHAINGMIYSLPGLKMYEQEWVRLHLLNIGGSQDIHVVHFHGQTLLENGNKQHQLGVWPLLPGSFKTLEMKASKPGWWLLNTEVGENQRAGMQTPFLIMDRDCRMPMGLSTGIISDSQIKASEFLGYWEPRLARLNNGGSYNAWSVEKLAAEFASKPWIQVDMQKEVIITGIQTQGAKHYLKSCYTTEFYVAYSSNQINWQIFKGNSTRNVMYFNGNSDASTIKENQFDPPIVARYIRISPTRAYNRPTLRLELQGCEVNGCSTPLGMENGKIENKQITASSFKKSWWGDYWEPFRARLNAQGRVNAWQAKANNNKQWLEIDLLKIKKITAIITQGCKSLSSEMYVKSYTIHYSEQGVEWKPYRLKSSMVDKIFEGNTNTKGHVKNFFNPPIISRFIRVIPKTWNQSIALRLELFGCDIY

SEQ ID NO: 2199 - protein, 2224 aa, Artificial Sequence
  derived and/or modified sequence
MFPGCPRLWVLVVLGTSWVGWGSQGTEAAQLRQFYVAAQGISWSYRPEPTNSSLNLSVTSFKKIVYREYEPYFKKEKPQSTISGLLGPTLYAEVGDIIKVHFKNKADKPLSIHPQGIRYSKLSEGASYLDHTFPAEKMDDAVAPGREYTYEWSISEDSGPTHDDPPCLTHIYYSHENLIEDFNSGLIGPLLICKKGTLTEGGTQKTFDKQIVLLFAVFDESKSWSQSSSLMYTVNGYVNGTMPDITVCAHDHISWHLLGMSSGPELFSIHFNGQVLEQNHHKVSAITLVSATSTTANMTVGPEGKWIISSLTPKHLQAGMQAYIDIKNCPKKTRNLKKITREQRRHMKRWEYFIAAEEVIWDYAPVIPANMDKKYRSQHLDNFSNQIGKHYKKVMYTQYEDESFTKHTVNPNMKEDGILGPIIRAQVRDTLKIVFKNMASRPYSIYPHGVTFSPYEDEVNSSFTSGRNNTMIRAVQPGETYTYKWNILEFDEPTENDAQCLTRPYYSDVDIMRDIASGLIGLLLICKSRSLDRQGIQRAADIEQQAVFAVFDENKSWYLEDNINKFCENPDEVKRDDPKFYESNIMSTINGYVPESITTLGFCFDDTVQWHFCSVGTQNEILTIHFTGHSFIYGKRHEDTLTLFPMRGESVTVTMDNVGTWMLTSMNSSPRSKKLRLKFRDVKCIPDDDEDSYEIFEPPESTVMATRKMHDRLEPEDEESDADYDYQNRLAAALGIRSFRNSSLNQEEEEFNLTALALENGTEFVSSNTDIIVGSNYSSPSNISKFTVNNLAEPQKAPSHQQATTAGSPLRHLIGKNSVLNSSTAEHSSPYSEDPIEDPLQPDVTGIRLLSLGAGEFKSQEHAKHKGPKVERDQAAKHRFSWMKLLAHKVGRHLSQDTGSPSGMRPWEDLPSQDTGSPSRMRPWKDPPSDLLLLKQSNSSKILVGRWHLASEKGSYEIIQDTDEDTAVNNWLISPQNASRAWGESTPLANKPGKQSGHPKFPRVRHKSLQVRQDGGKSRLKKSQFLIKTRKKKKEKHTHHAPLSPRTFHPLRSEAYNTFSERRLKHSLVLHKSNETSLPTDLNQTLPSMDFGWIASLPDHNQNSSNDTGQASCPPGLYQTVPPEEHYQTFPIQDPDQMHSTSDPSHRSSSPELSEMLEYDRSHKSFPTDISQMSPSSEHEVWQTVISPDLSQVTLSPELSQTNLSPDLSHTTLSPELIQRNLSPALGQMPISPDLSHTTLSPDLSHTTLSLDLSQTNLSPELSQTNLSPALGQMPLSPDLSHTTLSLDFSQTNLSPELSHMTLSPELSQTNLSPALGQMPISPDLSHTTLSLDFSQTNLSPELSQTNLSPALGQMPLSPDPSHTTLSLDLSQTNLSPELSQTNLSPDLSEMPLFADLSQIPLTPDLDQMTLSPDLGETDLSPNFGQMSLSPDLSQVTLSPDISDTTLLPDLSQISPPPDLDQIFYPSESSQSLLLQEFNESFPYPDLGQMPSPSSPTLNDTFLSKEFNPLVIVGLSKDGTDYIEIIPKEEVQSSEDDYAEIDYVPYDDPYKTDVRTNINSSRDPDNIAAWYLRSNNGNRRNYYIAAEEISWDYSEFVQRETDIEDSDDIPEDTTYKKVVFRKYLDSTFTKRDPRGEYEEHLGILGPIIRAEVDDVIQVRFKNLASRPYSLHAHGLSYEKSSEGKTYEDDSPEWFKEDNAVQPNSSYTYVWHATERSGPESPGSACRAWAYYSAVNPEKDIHSGLIGPLLICQKGILHKDSNMPMDMREFVLLFMTFDEKKSWYYEKKSRSSWRLTSSEMKKSHEFHAINGMIYSLPGLKMYEQEWVRLHLLNIGGSQDIHVVHFHGQTLLENGNKQHQLGVWPLLPGSFKTLEMKASKPGWWLLNTEVGENQRAGMQTPFLIMDRDCRMPMGLSTGIISDSQIKASEFLGYWEPRLARLNNGGSYNAWSVEKLAAEFASKPWIQVDMQKEVIITGIQTQGAKHYLKSCYTTEFYVAYSSNQINWQIFKGNSTRNVMYFNGNSDASTIKENQFDPPIVARYIRISPTRAYNRPTLRLELQGCEVNGCSTPLGMENGKIENKQITASSFKKSWWGDYWEPFRARLNAQGRVNAWQAKANNNKQWLEIDLLKIKKITAIITQGCKSLSSEMYVKSYTIHYSEQGVEWKPYRLKSSMVDKIFEGNTNTKGHVKNFFNPPIISRFIRVIPKTWNQSIALRLELFGCDIY

SEQ ID NO: 2200 - protein, 332 aa, Artificial Sequence [sequence omitted]

SEQ ID NO: 2201 - DNA, 6687 bp, Artificial Sequence
  derived and/or modified sequence
atgttccccggctgcccccgcctgtgggtgctggtggtgctgggcaccagctgggtgggctggggcagccagggcaccgaggccgcccagctgcgccagttctacgtggccgcccagggcatcagctggagctaccgccccgagcccaccaacagcagcctgaacctgagcgtgaccagcttcaagaagatcgtgtaccgcgagtacgagccctacttcaagaaggagaagccccagagcaccatcagcggcctgctgggccccaccctgtacgccgaggtgggcgacatcatcaaggtgcacttcaagaacaaggccgacaagcccctgagcatccacccccagggcatccgctacagcaagctgagcgagggcgccagctacctggaccacaccttccccgccgagaagatggacgacgccgtggcccccggccgcgagtacacctacgagtggagcatcagcgaggacagcggccccacccacgacgaccccccctgcctgacccacatctactacagccacgagaacctgatcgaggacttcaacagcggcctgatcggccccctgctgatctgcaagaagggcaccctgaccgagggcggcacccagaagaccttcgacaagcagatcgtgctgctgttcgccgtgttcgacgagagcaagagctggagccagagcagcagcctgatgtacaccgtgaacggctacgtgaacggcaccatgcccgacatcaccgtgtgcgcccacgaccacatcagctggcacctgctgggcatgagcagcggccccgagctgttcagcatccacttcaacggccaggtgctggagcagaaccaccacaaggtgagcgccatcaccctggtgagcgccaccagcaccaccgccaacatgaccgtgggccccgagggcaagtggatcatcagcagcctgacccccaagcacctgcaggccggcatgcaggcctacatcgacatcaagaactgccccaagaagacccgcaacctgaagaagatcacccgcgagcagcgccgccacatgaagcgctgggagtacttcatcgccgccgaggaggtgatctgggactacgcccccgtgatccccgccaacatggacaagaagtaccgcagccagcacctggacaacttcagcaaccagatcggcaagcactacaagaaggtgatgtacacccagtacgaggacgagagcttcaccaagcacaccgtgaaccccaacatgaaggaggacggcatcctgggccccatcatccgcgcccaggtgcgcgacaccctgaagatcgtgttcaagaacatggccagccgcccctacagcatctacccccacggcgtgaccttcagcccctacgaggacgaggtgaacagcagcttcaccagcggccgcaacaacaccatgatccgcgccgtgcagcccggcgagacctacacctacaagtggaacatcctggagttcgacgagcccaccgagaacgacgcccagtgcctgacccgcccctactacagcgacgtggacatcatgcgcgacatcgccagcggcctgatcggcctgctgctgatctgcaagagccgcagcctggaccgccagggcatccagcgcgccgccgacatcgagcagcaggccgtgttcgccgtgttcgacgagaacaagagctggtacctggaggacaacatcaacaagttctgcgagaaccccgacgaggtgaagcgcgacgaccccaagttctacgagagcaacatcatgagcaacttcaccctgagcgccatcaacggctacgtgcccgagagcatcaccaccctgggcttctgcttcgacgacaccgtgcagtggcacttctgcagcgtgggcacccagaacgagatcctgaccatccacttcaccggccacagcttcatctacggcaagcgccacgaggacaccctgaccctgttccccatgcgcggcgagagcgtgaccgtgaccatggacaacgtgggcacctggatgctgaccagcatgaacagcagcccccgcagcaagaagctgcgcctgaagttccgcgacgtgaagtgcatccccgacgacgacgaggacagctacgagatcttcgagccccccgagagcaccgtgatggccacccgcaagatgcacgaccgcctggagcccgaggacgaggagagcgacgccgactacgactaccagaaccgcctggccgccgccctgggcatccgcagcttccgcaacagcagcctgaaccaggaggaggaggagttcaacctgaccgccctggccctggagaacggcaccgagttcgtgagcagcaacaccgacatcatcgtgggcagcaactacagcagccccagcaacatcagcaagttcaccgtgaacaacctggccgagccccagaaggcccccagccaccagcaggccaccaccgccggcagccccctgcgccacctgatcggcaagaacagcgtgctgaacagcagcaccgccgagcacagcagcccctacagcgaggaccccatcgaggaccccctgcagcccgacgtgaccggcatccgcctgctgagcctgggcgccggcgagttcaagagccaggagcacgccaagcacaagggccccaaggtggagcgcgaccaggccgccaagcaccgcttcagctggatgaagctgctggcccacaaggtgggccgccacctgagccaggacaccggcagccccagcggcatgcgcccctgggaggacctgcccagccaggacaccggcagccccagccgcatgcgcccctggaaggacccccccagcgacctgctgctgctgaagcagagcaacagcagcaagatcctggtgggccgctggcacctggccagcgagaagggcagctacgagatcatccaggacaccgacgaggacaccgccgtgaacaactggctgatcagcccccagaacgccagccgcgcctggggcgagagcacccccctggccaacaagcccggcaagcagagcggccaccccaagttcccccgcgtgcgccacaagagcctgcaggtgcgccaggacggcggcaagagccgcctgaagaagagccagttcctgatcaagacccgcaagaagaagaaggagaagcacacccaccacgcccccctgagcccccgcaccttccaccccctgcgcagcgaggcctacaacaccttcagcgagcgccgcctgaagcacagcctggtgctgcacaagagcaacgagaccagcctgcccaccgacctgaaccagaccctgcccagcatggacttcggctggatcgccagcctgcccgaccacaaccagaacagcagcaacgacaccggccaggccagctgcccccccggcctgtaccagaccgtgccccccgaggagcactaccagaccttccccatccaggaccccgaccagatgcacagcaccagcgaccccagccaccgcagcagcagccccgagctgagcgagatgctggagtacgaccgcagccacaagagcttccccaccgacatcagccagatgagccccagcagcgagcacgaggtgtggcagaccgtgatcagccccgacctgagccaggtgaccctgagccccgagctgagccagaccaacctgagccccgacctgagccacaccaccctgagccccgagctgatccagcgcaacctgagccccgccctgggccagatgcccatcagccccgacctgagccacaccaccctgagccccgacctgagccacaccaccctgagcctggacctgagccagaccaacctgagccccgagctgagccagaccaacctgagccccgccctgggccagatgcccctgagccccgacctgagccacaccaccctgagcctggacttcagccagaccaacctgagccccgagctgagccacatgaccctgagccccgagctgagccagaccaacctgagccccgccctgggccagatgcccatcagccccgacctgagccacaccaccctgagcctggacttcagccagaccaacctgagccccgagctgagccagaccaacctgagccccgccctgggccagatgcccctgagccccgaccccagccacaccaccctgagcctggacctgagccagaccaacctgagccccgagctgagccagaccaacctgagccccgacctgagcgagatgcccctgttcgccgacctgagccagatccccctgacccccgacctggaccagatgaccctgagccccgacctgggcgagaccgacctgagccccaacttcggccagatgagcctgagccccgacctgagccaggtgaccctgagccccgacatcagcgacaccaccctgctgcccgacctgagccagatcagccccccccccgacctggaccagatcttctaccccagcgagagcagccagagcctgctgctgcaggagttcaacgagagcttcccctaccccgacctgggccagatgcccagccccagcagccccaccctgaacgacaccttcctgagcaaggagttcaaccccctggtgatcgtgggcctgagcaaggacggcaccgactacatcgagatcatccccaaggaggaggtgcagagcagcgaggacgactacgccgagatcgactacgtgccctacgacgacccctacaagaccgacgtgcgcaccaacatcaacagcagccgcgaccccgacaacatcgccgcctggtacctgcgcagcaacaacggcaaccgccgcaactactacatcgccgccgaggagatcagctgggactacagcgagttcgtgcagcgcgagaccgacatcgaggacagcgacgacatccccgaggacaccacctacaagaaggtggtgttccgcaagtacctggacagcaccttcaccaagcgcgacccccgcggcgagtacgaggagcacctgggcatcctgggccccatcatccgcgccgaggtggacgacgtgatccaggtgcgcttcaagaacctggccagccgcccctacagcctgcacgcccacggcctgagctacgagaagagcagcgagggcaagacctacgaggacgacagccccgagtggttcaaggaggacaacgccgtgcagcccaacagcagctacacctacgtgtggcacgccaccgagcgcagcggccccgagagccccggcagcgcctgccgcgcctgggcctactacagcgccgtgaaccccgagaaggacatccacagcggcctgatcggccccctgctgatctgccagaagggcatcctgcacaaggacagcaacatgcccatggacatgcgcgagttcgtgctgctgttcatgaccttcgacgagaagaagagctggtactacgagaagaagagccgcagcagctggcgcctgaccagcagcgagatgaagaagagccacgagttccacgccatcaacggcatgatctacagcctgcccggcctgaagatgtacgagcaggagtgggtgcgcctgcacctgctgaacatcggcggcagccaggacatccacgtggtgcacttccacggccagaccctgctggagaacggcaacaagcagcaccagctgggcgtgtggcccctgctgcccggcagcttcaagaccctggagatgaaggccagcaagcccggctggtggctgctgaacaccgaggtgggcgagaaccagcgcgccggcatgcagacccccttcctgatcatggaccgcgactgccgcatgcccatgggcctgagcaccggcatcatcagcgacagccagatcaaggccagcgagttcctgggctactgggagccccgcctggcccgcctgaacaacggcggcagctacaacgcctggagcgtggagaagctggccgccgagttcgccagcaagccctggatccaggtggacatgcagaaggaggtgatcatcaccggcatccagacccagggcgccaagcactacctgaagagctgctacaccaccgagttctacgtggcctacagcagcaaccagatcaactggcagatcttcaagggcaacagcacccgcaacgtgatgtacttcaacggcaacagcgacgccagcaccatcaaggagaaccagttcgacccccccatcgtggcccgctacatccgcatcagccccacccgcgcctacaaccgccccaccctgcgcctggagctgcagggctgcgaggtgaacggctgcagcacccccctgggcatggagaacggcaagatcgagaacaagcagatcaccgccagcagcttcaagaagagctggtggggcgactactgggagcccttccgcgcccgcctgaacgcccagggccgcgtgaacgcctggcaggccaaggccaacaacaacaagcagtggctggagatcgacctgctgaagatcaagaagatcaccgccatcatcacccagggctgcaagagcctgagcagcgagatgtacgtgaagagctacaccatccactacagcgagcagggcgtggagtggaagccctaccgcctgaagagcagcatggtggacaagatcttcgagggcaacaccaacaccaagggccacgtgaagaacttcttcaacccccccatcatcagccgcttcatccgcgtgatccccaagacctggaaccagagcatcgccctgcgcctggagctgttcggctgcgacatctac

SEQ ID NO: 2202 - DNA, 6672 bp, Artificial Sequence
  derived and/or modified sequence
atgttccccggctgcccccgcctgtgggtgctggtggtgctgggcaccagctgggtgggctggggcagccagggcaccgaggccgcccagctgcgccagttctacgtggccgcccagggcatcagctggagctaccgccccgagcccaccaacagcagcctgaacctgagcgtgaccagcttcaagaagatcgtgtaccgcgagtacgagccctacttcaagaaggagaagccccagagcaccatcagcggcctgctgggccccaccctgtacgccgaggtgggcgacatcatcaaggtgcacttcaagaacaaggccgacaagcccctgagcatccacccccagggcatccgctacagcaagctgagcgagggcgccagctacctggaccacaccttccccgccgagaagatggacgacgccgtggcccccggccgcgagtacacctacgagtggagcatcagcgaggacagcggccccacccacgacgaccccccctgcctgacccacatctactacagccacgagaacctgatcgaggacttcaacagcggcctgatcggccccctgctgatctgcaagaagggcaccctgaccgagggcggcacccagaagaccttcgacaagcagatcgtgctgctgttcgccgtgttcgacgagagcaagagctggagccagagcagcagcctgatgtacaccgtgaacggctacgtgaacggcaccatgcccgacatcaccgtgtgcgcccacgaccacatcagctggcacctgctgggcatgagcagcggccccgagctgttcagcatccacttcaacggccaggtgctggagcagaaccaccacaaggtgagcgccatcaccctggtgagcgccaccagcaccaccgccaacatgaccgtgggccccgagggcaagtggatcatcagcagcctgacccccaagcacctgcaggccggcatgcaggcctacatcgacatcaagaactgccccaagaagacccgcaacctgaagaagatcacccgcgagcagcgccgccacatgaagcgctgggagtacttcatcgccgccgaggaggtgatctgggactacgcccccgtgatccccgccaacatggacaagaagtaccgcagccagcacctggacaacttcagcaaccagatcggcaagcactacaagaaggtgatgtacacccagtacgaggacgagagcttcaccaagcacaccgtgaaccccaacatgaaggaggacggcatcctgggccccatcatccgcgcccaggtgcgcgacaccctgaagatcgtgttcaagaacatggccagccgcccctacagcatctacccccacggcgtgaccttcagcccctacgaggacgaggtgaacagcagcttcaccagcggccgcaacaacaccatgatccgcgccgtgcagcccggcgagacctacacctacaagtggaacatcctggagttcgacgagcccaccgagaacgacgcccagtgcctgacccgcccctactacagcgacgtggacatcatgcgcgacatcgccagcggcctgatcggcctgctgctgatctgcaagagccgcagcctggaccgccagggcatccagcgcgccgccgacatcgagcagcaggccgtgttcgccgtgttcgacgagaacaagagctggtacctggaggacaacatcaacaagttctgcgagaaccccgacgaggtgaagcgcgacgaccccaagttctacgagagcaacatcatgagcaccatcaacggctacgtgcccgagagcatcaccaccctgggcttctgcttcgacgacaccgtgcagtggcacttctgcagcgtgggcacccagaacgagatcctgaccatccacttcaccggccacagcttcatctacggcaagcgccacgaggacaccctgaccctgttccccatgcgcggcgagagcgtgaccgtgaccatggacaacgtgggcacctggatgctgaccagcatgaacagcagcccccgcagcaagaagctgcgcctgaagttccgcgacgtgaagtgcatccccgacgacgacgaggacagctacgagatcttcgagccccccgagagcaccgtgatggccacccgcaagatgcacgaccgcctggagcccgaggacgaggagagcgacgccgactacgactaccagaaccgcctggccgccgccctgggcatccgcagcttccgcaacagcagcctgaaccaggaggaggaggagttcaacctgaccgccctggccctggagaacggcaccgagttcgtgagcagcaacaccgacatcatcgtgggcagcaactacagcagccccagcaacatcagcaagttcaccgtgaacaacctggccgagccccagaaggcccccagccaccagcaggccaccaccgccggcagccccctgcgccacctgatcggcaagaacagcgtgctgaacagcagcaccgccgagcacagcagcccctacagcgaggaccccatcgaggaccccctgcagcccgacgtgaccggcatccgcctgctgagcctgggcgccggcgagttcaagagccaggagcacgccaagcacaagggccccaaggtggagcgcgaccaggccgccaagcaccgcttcagctggatgaagctgctggcccacaaggtgggccgccacctgagccaggacaccggcagccccagcggcatgcgcccctgggaggacctgcccagccaggacaccggcagccccagccgcatgcgcccctggaaggacccccccagcgacctgctgctgctgaagcagagcaacagcagcaagatcctggtgggccgctggcacctggccagcgagaagggcagctacgagatcatccaggacaccgacgaggacaccgccgtgaacaactggctgatcagcccccagaacgccagccgcgcctggggcgagagcacccccctggccaacaagcccggcaagcagagcggccaccccaagttcccccgcgtgcgccacaagagcctgcaggtgcgccaggacggcggcaagagccgcctgaagaagagccagttcctgatcaagacccgcaagaagaagaaggagaagcacacccaccacgcccccctgagcccccgcaccttccaccccctgcgcagcgaggcctacaacaccttcagcgagcgccgcctgaagcacagcctggtgctgcacaagagcaacgagaccagcctgcccaccgacctgaaccagaccctgcccagcatggacttcggctggatcgccagcctgcccgaccacaaccagaacagcagcaacgacaccggccaggccagctgcccccccggcctgtaccagaccgtgccccccgaggagcactaccagaccttccccatccaggaccccgaccagatgcacagcaccagcgaccccagccaccgcagcagcagccccgagctgagcgagatgctggagtacgaccgcagccacaagagcttccccaccgacatcagccagatgagccccagcagcgagcacgaggtgtggcagaccgtgatcagccccgacctgagccaggtgaccctgagccccgagctgagccagaccaacctgagccccgacctgagccacaccaccctgagccccgagctgatccagcgcaacctgagccccgccctgggccagatgcccatcagccccgacctgagccacaccaccctgagccccgacctgagccacaccaccctgagcctggacctgagccagaccaacctgagccccgagctgagccagaccaacctgagccccgccctgggccagatgcccctgagccccgacctgagccacaccaccctgagcctggacttcagccagaccaacctgagccccgagctgagccacatgaccctgagccccgagctgagccagaccaacctgagccccgccctgggccagatgcccatcagccccgacctgagccacaccaccctgagcctggacttcagccagaccaacctgagccccgagctgagccagaccaacctgagccccgccctgggccagatgcccctgagccccgaccccagccacaccaccctgagcctggacctgagccagaccaacctgagccccgagctgagccagaccaacctgagccccgacctgagcgagatgcccctgttcgccgacctgagccagatccccctgacccccgacctggaccagatgaccctgagccccgacctgggcgagaccgacctgagccccaacttcggccagatgagcctgagccccgacctgagccaggtgaccctgagccccgacatcagcgacaccaccctgctgcccgacctgagccagatcagccccccccccgacctggaccagatcttctaccccagcgagagcagccagagcctgctgctgcaggagttcaacgagagcttcccctaccccgacctgggccagatgcccagccccagcagccccaccctgaacgacaccttcctgagcaaggagttcaaccccctggtgatcgtgggcctgagcaaggacggcaccgactacatcgagatcatccccaaggaggaggtgcagagcagcgaggacgactacgccgagatcgactacgtgccctacgacgacccctacaagaccgacgtgcgcaccaacatcaacagcagccgcgaccccgacaacatcgccgcctggtacctgcgcagcaacaacggcaaccgccgcaactactacatcgccgccgaggagatcagctgggactacagcgagttcgtgcagcgcgagaccgacatcgaggacagcgacgacatccccgaggacaccacctacaagaaggtggtgttccgcaagtacctggacagcaccttcaccaagcgcgacccccgcggcgagtacgaggagcacctgggcatcctgggccccatcatccgcgccgaggtggacgacgtgatccaggtgcgcttcaagaacctggccagccgcccctacagcctgcacgcccacggcctgagctacgagaagagcagcgagggcaagacctacgaggacgacagccccgagtggttcaaggaggacaacgccgtgcagcccaacagcagctacacctacgtgtggcacgccaccgagcgcagcggccccgagagccccggcagcgcctgccgcgcctgggcctactacagcgccgtgaaccccgagaaggacatccacagcggcctgatcggccccctgctgatctgccagaagggcatcctgcacaaggacagcaacatgcccatggacatgcgcgagttcgtgctgctgttcatgaccttcgacgagaagaagagctggtactacgagaagaagagccgcagcagctggcgcctgaccagcagcgagatgaagaagagccacgagttccacgccatcaacggcatgatctacagcctgcccggcctgaagatgtacgagcaggagtgggtgcgcctgcacctgctgaacatcggcggcagccaggacatccacgtggtgcacttccacggccagaccctgctggagaacggcaacaagcagcaccagctgggcgtgtggcccctgctgcccggcagcttcaagaccctggagatgaaggccagcaagcccggctggtggctgctgaacaccgaggtgggcgagaaccagcgcgccggcatgcagacccccttcctgatcatggaccgcgactgccgcatgcccatgggcctgagcaccggcatcatcagcgacagccagatcaaggccagcgagttcctgggctactgggagccccgcctggcccgcctgaacaacggcggcagctacaacgcctggagcgtggagaagctggccgccgagttcgccagcaagccctggatccaggtggacatgcagaaggaggtgatcatcaccggcatccagacccagggcgccaagcactacctgaagagctgctacaccaccgagttctacgtggcctacagcagcaaccagatcaactggcagatcttcaagggcaacagcacccgcaacgtgatgtacttcaacggcaacagcgacgccagcaccatcaaggagaaccagttcgacccccccatcgtggcccgctacatccgcatcagccccacccgcgcctacaaccgccccaccctgcgcctggagctgcagggctgcgaggtgaacggctgcagcacccccctgggcatggagaacggcaagatcgagaacaagcagatcaccgccagcagcttcaagaagagctggtggggcgactactgggagcccttccgcgcccgcctgaacgcccagggccgcgtgaacgcctggcaggccaaggccaacaacaacaagcagtggctggagatcgacctgctgaagatcaagaagatcaccgccatcatcacccagggctgcaagagcctgagcagcgagatgtacgtgaagagctacaccatccactacagcgagcagggcgtggagtggaagccctaccgcctgaagagcagcatggtggacaagatcttcgagggcaacaccaacaccaagggccacgtgaagaacttcttcaacccccccatcatcagccgcttcatccgcgtgatccccaagacctggaaccagagcatcgccctgcgcctggagctgttcggctgcgacatctac

SEQ ID NO: 2203 - DNA, 996 bp, Artificial Sequence
  derived and/or modified sequence
atggacgacgccgtggcccccggccgcgagtacacctacgagtggagcatcagcgaggacagcggccccacccacgacgaccccccctgcctgacccacatctactacagccacgagaacctgatcgaggacttcaacagcggcctgatcggccccctgctgatctgcaagaagggcaccctgaccgagggcggcacccagaagaccttcgacaagcagatcgtgctgctgttcgccgtgttcgacgagagcaagagctggagccagagcagcagcctgatgtacaccgtgaacggctacgtgaacggcaccatgcccgacatcaccgtgtgcgcccacgaccacatcagctggcacctgctgggcatgagcagcggccccgagctgttcagcatccacttcaacggccaggtgctggagcagaaccaccacaaggtgagcgccatcaccctggtgagcgccaccagcaccaccgccaacatgaccgtgggccccgagggcaagtggatcatcagcagcctgacccccaagcacctgcaggccggcatgcaggcctacatcgacatcaagaactgccccaagaagacccgcaacctgaagaagatcacccgcgagcagcgccgccacatgaagcgctgggagtacttcatcgccgccgaggaggtgatctgggactacgcccccgtgatccccgccaacatggacaagaagtaccgcagccagcacctggacaacttcagcaaccagatcggcaagcactacaagaaggtgatgtacacccagtacgaggacgagagcttcaccaagcacaccgtgaaccccaacatgaaggaggacggcatcctgggccccatcatccgcgcccaggtgcgcgacaccctgaagatcgtgttcaagaacatggccagccgcccctacagcatctacccccacggcgtgaccttcagcccctacgaggacgaggtgaacagcagcttcaccagcggcaccaccccc

SEQ ID NO: 2204 - DNA, 6690 bp, Artificial Sequence
  derived and/or modified sequence
atgttccccggctgccccagactgtgggtgctggtggtgctgggcaccagctgggtgggctggggcagccagggcaccgaggccgcccagctgagacagttctacgtggccgcccagggcatcagctggagctacagacccgagcccaccaacagcagcctgaacctgagcgtgaccagcttcaagaagatcgtgtacagagagtacgagccctacttcaagaaggagaagccccagagcaccatcagcggcctgctgggccccaccctgtacgccgaggtgggcgacatcatcaaggtgcacttcaagaacaaggccgacaagcccctgagcatccacccccagggcatcagatacagcaagctgagcgagggcgccagctacctggaccacaccttccccgccgagaagatggacgacgccgtggcccccggcagagagtacacctacgagtggagcatcagcgaggacagcggccccacccacgacgaccccccctgcctgacccacatctactacagccacgagaacctgatcgaggacttcaacagcggcctgatcggccccctgctgatctgcaagaagggcaccctgaccgagggcggcacccagaagaccttcgacaagcagatcgtgctgctgttcgccgtgttcgacgagagcaagagctggagccagagcagcagcctgatgtacaccgtgaacggctacgtgaacggcaccatgcccgacatcaccgtgtgcgcccacgaccacatcagctggcacctgctgggcatgagcagcggccccgagctgttcagcatccacttcaacggccaggtgctggagcagaaccaccacaaggtgagcgccatcaccctggtgagcgccaccagcaccaccgccaacatgaccgtgggccccgagggcaagtggatcatcagcagcctgacccccaagcacctgcaggccggcatgcaggcctacatcgacatcaagaactgccccaagaagaccagaaacctgaagaagatcaccagagagcagagaagacacatgaagagatgggagtacttcatcgccgccgaggaggtgatctgggactacgcccccgtgatccccgccaacatggacaagaagtacagaagccagcacctggacaacttcagcaaccagatcggcaagcactacaagaaggtgatgtacacccagtacgaggacgagagcttcaccaagcacaccgtgaaccccaacatgaaggaggacggcatcctgggccccatcatcagagcccaggtgagagacaccctgaagatcgtgttcaagaacatggccagcagaccctacagcatctacccccacggcgtgaccttcagcccctacgaggacgaggtgaacagcagcttcaccagcggcagaaacaacaccatgatcagagccgtgcagcccggcgagacctacacctacaagtggaacatcctggagttcgacgagcccaccgagaacgacgcccagtgcctgaccagaccctactacagcgacgtggacatcatgagagacatcgccagcggcctgatcggcctgctgctgatctgcaagagcagaagcctggacagacagggcatccagagagccgccgacatcgagcagcaggccgtgttcgccgtgttcgacgagaacaagagctggtacctggaggacaacatcaacaagttctgcgagaaccccgacgaggtgaagagagacgaccccaagttctacgagagcaacatcatgagcaacttcaccctgagcgccatcaacggctacgtgcccgagagcatcaccaccctgggcttctgcttcgacgacaccgtgcagtggcacttctgcagcgtgggcacccagaacgagatcctgaccatccacttcaccggccacagcttcatctacggcaagagacacgaggacaccctgaccctgttccccatgagaggcgagagcgtgaccgtgaccatggacaacgtgggcacctggatgctgaccagcatgaacagcagccccagaagcaagaagctgagactgaagttcagagacgtgaagtgcatccccgacgacgacgaggacagctacgagatcttcgagccccccgagagcaccgtgatggccaccagaaagatgcacgacagactggagcccgaggacgaggagagcgacgccgactacgactaccagaacagactggccgccgccctgggcatcagaagcttcagaaacagcagcctgaaccaggaggaggaggagttcaacctgaccgccctggccctggagaacggcaccgagttcgtgagcagcaacaccgacatcatcgtgggcagcaactacagcagccccagcaacatcagcaagttcaccgtgaacaacctggccgagccccagaaggcccccagccaccagcaggccaccaccgccggcagccccctgagacacctgatcggcaagaacagcgtgctgaacagcagcaccgccgagcacagcagcccctacagcgaggaccccatcgaggaccccctgcagcccgacgtgaccggcatcagactgctgagcctgggcgccggcgagttcaagagccaggagcacgccaagcacaagggccccaaggtggagagagaccaggccgccaagcacagattcagctggatgaagctgctggcccacaaggtgggcagacacctgagccaggacaccggcagccccagcggcatgagaccctgggaggacctgcccagccaggacaccggcagccccagcagaatgagaccctggaaggacccccccagcgacctgctgctgctgaagcagagcaacagcagcaagatcctggtgggcagatggcacctggccagcgagaagggcagctacgagatcatccaggacaccgacgaggacaccgccgtgaacaactggctgatcagcccccagaacgccagcagagcctggggcgagagcacccccctggccaacaagcccggcaagcagagcggccaccccaagttccccagagtgagacacaagagcctgcaggtgagacaggacggcggcaagagcagactgaagaagagccagttcctgatcaagaccagaaagaagaagaaggagaagcacacccaccacgcccccctgagccccagaaccttccaccccctgagaagcgaggcctacaacaccttcagcgagagaagactgaagcacagcctggtgctgcacaagagcaacgagaccagcctgcccaccgacctgaaccagaccctgcccagcatggacttcggctggatcgccagcctgcccgaccacaaccagaacagcagcaacgacaccggccaggccagctgcccccccggcctgtaccagaccgtgccccccgaggagcactaccagaccttccccatccaggaccccgaccagatgcacagcaccagcgaccccagccacagaagcagcagccccgagctgagcgagatgctggagtacgacagaagccacaagagcttccccaccgacatcagccagatgagccccagcagcgagcacgaggtgtggcagaccgtgatcagccccgacctgagccaggtgaccctgagccccgagctgagccagaccaacctgagccccgacctgagccacaccaccctgagccccgagctgatccagagaaacctgagccccgccctgggccagatgcccatcagccccgacctgagccacaccaccctgagccccgacctgagccacaccaccctgagcctggacctgagccagaccaacctgagccccgagctgagccagaccaacctgagccccgccctgggccagatgcccctgagccccgacctgagccacaccaccctgagcctggacttcagccagaccaacctgagccccgagctgagccacatgaccctgagccccgagctgagccagaccaacctgagccccgccctgggccagatgcccatcagccccgacctgagccacaccaccctgagcctggacttcagccagaccaacctgagccccgagctgagccagaccaacctgagccccgccctgggccagatgcccctgagccccgaccccagccacaccaccctgagcctggacctgagccagaccaacctgagccccgagctgagccagaccaacctgagccccgacctgagcgagatgcccctgttcgccgacctgagccagatccccctgacccccgacctggaccagatgaccctgagccccgacctgggcgagaccgacctgagccccaacttcggccagatgagcctgagccccgacctgagccaggtgaccctgagccccgacatcagcgacaccaccctgctgcccgacctgagccagatcagccccccccccgacctggaccagatcttctaccccagcgagagcagccagagcctgctgctgcaggagttcaacgagagcttcccctaccccgacctgggccagatgcccagccccagcagccccaccctgaacgacaccttcctgagcaaggagttcaaccccctggtgatcgtgggcctgagcaaggacggcaccgactacatcgagatcatccccaaggaggaggtgcagagcagcgaggacgactacgccgagatcgactacgtgccctacgacgacccctacaagaccgacgtgagaaccaacatcaacagcagcagagaccccgacaacatcgccgcctggtacctgagaagcaacaacggcaacagaagaaactactacatcgccgccgaggagatcagctgggactacagcgagttcgtgcagagagagaccgacatcgaggacagcgacgacatccccgaggacaccacctacaagaaggtggtgttcagaaagtacctggacagcaccttcaccaagagagaccccagaggcgagtacgaggagcacctgggcatcctgggccccatcatcagagccgaggtggacgacgtgatccaggtgagattcaagaacctggccagcagaccctacagcctgcacgcccacggcctgagctacgagaagagcagcgagggcaagacctacgaggacgacagccccgagtggttcaaggaggacaacgccgtgcagcccaacagcagctacacctacgtgtggcacgccaccgagagaagcggccccgagagccccggcagcgcctgcagagcctgggcctactacagcgccgtgaaccccgagaaggacatccacagcggcctgatcggccccctgctgatctgccagaagggcatcctgcacaaggacagcaacatgcccatggacatgagagagttcgtgctgctgttcatgaccttcgacgagaagaagagctggtactacgagaagaagagcagaagcagctggagactgaccagcagcgagatgaagaagagccacgagttccacgccatcaacggcatgatctacagcctgcccggcctgaagatgtacgagcaggagtgggtgagactgcacctgctgaacatcggcggcagccaggacatccacgtggtgcacttccacggccagaccctgctggagaacggcaacaagcagcaccagctgggcgtgtggcccctgctgcccggcagcttcaagaccctggagatgaaggccagcaagcccggctggtggctgctgaacaccgaggtgggcgagaaccagagagccggcatgcagacccccttcctgatcatggacagagactgcagaatgcccatgggcctgagcaccggcatcatcagcgacagccagatcaaggccagcgagttcctgggctactgggagcccagactggccagactgaacaacggcggcagctacaacgcctggagcgtggagaagctggccgccgagttcgccagcaagccctggatccaggtggacatgcagaaggaggtgatcatcaccggcatccagacccagggcgccaagcactacctgaagagctgctacaccaccgagttctacgtggcctacagcagcaaccagatcaactggcagatcttcaagggcaacagcaccagaaacgtgatgtacttcaacggcaacagcgacgccagcaccatcaaggagaaccagttcgacccccccatcgtggccagatacatcagaatcagccccaccagagcctacaacagacccaccctgagactggagctgcagggctgcgaggtgaacggctgcagcacccccctgggcatggagaacggcaagatcgagaacaagcagatcaccgccagcagcttcaagaagagctggtggggcgactactgggagcccttcagagccagactgaacgcccagggcagagtgaacgcctggcaggccaaggccaacaacaacaagcagtggctggagatcgacctgctgaagatcaagaagatcaccgccatcatcacccagggctgcaagagcctgagcagcgagatgtacgtgaagagctacaccatccactacagcgagcagggcgtggagtggaagccctacagactgaagagcagcatggtggacaagatcttcgagggcaacaccaacaccaagggccacgtgaagaacttcttcaacccccccatcatcagcagattcatcagagtgatccccaagacctggaaccagagcatcgccctgagactggagctgttcggctgcgacatctactag

SEQ ID NO: 2205 - DNA, 6675 bp, Artificial Sequence
  derived and/or modified sequence
atgttccccggctgccccagactgtgggtgctggtggtgctgggcaccagctgggtgggctggggcagccagggcaccgaggccgcccagctgagacagttctacgtggccgcccagggcatcagctggagctacagacccgagcccaccaacagcagcctgaacctgagcgtgaccagcttcaagaagatcgtgtacagagagtacgagccctacttcaagaaggagaagccccagagcaccatcagcggcctgctgggccccaccctgtacgccgaggtgggcgacatcatcaaggtgcacttcaagaacaaggccgacaagcccctgagcatccacccccagggcatcagatacagcaagctgagcgagggcgccagctacctggaccacaccttccccgccgagaagatggacgacgccgtggcccccggcagagagtacacctacgagtggagcatcagcgaggacagcggccccacccacgacgaccccccctgcctgacccacatctactacagccacgagaacctgatcgaggacttcaacagcggcctgatcggccccctgctgatctgcaagaagggcaccctgaccgagggcggcacccagaagaccttcgacaagcagatcgtgctgctgttcgccgtgttcgacgagagcaagagctggagccagagcagcagcctgatgtacaccgtgaacggctacgtgaacggcaccatgcccgacatcaccgtgtgcgcccacgaccacatcagctggcacctgctgggcatgagcagcggccccgagctgttcagcatccacttcaacggccaggtgctggagcagaaccaccacaaggtgagcgccatcaccctggtgagcgccaccagcaccaccgccaacatgaccgtgggccccgagggcaagtggatcatcagcagcctgacccccaagcacctgcaggccggcatgcaggcctacatcgacatcaagaactgccccaagaagaccagaaacctgaagaagatcaccagagagcagagaagacacatgaagagatgggagtacttcatcgccgccgaggaggtgatctgggactacgcccccgtgatccccgccaacatggacaagaagtacagaagccagcacctggacaacttcagcaaccagatcggcaagcactacaagaaggtgatgtacacccagtacgaggacgagagcttcaccaagcacaccgtgaaccccaacatgaaggaggacggcatcctgggccccatcatcagagcccaggtgagagacaccctgaagatcgtgttcaagaacatggccagcagaccctacagcatctacccccacggcgtgaccttcagcccctacgaggacgaggtgaacagcagcttcaccagcggcagaaacaacaccatgatcagagccgtgcagcccggcgagacctacacctacaagtggaacatcctggagttcgacgagcccaccgagaacgacgcccagtgcctgaccagaccctactacagcgacgtggacatcatgagagacatcgccagcggcctgatcggcctgctgctgatctgcaagagcagaagcctggacagacagggcatccagagagccgccgacatcgagcagcaggccgtgttcgccgtgttcgacgagaacaagagctggtacctggaggacaacatcaacaagttctgcgagaaccccgacgaggtgaagagagacgaccccaagttctacgagagcaacatcatgagcaccatcaacggctacgtgcccgagagcatcaccaccctgggcttctgcttcgacgacaccgtgcagtggcacttctgcagcgtgggcacccagaacgagatcctgaccatccacttcaccggccacagcttcatctacggcaagagacacgaggacaccctgaccctgttccccatgagaggcgagagcgtgaccgtgaccatggacaacgtgggcacctggatgctgaccagcatgaacagcagccccagaagcaagaagctgagactgaagttcagagacgtgaagtgcatccccgacgacgacgaggacagctacgagatcttcgagccccccgagagcaccgtgatggccaccagaaagatgcacgacagactggagcccgaggacgaggagagcgacgccgactacgactaccagaacagactggccgccgccctgggcatcagaagcttcagaaacagcagcctgaaccaggaggaggaggagttcaacctgaccgccctggccctggagaacggcaccgagttcgtgagcagcaacaccgacatcatcgtgggcagcaactacagcagccccagcaacatcagcaagttcaccgtgaacaacctggccgagccccagaaggcccccagccaccagcaggccaccaccgccggcagccccctgagacacctgatcggcaagaacagcgtgctgaacagcagcaccgccgagcacagcagcccctacagcgaggaccccatcgaggaccccctgcagcccgacgtgaccggcatcagactgctgagcctgggcgccggcgagttcaagagccaggagcacgccaagcacaagggccccaaggtggagagagaccaggccgccaagcacagattcagctggatgaagctgctggcccacaaggtgggcagacacctgagccaggacaccggcagccccagcggcatgagaccctgggaggacctgcccagccaggacaccggcagccccagcagaatgagaccctggaaggacccccccagcgacctgctgctgctgaagcagagcaacagcagcaagatcctggtgggcagatggcacctggccagcgagaagggcagctacgagatcatccaggacaccgacgaggacaccgccgtgaacaactggctgatcagcccccagaacgccagcagagcctggggcgagagcacccccctggccaacaagcccggcaagcagagcggccaccccaagttccccagagtgagacacaagagcctgcaggtgagacaggacggcggcaagagcagactgaagaagagccagttcctgatcaagaccagaaagaagaagaaggagaagcacacccaccacgcccccctgagccccagaaccttccaccccctgagaagcgaggcctacaacaccttcagcgagagaagactgaagcacagcctggtgctgcacaagagcaacgagaccagcctgcccaccgacctgaaccagaccctgcccagcatggacttcggctggatcgccagcctgcccgaccacaaccagaacagcagcaacgacaccggccaggccagctgcccccccggcctgtaccagaccgtgccccccgaggagcactaccagaccttccccatccaggaccccgaccagatgcacagcaccagcgaccccagccacagaagcagcagccccgagctgagcgagatgctggagtacgacagaagccacaagagcttccccaccgacatcagccagatgagccccagcagcgagcacgaggtgtggcagaccgtgatcagccccgacctgagccaggtgaccctgagccccgagctgagccagaccaacctgagccccgacctgagccacaccaccctgagccccgagctgatccagagaaacctgagccccgccctgggccagatgcccatcagccccgacctgagccacaccaccctgagccccgacctgagccacaccaccctgagcctggacctgagccagaccaacctgagccccgagctgagccagaccaacctgagccccgccctgggccagatgcccctgagccccgacctgagccacaccaccctgagcctggacttcagccagaccaacctgagccccgagctgagccacatgaccctgagccccgagctgagccagaccaacctgagccccgccctgggccagatgcccatcagccccgacctgagccacaccaccctgagcctggacttcagccagaccaacctgagccccgagctgagccagaccaacctgagccccgccctgggccagatgcccctgagccccgaccccagccacaccaccctgagcctggacctgagccagaccaacctgagccccgagctgagccagaccaacctgagccccgacctgagcgagatgcccctgttcgccgacctgagccagatccccctgacccccgacctggaccagatgaccctgagccccgacctgggcgagaccgacctgagccccaacttcggccagatgagcctgagccccgacctgagccaggtgaccctgagccccgacatcagcgacaccaccctgctgcccgacctgagccagatcagccccccccccgacctggaccagatcttctaccccagcgagagcagccagagcctgctgctgcaggagttcaacgagagcttcccctaccccgacctgggccagatgcccagccccagcagccccaccctgaacgacaccttcctgagcaaggagttcaaccccctggtgatcgtgggcctgagcaaggacggcaccgactacatcgagatcatccccaaggaggaggtgcagagcagcgaggacgactacgccgagatcgactacgtgccctacgacgacccctacaagaccgacgtgagaaccaacatcaacagcagcagagaccccgacaacatcgccgcctggtacctgagaagcaacaacggcaacagaagaaactactacatcgccgccgaggagatcagctgggactacagcgagttcgtgcagagagagaccgacatcgaggacagcgacgacatccccgaggacaccacctacaagaaggtggtgttcagaaagtacctggacagcaccttcaccaagagagaccccagaggcgagtacgaggagcacctgggcatcctgggccccatcatcagagccgaggtggacgacgtgatccaggtgagattcaagaacctggccagcagaccctacagcctgcacgcccacggcctgagctacgagaagagcagcgagggcaagacctacgaggacgacagccccgagtggttcaaggaggacaacgccgtgcagcccaacagcagctacacctacgtgtggcacgccaccgagagaagcggccccgagagccccggcagcgcctgcagagcctgggcctactacagcgccgtgaaccccgagaaggacatccacagcggcctgatcggccccctgctgatctgccagaagggcatcctgcacaaggacagcaacatgcccatggacatgagagagttcgtgctgctgttcatgaccttcgacgagaagaagagctggtactacgagaagaagagcagaagcagctggagactgaccagcagcgagatgaagaagagccacgagttccacgccatcaacggcatgatctacagcctgcccggcctgaagatgtacgagcaggagtgggtgagactgcacctgctgaacatcggcggcagccaggacatccacgtggtgcacttccacggccagaccctgctggagaacggcaacaagcagcaccagctgggcgtgtggcccctgctgcccggcagcttcaagaccctggagatgaaggccagcaagcccggctggtggctgctgaacaccgaggtgggcgagaaccagagagccggcatgcagacccccttcctgatcatggacagagactgcagaatgcccatgggcctgagcaccggcatcatcagcgacagccagatcaaggccagcgagttcctgggctactgggagcccagactggccagactgaacaacggcggcagctacaacgcctggagcgtggagaagctggccgccgagttcgccagcaagccctggatccaggtggacatgcagaaggaggtgatcatcaccggcatccagacccagggcgccaagcactacctgaagagctgctacaccaccgagttctacgtggcctacagcagcaaccagatcaactggcagatcttcaagggcaacagcaccagaaacgtgatgtacttcaacggcaacagcgacgccagcaccatcaaggagaaccagttcgacccccccatcgtggccagatacatcagaatcagccccaccagagcctacaacagacccaccctgagactggagctgcagggctgcgaggtgaacggctgcagcacccccctgggcatggagaacggcaagatcgagaacaagcagatcaccgccagcagcttcaagaagagctggtggggcgactactgggagcccttcagagccagactgaacgcccagggcagagtgaacgcctggcaggccaaggccaacaacaacaagcagtggctggagatcgacctgctgaagatcaagaagatcaccgccatcatcacccagggctgcaagagcctgagcagcgagatgtacgtgaagagctacaccatccactacagcgagcagggcgtggagtggaagccctacagactgaagagcagcatggtggacaagatcttcgagggcaacaccaacaccaagggccacgtgaagaacttcttcaacccccccatcatcagcagattcatcagagtgatccccaagacctggaaccagagcatcgccctgagactggagctgttcggctgcgacatctactag

SEQ ID NO: 2206 - DNA, 999 bp, Artificial Sequence
  derived and/or modified sequence
atggacgacgccgtggcccccggcagagagtacacctacgagtggagcatcagcgaggacagcggccccacccacgacgaccccccctgcctgacccacatctactacagccacgagaacctgatcgaggacttcaacagcggcctgatcggccccctgctgatctgcaagaagggcaccctgaccgagggcggcacccagaagaccttcgacaagcagatcgtgctgctgttcgccgtgttcgacgagagcaagagctggagccagagcagcagcctgatgtacaccgtgaacggctacgtgaacggcaccatgcccgacatcaccgtgtgcgcccacgaccacatcagctggcacctgctgggcatgagcagcggccccgagctgttcagcatccacttcaacggccaggtgctggagcagaaccaccacaaggtgagcgccatcaccctggtgagcgccaccagcaccaccgccaacatgaccgtgggccccgagggcaagtggatcatcagcagcctgacccccaagcacctgcaggccggcatgcaggcctacatcgacatcaagaactgccccaagaagaccagaaacctgaagaagatcaccagagagcagagaagacacatgaagagatgggagtacttcatcgccgccgaggaggtgatctgggactacgcccccgtgatccccgccaacatggacaagaagtacagaagccagcacctggacaacttcagcaaccagatcggcaagcactacaagaaggtgatgtacacccagtacgaggacgagagcttcaccaagcacaccgtgaaccccaacatgaaggaggacggcatcctgggccccatcatcagagcccaggtgagagacaccctgaagatcgtgttcaagaacatggccagcagaccctacagcatctacccccacggcgtgaccttcagcccctacgaggacgaggtgaacagcagcttcaccagcggcaccaccccctag

SEQ ID NO: 2207 - DNA, 6690 bp, Artificial Sequence
  derived and/or modified sequence
atgttccctggttgccctcgcctctgggtactggtcgtactagggacttcctgggtggggtggggaagccagggaacggaagcagcacagctgaggcagttctacgtggctgcccagggcatcagttggtcctacagaccagaaccaactaacagttcattgaatctgtccgtcacatcttttaaaaaaatcgtgtatcgggaatatgaaccttatttcaaaaaggagaagccccaatccactatatcaggactcttggggcccactctttacgccgaggtgggggatatcattaaagtccacttcaagaataaggctgacaaacctctaagtatacaccctcaggggatccggtattctaagctgtcagagggcgccagctatttggaccatacctttcccgccgagaaaatggatgatgctgtcgctcccggtagagaatatacttacgagtggtcgatctcagaggacagcgggcccactcatgacgatcccccctgtctgacacacatctactacagccacgagaatcttattgaggactttaatagcggtctgatcggcccattactgatttgcaagaaggggactctcacagagggaggaacacagaagacatttgacaaacagatcgtgttgctcttcgccgtttttgacgaaagtaagagctggagccagagttcttctttgatgtacactgtgaacggatacgtgaacgggacaatgcctgatatcacagtctgtgctcatgatcatattagctggcacttactgggtatgagttctggtcccgaattgttttctatccattttaacggacaggttctggaacagaaccaccataaggtgtccgcaatcacgctggttagtgccacgtctaccacagctaatatgactgtaggccccgagggcaagtggattatatcttctcttacccctaagcacctccaagccggcatgcaggcttacattgatatcaagaactgtcctaagaagaccaggaaccttaagaagatcacacgagagcagagacggcacatgaaacgatgggaatattttattgcggcagaggaagtgatttgggactacgctcccgttatccctgcaaacatggataagaaatatcggtctcagcacctcgataactttagcaaccaaataggaaagcattacaagaaagtcatgtacacccagtatgaagacgagtcttttacgaagcataccgtgaacccaaatatgaaggaggatggaatccttggaccaattatccgtgctcaggtccgagatacccttaaaatcgtcttcaaaaatatggctagtagaccttattcaatatatccccatggagtcacgttttccccatatgaggatgaagtgaactcttcattcacctctgggcgaaacaacacaatgatcagggctgtacaacccggcgagacttacacttacaagtggaacatcctagaatttgatgaacccaccgagaacgatgcacagtgcctcaccaggccttactattctgacgtggacatcatgcgggatattgccagtggcttaattggcctgttactcatctgtaagagtagaagtttggaccgtcaggggattcaacgagcagcagatatcgagcagcaagcagtgtttgctgttttcgatgaaaataaaagctggtatctggaggataatattaacaaattttgcgagaatccagacgaggtcaaacgagatgaccccaagttttacgaatccaatataatgagcaactttactctgtctgccatcaacggctatgtacccgaatcgattaccactctaggattctgcttcgacgacaccgtacaatggcatttctgctcagtaggaacccagaacgaaatccttacaatacacttcaccggccacagcttcatctacgggaagcgacatgaggatacattgacactgttcccgatgcggggcgagagcgtgacggttaccatggacaacgtgggaacctggatgttaactagcatgaactcatcaccacgttctaagaaattgcgactgaaatttcgagacgtcaaatgcatcccagatgacgacgaagatagttacgagatcttcgagcctcctgaatctacggtcatggcgacaaggaagatgcatgataggctggagcctgaggatgaagagtccgatgccgactacgattatcagaacaggctcgctgccgccctgggaattcggtcctttaggaattcgtccctgaatcaggaagaggaggaatttaacctcacagctctggcactcgagaatgggaccgagtttgtctccagcaatacagatattattgttgggtctaattattccagcccaagtaacatttcaaagttcactgttaacaatctcgccgaacctcagaaagcgcctagccaccagcaggcaaccacggccggctctcccctgaggcatctgataggtaagaattccgttctaaactcttccacagcagaacattccagtccttacagtgaggatccgattgaggacccacttcaacctgacgtgaccgggatccgcttgctgtccttgggagcaggtgagttcaagtcacaggagcacgcaaagcacaaaggtcctaaggtagagagagatcaagccgcaaaacaccgttttagttggatgaaattgctcgctcacaaagtcggccgacacctgagtcaggataccggatcaccaagtggaatgcggccctgggaagacctgccctctcaggatactggttcccctagtaggatgcggccttggaaggacccgccctctgatctactcctgctgaagcaatccaacagcagcaagatattggtgggccgctggcacctggccagcgaaaagggtagctacgagattatccaggataccgacgaggacaccgccgtcaacaactggctcatcagcccccagaatgccagtcgggcctggggtgagtcaacccccctcgctaacaaacccgggaagcaaagtggacaccccaaattcccacgagttcgccacaagagtcttcaagtgcgccaggatggcggcaagtcccgcctcaagaagtcccagttccttatcaagacacggaagaagaaaaaagagaagcacacccatcacgcccctctgagtcctcgaacgtttcatcctctgcggtccgaggcatacaacacctttagcgagcgacgactgaagcactccctggtattgcataaaagcaatgagacaagtctacctaccgatttgaaccagacccttccctcgatggatttcggatggatagcctctctacctgatcataaccagaatagtagcaatgacaccgggcaggcaagttgccctcctggattgtaccagaccgttccacccgaagagcactatcagacatttcccatccaggaccctgatcagatgcattcaaccagcgacccaagccataggtcctccagtccggaactctcagagatgctcgagtacgatcggtcccataagagtttcccaaccgatatttcgcagatgagcccgtcatctgaacacgaggtgtggcaaaccgtgatcagccccgatctctctcaagtgactctgtcccctgagctctcgcagaccaacctgtccccagacctgagccatacaacgctgtccccagagctaatccagcggaacctgtctccagccctgggacagatgcctataagccccgaccttagtcatacaacactgtcgccagacctgagccatacaaccctgtctttggacttgtcacagacgaaccttagccctgagctgtcacagaccaacctgagcccagctctggggcaaatgccattgtcacctgatctttcccatactactctgagcctcgacttttcccagaccaacctctcccccgaactatctcatatgaccctgagccccgagctctcccaaactaacttatcacctgcattgggtcaaatgccaatatcccccgatctctctcataccacactctcgctggacttctcccaaactaatctgtctcccgagcttagtcagaccaatctgtctcctgcactcggccaaatgcccctgtctcccgatccatctcatactaccttgtctctggacctgtctcaaactaatttgagtcctgaactttcccagacaaatctgtcgcccgacctgtctgagatgccactgttcgccgatcttagccaaattccactaactccagacctagaccaaatgacattgagtccagaccttggggagaccgatctgtcgcctaactttggtcagatgtccctctcccctgacctttctcaggttacactgtcgcctgacattagcgacaccactctactgcccgatctgagccagatatccccgcctcctgatctggaccagatcttctatccatcggagtccagccagagtttgcttctacaggagttcaatgagagtttcccgtacccagacttagggcagatgccctcccccagctcacccaccctgaatgatacatttttgagcaaggagttcaatccacttgtgattgtaggactgagcaaagatggcacagactatatcgagatcattccaaaggaggaggtgcagagctctgaggacgactatgccgaaatcgactatgttccatatgacgatccgtacaaaactgacgtgagaaccaacataaatagctccagagatcccgacaacatcgctgcctggtacctgcgctctaataacgggaacagacggaactactacatcgcagccgaagaaatttcctgggattactcagagttcgtgcagagggagacagatatagaggacagtgatgatatacccgaggataccacctacaaaaaagttgtttttcgcaaatatctggatagcaccttcactaagagagatccacgcggcgagtacgaggaacatctggggattctcggtccaattatacgagccgaggtggacgatgtgattcaggtcaggttcaagaacttagcctctagaccctactccctgcatgcccatggtttgtcctatgaaaagtcctccgagggcaaaacttatgaggacgactcccccgagtggttcaaggaggataatgctgtgcagcccaactctagttacacttatgtgtggcacgctaccgagcggagtggccccgaatcccctggatcggcctgtcgcgcctgggcatattatagcgctgttaaccctgagaaggacatccacagcggactaatcgggcccctgcttatctgccagaagggcattctccataaggacagcaatatgccaatggacatgagggagtttgtcctcctgttcatgacttttgatgaaaagaagtcttggtactacgagaaaaagtcaaggagttcctggcgcctcacgtcatcagagatgaagaagtcccacgaattccacgccatcaatggcatgatttactcattacccggcctcaaaatgtacgaacaggaatgggtccggctacatctgctgaatatcggggggtcacaggatatccacgttgtgcatttccatgggcagacactcttagaaaacggaaacaaacagcatcagttaggggtgtggcctctgctgccaggatcattcaagacactggagatgaaagcctccaaaccaggctggtggctgctcaataccgaggttggtgaaaatcagagggcgggaatgcagactccattcctgatcatggatagggactgccgtatgcctatgggactaagcacgggtattatatccgattcgcagatcaaagcgtcagagtttttaggatattgggaaccccgactggcaagactgaataatggagggtcctacaacgcatggtcggtggagaagcttgctgctgagtttgcgagcaagccatggatccaagtcgacatgcagaaggaagtgattattacaggcatccaaacccaaggagccaagcattaccttaagagctgttacacaacagaattttacgtggcctattctagcaaccagatcaattggcagatcttcaaggggaacagtacacgaaatgttatgtattttaatggaaacagcgacgcaagcacaatcaaggaaaaccaattcgacccacctatagtcgctcgctatatacgaatctcaccaaccagggcctataaccggcctaccctcagactagagctgcagggctgtgaagtgaatgggtgttctacccctttaggtatggagaatgggaagattgaaaacaagcaaatcacagcctcctcctttaagaagagttggtggggcgattattgggaaccattccgggctaggctgaatgcacaaggacgagttaacgcgtggcaggccaaagcgaataataacaaacagtggttggagatcgacctgctcaaaattaagaagattacagctatcattacccaaggatgcaagtctctttcttctgagatgtatgtgaaatcatacaccatccactattcagaacagggagttgagtggaaaccgtatcgcctaaaatcctccatggtcgataaaatattcgagggtaatactaatacaaaaggccacgtgaagaacttttttaatccacccatcatcagccggtttattagggtcatccccaaaacttggaaccagtcgatagctctgaggcttgaacttttcggctgtgacatatattag

SEQ ID NO: 2208 - DNA, 6675 bp, Artificial Sequence
  derived and/or modified sequence
atgtttcccgggtgcccgcgtttatgggtgctggtggtcttggggaccagctgggtgggctggggcagtcaagggaccgaggctgcgcagctgcgtcagttttacgtggctgctcagggtatatcatggagttatcgccccgagccaacaaacagtagcctgaacctgtctgttacatcgttcaagaaaatagtctatcgtgaatacgaaccctactttaagaaggaaaaaccacagtctacgattagtgggctgttaggccccacgctgtacgctgaggtaggagacataatcaaagtacatttcaaaaacaaggccgacaagccactttcgatccatccgcagggaatcagatattcaaaactgtctgagggagcatcttacctcgaccacacattccctgccgaaaaaatggatgacgcagtggcccccgggagagagtacacatacgagtggagcatatcggaggatagtggtccaacgcatgacgatcctccttgtcttacacacatatactattcccatgagaatctaattgaagatttcaatagcggcctgatcgggcccctgcttatttgtaaaaaaggcacgcttacagagggagggacccaaaagacctttgacaaacaaattgtgctcctcttcgcagtctttgacgagtcaaagtcctggagccaatctagctctctaatgtacaccgttaatgggtatgtgaatggcaccatgcccgatatcacagtttgtgcccacgatcacataagttggcatctgctgggtatgtcttctggacccgaattgttctctattcacttcaacggacaggtgttggagcaaaaccaccataaggtaagcgctataacactcgtcagtgcaacttcaaccacggcaaacatgaccgtcgggcccgagggcaaatggatcatttcaagcctgacccctaagcacctgcaagcgggcatgcaagcctatatcgacatcaaaaactgcccaaagaagactcgaaatttaaaaaagattacacgcgaacagagacggcacatgaagcggtgggagtactttattgcagccgaagaggtgatctgggactacgcaccagtgatccccgccaacatggataagaagtacagatcccagcatcttgacaatttttcgaaccagatcggcaagcattataaaaaggtcatgtacacccagtacgaagatgagagtttcactaagcacacggtaaacccaaatatgaaggaggatgggatcctgggacccattataagggctcaggtgcgggatacactcaaaatcgtttttaagaacatggctagtagaccctactcaatctacccgcatggcgtgactttcagtccatacgaagatgaggtgaatagctcgtttaccagtggacgtaacaatacaatgattagagccgtccagccgggcgagacctatacgtataaatggaatatcctcgaatttgatgagccaaccgaaaatgatgctcaatgcttgacccgcccctactacagtgacgtggatatcatgcgcgatattgccagcgggttaattggactcttactgatctgcaaaagccggagcctagatcgccagggcattcagagggccgcggatatcgagcagcaggcagtatttgccgtgttcgatgaaaataagagttggtaccttgaagacaatatcaacaagttttgcgagaatcctgatgaagtgaagcgggatgatcccaaattctacgaatcaaacattatgtccacaataaacgggtacgtgcccgagtcgattacaaccctgggattttgcttcgatgacacagtccagtggcatttctgtagcgtggggacgcagaacgaaatcttaaccatacactttaccggccacagcttcatttacggcaagcggcacgaggacactctcactttgttccctatgcgcggagagtcggtgaccgttacaatggataatgtggggacttggatgcttacctctatgaactccagcccacgctccaaaaaacttcggctgaagttccgcgacgtgaaatgcatccccgatgatgacgaagactcctatgagattttcgagcctccggaatccactgtaatggctacccgcaagatgcacgatcgtcttgaacctgaggacgaagagagcgacgccgactacgactaccaaaatcgcctggccgccgccctgggcattaggagtttcagaaattctagcctaaatcaggaagaggaagaattcaacctgactgccctggccctggagaatggaacagaattcgttagctctaatactgatatcatcgtggggtctaactattcatctccctcaaacatttccaagttcaccgtaaacaatctggccgaaccccagaaagccccatctcatcaacaagctactaccgctggatctcctctgaggcacctaatagggaagaacagcgttctgaattcaagcactgcagaacactcttctccctatagcgaagaccccatcgaagatcccctgcagcctgatgtaactgggattcgcctgctcagcctgggtgccggagaatttaagtctcaggagcatgctaaacacaagggccccaaagtggagagggaccaggcagccaaacatagattttcttggatgaaattgttggctcacaaggtcggccgccacctcagccaggacacaggctctccttcaggaatgagaccatgggaagatctcccttcgcaggacacagggtctcctagccgtatgcgaccctggaaggacccgccgtccgatctgctactgctaaaacaaagcaattcttctaagattctggttggaagatggcatctggcctcggagaaggggtcttacgagatcatccaggacactgatgaagacaccgctgttaataactggctaatctcgcctcagaatgcaagtcgtgcctggggcgagagcactcccctggctaacaagcccggcaagcagagtggtcatcccaagttcccgagagttagacataaaagccttcaagtaaggcaggacgggggtaaatcacgccttaaaaagtcccaattcctcataaagacacgtaaaaaaaaaaaggaaaaacatacccatcatgcccctctgagcccgaggacctttcacccgctcagatccgaggcttacaatactttttcagagagaaggcttaagcactctctggttctgcataagagtaatgagacctccctgccgactgatctcaaccagactctgccatctatggacttcggctggatcgcctcactcccggaccacaatcagaattctagtaatgataccggacaggcgtcctgtccccccgggctgtaccaaaccgtcccacccgaggaacattatcagacctttcctatacaggaccctgaccagatgcacagcacatccgaccccagccaccgttcttccagtcccgaactttcggaaatgttagagtacgaccgctcccataagtcttttcccacagatatttcacagatgagcccgagctccgaacacgaggtgtggcagactgttattagccctgacttgtctcaagtgactctgagccccgagcttagtcagaccaacctctctcctgatctgtcacacacaactctgtctcccgagctcattcagcggaatctgtcgcctgccctaggtcaaatgcctatcagcccagacctgtctcatactacactttcccccgacctgtcacacactacactctcattagacttgtcccaaactaacttgtccccagagctctcgcagactaatctctcaccagcgctggggcaaatgcccctctcacccgacttgtcccatacaacgttatctctggacttcagccagacaaatctgagtccagaattgagccacatgacattaagccctgagctctctcagactaatctgtctccagcactgggacagatgccaatcagtcctgatctgtcccatacaactctatcactcgacttttctcagacaaacctgtctcccgagcttagccagaccaatctcagccctgctttaggtcagatgccattatcaccggatccttctcacactactctgagtctggatctatcgcagaccaatcttagtcctgagttgagccagacaaacctcagcccagatttaagtgagatgccgctgttcgccgatctgagccagatcccattaaccccagacttagaccagatgactctcagccctgacctgggagaaaccgacctgagccctaacttcggccagatgagcctgagtccagatctatctcaggttactctgtctcctgatatctcagacacaacactactacctgacctgtctcagatttccccccctcccgacctggaccaaattttctacccatcagagtcttctcagtccctgctcctgcaggaatttaacgagagtttcccctatcctgatctgggacagatgccttcacctagctctccaaccctgaatgataccttcctttctaaggagtttaacccgctcgtaatcgtggggttgagtaaagatggcacggattatatcgaaataatacccaaggaggaggtccagagttcagaggatgattacgcggaaatagactatgtcccatatgacgatccctacaaaacggatgtacgaaccaatataaatagcagtagggatccggataatatcgcggcctggtatctccgttctaacaacggtaatcggcgaaattattacatagctgctgaggagatatcttgggattattctgaattcgtccagagggagaccgatattgaagatagcgacgatattcccgaggacacaacttacaagaaggtggttttcagaaagtacctggactcaactttcaccaagcgggatccacgtggggaatatgaggagcatttaggcatacttggacccatcattagggcagaggtggatgatgtgattcaggttcggttcaaaaatctagcttcacgcccgtatagccttcatgcccatggattatcgtatgaaaaatctagcgagggaaagacttatgaagacgactcccctgagtggttcaaagaagacaacgcagtgcaacccaacagcagctatacctacgtgtggcacgctaccgagcgctctggccccgagtcgcccgggagcgcgtgtcgcgcctgggcctactattctgcagttaatccggagaaagatattcacagtggcttgatcgggccactactgatttgccagaaaggaatcctgcataaagatagtaacatgccgatggacatgagggagtttgttctgctgttcatgacgtttgacgaaaagaaatcctggtactacgagaaaaagtccagatcaagctggcggctcacttcctctgagatgaaaaaaagccatgaattccatgccataaacggtatgatctactcgctgcctgggctaaaaatgtatgaacaggagtgggtgagactgcacctcttaaacatcggagggtctcaggacattcacgtcgtacatttccatggccagacactgctggagaatggaaacaagcagcatcagctgggcgtgtggccactgctaccaggaagtttcaagactttggagatgaaggccagtaagcccggctggtggctgctcaatacggaggtgggtgagaatcagagagcaggcatgcagaccccatttcttatcatggatcgcgactgtcgcatgccaatggggctgtccaccggtattatttcagacagtcagattaaggcatctgaattcctcggctattgggaacctcggctagcccgtcttaacaatgggggctcctataatgcttggtcagtggaaaagctggcagcggagtttgcctcaaagccatggatccaggtggatatgcagaaggaggtcattataaccggcattcagactcaaggcgcaaagcattacctgaagtcctgctacacgacagaattttacgtcgcttattctagcaaccagattaattggcagatttttaaaggtaattctacgcggaatgtcatgtattttaatgggaactcagacgcctctacgataaaagagaatcagtttgacccaccaatcgttgcccggtacatccggatcagtccaacccgcgcctacaaccgccctacgctgcgcttagagctccaaggttgtgaggtgaacggatgctctacaccgctgggtatggagaacggtaagattgaaaataagcaaattacagcttcgtcattcaagaagtcttggtggggggactactgggaaccttttcgggctagactaaacgcccaaggcagagtaaacgcctggcaggctaaggcgaataataacaaacagtggcttgaaatcgacctgctgaagatcaagaagattacagccataatcacacagggttgtaagtccttgagcagtgagatgtacgtgaagagttacaccattcattactcagaacagggcgtggagtggaaaccttataggctgaaatctagtatggtggataaaatctttgagggcaataccaacaccaagggtcatgtgaagaatttcttcaatccccctataatctcacgattcattcgcgttatccctaagacctggaaccaatctattgccctgcgactagaattatttggttgcgacatttactag

SEQ ID NO: 2209 - DNA, 999 bp, Artificial Sequence
  derived and/or modified sequence
atggatgacgcagtggctcccggccgcgaatacacctatgagtggtccatctccgaggactcaggccccacacacgatgacccaccttgcctgacccatatttattatagccacgaaaacctcatcgaggacttcaattctggcctgataggaccgctactgatatgcaagaaaggcactctcactgaaggtggcacacagaaaacattcgataaacagattgtactgctcttcgcagtgtttgacgagtccaagtcatggagccagagcagttccctgatgtacacggtgaacggttatgtgaacggcacaatgcccgacatcaccgtgtgcgcacatgatcacatctcctggcacttgttaggaatgtcgagcgggcctgaactgttttctattcatttcaacggtcaagtgttggaacaaaatcaccacaaggtgtccgctatcacactggttagtgctactagcactaccgccaatatgactgtggggccagagggcaagtggatcatatcttctctgacacccaagcatctgcaggcagggatgcaggcgtacatcgatatcaagaactgtcccaaaaaaacaagaaatctgaaaaagattaccagagagcagagacgccatatgaaacggtgggagtattttattgcagcagaagaagttatttgggattatgcgcccgtgattcctgccaatatggataagaagtacagatcccagcacttggacaatttctccaaccagataggtaaacactataaaaaagtgatgtacactcaatacgaagacgaatccttcaccaagcataccgtgaatccaaatatgaaagaggatggaattcttgggcccataatccgcgcccaagtgagggacactctgaagatcgtgtttaagaacatggccagccgcccatattccatatacccacacggcgttactttttcaccctatgaagacgaggtgaactcgagcttcacatccggaacaaccccttag

SEQ ID NO: 2210 - DNA, 7039 bp, Artificial Sequence
  derived and/or modified sequence
aggaaaagccccagaaaaagcggagggagtgagagccagaggctgctgctgccgtttgcaagaactgcaggggaggaggacgctgccacccacagcctctagagctcattgcagctgggacagcccggagtgtggttagcagctcggcaagcgctgcccaggtcctggggtggtggcagccagcgggagcaggaaaggaagcatgttcccaggctgcccacgcctctgggtcctggtggtcttgggcaccagctgggtaggctgggggagccaagggacagaagcggcacagctaaggcagttctacgtggctgctcagggcatcagttggagctaccgacctgagcccacaaactcaagtttgaatctttctgtaacttcctttaagaaaattgtctacagagagtatgaaccatattttaagaaagaaaaaccacaatctaccatttcaggacttcttgggcctactttatatgctgaagtcggagacatcataaaagttcactttaaaaataaggcagataagcccttgagcatccatcctcaaggaattaggtacagtaaattatcagaaggtgcttcttaccttgaccacacattccctgcggagaagatggacgacgctgtggctccaggccgagaatacacctatgaatggagtatcagtgaggacagtggacccacccatgatgaccctccatgcctcacacacatctattactcccatgaaaatctgatcgaggatttcaactcggggctgattgggcccctgcttatctgtaaaaaagggaccctaactgagggtgggacacagaagacgtttgacaagcaaatcgtgctactatttgctgtgtttgatgaaagcaagagctggagccagtcatcatccctaatgtacacagtcaatggatatgtgaatgggacaatgccagatataacagtttgtgcccatgaccacatcagctggcatctgctgggaatgagctcggggccagaattattctccattcatttcaacggccaggtcctggagcagaaccatcataaggtctcagccatcacccttgtcagtgctacatccactaccgcaaatatgactgtgggcccagagggaaagtggatcatatcttctctcaccccaaaacatttgcaagctgggatgcaggcttacattgacattaaaaactgcccaaagaaaaccaggaatcttaagaaaataactcgtgagcagaggcggcacatgaagaggtgggaatacttcattgctgcagaggaagtcatttgggactatgcacctgtaataccagcgaatatggacaaaaaatacaggtctcagcatttggataatttctcaaaccaaattggaaaacattataagaaagttatgtacacacagtacgaagatgagtccttcaccaaacatacagtgaatcccaatatgaaagaagatgggattttgggtcctattatcagagcccaggtcagagacacactcaaaatcgtgttcaaaaatatggccagccgcccctatagcatttaccctcatggagtgaccttctcgccttatgaagatgaagtcaactcttctttcacctcaggcaggaacaacaccatgatcagagcagttcaaccaggggaaacctatacttataagtggaacatcttagagtttgatgaacccacagaaaatgatgcccagtgcttaacaagaccatactacagtgacgtggacatcatgagagacatcgcctctgggctaataggactacttctaatctgtaagagcagatccctggacaggcaaggaatacagagggcagcagacatcgaacagcaggctgtgtttgctgtgtttgatgagaacaaaagctggtaccttgaggacaacatcaacaagttttgtgaaaatcctgatgaggtgaaacgtgatgaccccaagttttatgaatcaaacatcatgagcaattttacactttcagctatcaatggctatgtgcctgagagcataactactcttggattctgctttgatgacactgtccagtggcacttctgtagtgtggggacccagaatgaaattttgaccatccacttcactgggcactcattcatctatggaaagaggcatgaggacaccttgaccctcttccccatgcgtggagaatctgtgacggtcacaatggataatgttggaacttggatgttaacttccatgaattctagtccaagaagcaaaaagctgaggctgaaattcagggatgttaaatgtatcccagatgatgatgaagactcatatgagatttttgaacctccagaatctacagtcatggctacacggaaaatgcatgatcgtttagaacctgaagatgaagagagtgatgctgactatgattaccagaacagactggctgcagcattaggaatcaggtcattccgaaactcatcattgaatcaggaagaagaagagttcaatcttactgccctagctctggagaatggcactgaattcgtttcttcaaacacagatataattgttggttcaaattattcttccccaagtaatattagtaagttcactgtcaataaccttgcagaacctcagaaagccccttctcaccaacaagccaccacagctggttccccactgagacacctcattggcaagaactcagttctcaattcttccacagcagagcattccagcccatattctgaagaccctatagaggatcctctacagccagatgtcacagggatacgtctactttcacttggtgctggagaattcaaaagtcaagaacatgctaagcataagggacccaaggtagaaagagatcaagcagcaaagcacaggttctcctggatgaaattactagcacataaagttgggagacacctaagccaagacactggttctccttccggaatgaggccctgggaggaccttcctagccaagacactggttctccttccagaatgaggccctggaaggaccctcctagtgatctgttactcttaaaacaaagtaactcatctaagattttggttgggagatggcatttggcttctgagaaaggtagctatgaaataatccaagatactgatgaagacacagctgttaacaattggctgatcagcccccagaatgcctcacgtgcttggggagaaagcacccctcttgccaacaagcctggaaagcagagtggccacccaaagtttcctagagttagacataaatctctacaagtaagacaggatggaggaaagagtagactgaagaaaagccagtttctcattaagacacgaaaaaagaaaaaagagaagcacacacaccatgctcctttatctccgaggacctttcaccctctaagaagtgaagcctacaacacattttcagaaagaagacttaagcattcgttggtgcttcataaatccaatgaaacatctcttcccacagacctcaatcagacattgccctctatggattttggctggatagcctcacttcctgaccataatcagaattcctcaaatgacactggtcaggcaagctgtcctccaggtctttatcagacagtgcccccagaggaacactatcaaacattccccattcaagaccctgatcaaatgcactctacttcagaccccagtcacagatcctcttctccagagctcagtgaaatgcttgagtatgaccgaagtcacaagtccttccccacagatataagtcaaatgtccccttcctcagaacatgaagtctggcagacagtcatctctccagacctcagccaggtgaccctctctccagaactcagccagacaaacctctctccagacctcagccacacgactctctctccagaactcattcagagaaacctttccccagccctcggtcagatgcccatttctccagacctcagccatacaaccctttctccagacctcagccatacaaccctttctttagacctcagccagacaaacctctctccagaactcagtcagacaaacctttctccagccctcggtcagatgcccctttctccagacctcagccatacaaccctttctctagacttcagccagacaaacctctctccagaactcagccatatgactctctctccagaactcagtcagacaaacctttccccagccctcggtcagatgcccatttctccagacctcagccatacaaccctttctctagacttcagccagacaaacctctctccagaactcagtcaaacaaacctttccccagccctcggtcagatgcccctttctccagaccccagccatacaaccctttctctagacctcagccagacaaacctctctccagaactcagtcagacaaacctttccccagacctcagtgagatgcccctctttgcagatctcagtcaaattccccttaccccagacctcgaccagatgacactttctccagaccttggtgagacagatctttccccaaactttggtcagatgtccctttccccagacctcagccaggtgactctctctccagacatcagtgacaccacccttctcccggatctcagccagatatcacctcctccagaccttgatcagatattctacccttctgaatctagtcagtcattgcttcttcaagaatttaatgagtcttttccttatccagaccttggtcagatgccatctccttcatctcctactctcaatgatacttttctatcaaaggaatttaatccactggttatagtgggcctcagtaaagatggtacagattacattgagatcattccaaaggaagaggtccagagcagtgaagatgactatgctgaaattgattatgtgccctatgatgacccctacaaaactgatgttaggacaaacatcaactcctccagagatcctgacaacattgcagcatggtacctccgcagcaacaatggaaacagaagaaattattacattgctgctgaagaaatatcctgggattattcagaatttgtacaaagggaaacagatattgaagactctgatgatattccagaagataccacatataagaaagtagtttttcgaaagtacctcgacagcacttttaccaaacgtgatcctcgaggggagtatgaagagcatctcggaattcttggtcctattatcagagctgaagtggatgatgttatccaagttcgttttaaaaatttagcatccagaccgtattctctacatgcccatggactttcctatgaaaaatcatcagagggaaagacttatgaagatgactctcctgaatggtttaaggaagataatgctgttcagccaaatagcagttatacctacgtatggcatgccactgagcgatcagggccagaaagtcctggctctgcctgtcgggcttgggcctactactcagctgtgaacccagaaaaagatattcactcaggcttgataggtcccctcctaatctgccaaaaaggaatactacataaggacagcaacatgcctatggacatgagagaatttgtcttactatttatgacctttgatgaaaagaagagctggtactatgaaaagaagtcccgaagttcttggagactcacatcctcagaaatgaaaaaatcccatgagtttcacgccattaatgggatgatctacagcttgcctggcctgaaaatgtatgagcaagagtgggtgaggttacacctgctgaacataggcggctcccaagacattcacgtggttcactttcacggccagaccttgctggaaaatggcaataaacagcaccagttaggggtctggccccttctgcctggttcatttaaaactcttgaaatgaaggcatcaaaacctggctggtggctcctaaacacagaggttggagaaaaccagagagcagggatgcaaacgccatttcttatcatggacagagactgtaggatgccaatgggactaagcactggtatcatatctgattcacagatcaaggcttcagagtttctgggttactgggagcccagattagcaagattaaacaatggtggatcttataatgcttggagtgtagaaaaacttgcagcagaatttgcctctaaaccttggatccaggtggacatgcaaaaggaagtcataatcacagggatccagacccaaggtgccaaacactacctgaagtcctgctataccacagagttctatgtagcttacagttccaaccagatcaactggcagatcttcaaagggaacagcacaaggaatgtgatgtattttaatggcaattcagatgcctctacaataaaagagaatcagtttgacccacctattgtggctagatatattaggatctctccaactcgagcctataacagacctacccttcgattggaactgcaaggttgtgaggtaaatggatgttccacacccctgggtatggaaaatggaaagatagaaaacaagcaaatcacagcttcttcgtttaagaaatcttggtggggagattactgggaacccttccgtgcccgtctgaatgcccagggacgtgtgaatgcctggcaagccaaggcaaacaacaataagcagtggctagaaattgatctactcaagatcaagaagataacggcaattataacacagggctgcaagtctctgtcctctgaaatgtatgtaaagagctataccatccactacagtgagcagggagtggaatggaaaccatacaggctgaaatcctccatggtggacaagatttttgaaggaaatactaataccaaaggacatgtgaagaactttttcaaccccccaatcatttccaggtttatccgtgtcattcctaaaacatggaatcaaagtattgcacttcgcctggaactctttggctgtgatatttactagaattgaacattcaaaaacccctggaagagactctttaagacctcaaaccatttagaatgggcaatgtattttacgctgtgttaaatgttaacagttttccactatttctctttcttttctattagtgaataaaattttatacaagaa

SEQ ID NO: 2211 - DNA, 7024 bp, Artificial Sequence
  derived and/or modified sequence
aggaaaagccccagaaaaagcggagggagtgagagccagaggctgctgctgccgtttgcaagaactgcaggggaggaggacgctgccacccacagcctctagagctcattgcagctgggacagcccggagtgtggttagcagctcggcaagcgctgcccaggtcctggggtggtggcagccagcgggagcaggaaaggaagcatgttcccaggctgcccacgcctctgggtcctggtggtcttgggcaccagctgggtaggctgggggagccaagggacagaagcggcacagctaaggcagttctacgtggctgctcagggcatcagttggagctaccgacctgagcccacaaactcaagtttgaatctttctgtaacttcctttaagaaaattgtctacagagagtatgaaccatattttaagaaagaaaaaccacaatctaccatttcaggacttcttgggcctactttatatgctgaagtcggagacatcataaaagttcactttaaaaataaggcagataagcccttgagcatccatcctcaaggaattaggtacagtaaattatcagaaggtgcttcttaccttgaccacacattccctgcggagaagatggacgacgctgtggctccaggccgagaatacacctatgaatggagtatcagtgaggacagtggacccacccatgatgaccctccatgcctcacacacatctattactcccatgaaaatctgatcgaggatttcaactcggggctgattgggcccctgcttatctgtaaaaaagggaccctaactgagggtgggacacagaagacgtttgacaagcaaatcgtgctactatttgctgtgtttgatgaaagcaagagctggagccagtcatcatccctaatgtacacagtcaatggatatgtgaatgggacaatgccagatataacagtttgtgcccatgaccacatcagctggcatctgctgggaatgagctcggggccagaattattctccattcatttcaacggccaggtcctggagcagaaccatcataaggtctcagccatcacccttgtcagtgctacatccactaccgcaaatatgactgtgggcccagagggaaagtggatcatatcttctctcaccccaaaacatttgcaagctgggatgcaggcttacattgacattaaaaactgcccaaagaaaaccaggaatcttaagaaaataactcgtgagcagaggcggcacatgaagaggtgggaatacttcattgctgcagaggaagtcatttgggactatgcacctgtaataccagcgaatatggacaaaaaatacaggtctcagcatttggataatttctcaaaccaaattggaaaacattataagaaagttatgtacacacagtacgaagatgagtccttcaccaaacatacagtgaatcccaatatgaaagaagatgggattttgggtcctattatcagagcccaggtcagagacacactcaaaatcgtgttcaaaaatatggccagccgcccctatagcatttaccctcatggagtgaccttctcgccttatgaagatgaagtcaactcttctttcacctcaggcaggaacaacaccatgatcagagcagttcaaccaggggaaacctatacttataagtggaacatcttagagtttgatgaacccacagaaaatgatgcccagtgcttaacaagaccatactacagtgacgtggacatcatgagagacatcgcctctgggctaataggactacttctaatctgtaagagcagatccctggacaggcaaggaatacagagggcagcagacatcgaacagcaggctgtgtttgctgtgtttgatgagaacaaaagctggtaccttgaggacaacatcaacaagttttgtgaaaatcctgatgaggtgaaacgtgatgaccccaagttttatgaatcaaacatcatgagcactatcaatggctatgtgcctgagagcataactactcttggattctgctttgatgacactgtccagtggcacttctgtagtgtggggacccagaatgaaattttgaccatccacttcactgggcactcattcatctatggaaagaggcatgaggacaccttgaccctcttccccatgcgtggagaatctgtgacggtcacaatggataatgttggaacttggatgttaacttccatgaattctagtccaagaagcaaaaagctgaggctgaaattcagggatgttaaatgtatcccagatgatgatgaagactcatatgagatttttgaacctccagaatctacagtcatggctacacggaaaatgcatgatcgtttagaacctgaagatgaagagagtgatgctgactatgattaccagaacagactggctgcagcattaggaatcaggtcattccgaaactcatcattgaatcaggaagaagaagagttcaatcttactgccctagctctggagaatggcactgaattcgtttcttcaaacacagatataattgttggttcaaattattcttccccaagtaatattagtaagttcactgtcaataaccttgcagaacctcagaaagccccttctcaccaacaagccaccacagctggttccccactgagacacctcattggcaagaactcagttctcaattcttccacagcagagcattccagcccatattctgaagaccctatagaggatcctctacagccagatgtcacagggatacgtctactttcacttggtgctggagaattcaaaagtcaagaacatgctaagcataagggacccaaggtagaaagagatcaagcagcaaagcacaggttctcctggatgaaattactagcacataaagttgggagacacctaagccaagacactggttctccttccggaatgaggccctgggaggaccttcctagccaagacactggttctccttccagaatgaggccctggaaggaccctcctagtgatctgttactcttaaaacaaagtaactcatctaagattttggttgggagatggcatttggcttctgagaaaggtagctatgaaataatccaagatactgatgaagacacagctgttaacaattggctgatcagcccccagaatgcctcacgtgcttggggagaaagcacccctcttgccaacaagcctggaaagcagagtggccacccaaagtttcctagagttagacataaatctctacaagtaagacaggatggaggaaagagtagactgaagaaaagccagtttctcattaagacacgaaaaaagaaaaaagagaagcacacacaccatgctcctttatctccgaggacctttcaccctctaagaagtgaagcctacaacacattttcagaaagaagacttaagcattcgttggtgcttcataaatccaatgaaacatctcttcccacagacctcaatcagacattgccctctatggattttggctggatagcctcacttcctgaccataatcagaattcctcaaatgacactggtcaggcaagctgtcctccaggtctttatcagacagtgcccccagaggaacactatcaaacattccccattcaagaccctgatcaaatgcactctacttcagaccccagtcacagatcctcttctccagagctcagtgaaatgcttgagtatgaccgaagtcacaagtccttccccacagatataagtcaaatgtccccttcctcagaacatgaagtctggcagacagtcatctctccagacctcagccaggtgaccctctctccagaactcagccagacaaacctctctccagacctcagccacacgactctctctccagaactcattcagagaaacctttccccagccctcggtcagatgcccatttctccagacctcagccatacaaccctttctccagacctcagccatacaaccctttctttagacctcagccagacaaacctctctccagaactcagtcagacaaacctttctccagccctcggtcagatgcccctttctccagacctcagccatacaaccctttctctagacttcagccagacaaacctctctccagaactcagccatatgactctctctccagaactcagtcagacaaacctttccccagccctcggtcagatgcccatttctccagacctcagccatacaaccctttctctagacttcagccagacaaacctctctccagaactcagtcaaacaaacctttccccagccctcggtcagatgcccctttctccagaccccagccatacaaccctttctctagacctcagccagacaaacctctctccagaactcagtcagacaaacctttccccagacctcagtgagatgcccctctttgcagatctcagtcaaattccccttaccccagacctcgaccagatgacactttctccagaccttggtgagacagatctttccccaaactttggtcagatgtccctttccccagacctcagccaggtgactctctctccagacatcagtgacaccacccttctcccggatctcagccagatatcacctcctccagaccttgatcagatattctacccttctgaatctagtcagtcattgcttcttcaagaatttaatgagtcttttccttatccagaccttggtcagatgccatctccttcatctcctactctcaatgatacttttctatcaaaggaatttaatccactggttatagtgggcctcagtaaagatggtacagattacattgagatcattccaaaggaagaggtccagagcagtgaagatgactatgctgaaattgattatgtgccctatgatgacccctacaaaactgatgttaggacaaacatcaactcctccagagatcctgacaacattgcagcatggtacctccgcagcaacaatggaaacagaagaaattattacattgctgctgaagaaatatcctgggattattcagaatttgtacaaagggaaacagatattgaagactctgatgatattccagaagataccacatataagaaagtagtttttcgaaagtacctcgacagcacttttaccaaacgtgatcctcgaggggagtatgaagagcatctcggaattcttggtcctattatcagagctgaagtggatgatgttatccaagttcgttttaaaaatttagcatccagaccgtattctctacatgcccatggactttcctatgaaaaatcatcagagggaaagacttatgaagatgactctcctgaatggtttaaggaagataatgctgttcagccaaatagcagttatacctacgtatggcatgccactgagcgatcagggccagaaagtcctggctctgcctgtcgggcttgggcctactactcagctgtgaacccagaaaaagatattcactcaggcttgataggtcccctcctaatctgccaaaaaggaatactacataaggacagcaacatgcctatggacatgagagaatttgtcttactatttatgacctttgatgaaaagaagagctggtactatgaaaagaagtcccgaagttcttggagactcacatcctcagaaatgaaaaaatcccatgagtttcacgccattaatgggatgatctacagcttgcctggcctgaaaatgtatgagcaagagtgggtgaggttacacctgctgaacataggcggctcccaagacattcacgtggttcactttcacggccagaccttgctggaaaatggcaataaacagcaccagttaggggtctggccccttctgcctggttcatttaaaactcttgaaatgaaggcatcaaaacctggctggtggctcctaaacacagaggttggagaaaaccagagagcagggatgcaaacgccatttcttatcatggacagagactgtaggatgccaatgggactaagcactggtatcatatctgattcacagatcaaggcttcagagtttctgggttactgggagcccagattagcaagattaaacaatggtggatcttataatgcttggagtgtagaaaaacttgcagcagaatttgcctctaaaccttggatccaggtggacatgcaaaaggaagtcataatcacagggatccagacccaaggtgccaaacactacctgaagtcctgctataccacagagttctatgtagcttacagttccaaccagatcaactggcagatcttcaaagggaacagcacaaggaatgtgatgtattttaatggcaattcagatgcctctacaataaaagagaatcagtttgacccacctattgtggctagatatattaggatctctccaactcgagcctataacagacctacccttcgattggaactgcaaggttgtgaggtaaatggatgttccacacccctgggtatggaaaatggaaagatagaaaacaagcaaatcacagcttcttcgtttaagaaatcttggtggggagattactgggaacccttccgtgcccgtctgaatgcccagggacgtgtgaatgcctggcaagccaaggcaaacaacaataagcagtggctagaaattgatctactcaagatcaagaagataacggcaattataacacagggctgcaagtctctgtcctctgaaatgtatgtaaagagctataccatccactacagtgagcagggagtggaatggaaaccatacaggctgaaatcctccatggtggacaagatttttgaaggaaatactaataccaaaggacatgtgaagaactttttcaaccccccaatcatttccaggtttatccgtgtcattcctaaaacatggaatcaaagtattgcacttcgcctggaactctttggctgtgatatttactagaattgaacattcaaaaacccctggaagagactctttaagacctcaaaccatttagaatgggcaatgtattttacgctgtgttaaatgttaacagttttccactatttctctttcttttctattagtgaataaaattttatacaagaa

SEQ ID NO: 2212 - DNA, 1714 bp, Artificial Sequence
  derived and/or modified sequence
attgcagctgggacagcccggagtgtggttagcagctcggcaagcgctgcccaggtcctggggtggtggcagccagcgggagcaggaaaggaagcatgttcccaggctgcccacgcctctgggtcctggtggtcttgggcaccagctgggtaggctgggggagccaagggacagaagcggcacagctaaggcagttctacgtggctgctcagggcatcagttggagctaccgacctgagcccacaaactcaaggacttcttgggcctactttatatgctgaagtcggagacatcataaaagttcactttaaaaataaggcagataagcccttgagcatccatcctcaaggaattaggtacagtaaattatcagaaggtgcttcttaccttgaccacacattccctgcggagaagatggacgacgctgtggctccaggccgagaatacacctatgaatggagtatcagtgaggacagtggacccacccatgatgaccctccatgcctcacacacatctattactcccatgaaaatctgatcgaggatttcaactcggggctgattgggcccctgcttatctgtaaaaaagggaccctaactgagggtgggacacagaagacgtttgacaagcaaatcgtgctactatttgctgtgtttgatgaaagcaagagctggagccagtcatcatccctaatgtacacagtcaatggatatgtgaatgggacaatgccagatataacagtttgtgcccatgaccacatcagctggcatctgctgggaatgagctcggggccagaattattctccattcatttcaacggccaggtcctggagcagaaccatcataaggtctcagccatcacccttgtcagtgctacatccactaccgcaaatatgactgtgggcccagagggaaagtggatcatatcttctctcaccccaaaacatttgcaagctgggatgcaggcttacattgacattaaaaactgcccaaagaaaaccaggaatcttaagaaaataactcgtgagcagaggcggcacatgaagaggtgggaatacttcattgctgcagaggaagtcatttgggactatgcacctgtaataccagcgaatatggacaaaaaatacaggtctcagcatttggataatttctcaaaccaaattggaaaacattataagaaagttatgtacacacagtacgaagatgagtccttcaccaaacatacagtgaatcccaatatgaaagaagatgggattttgggtcctattatcagagcccaggtcagagacacactcaaaatcgtgttcaaaaatatggccagccgcccctatagcatttaccctcatggagtgaccttctcgccttatgaagatgaagtcaactcttctttcacctcaggaacaacaccatgatcagagcagttcaaccaggggaaacctatacttataagtggaacatcttagagtttgatgaacccacagaaaatgatgcccagtgcttaacaagaccatactacagtgacgtggacatcatgagagacatcgcctctgggctaataggactacttctaatctgtaagagcagatccctggacaggcaaggaatacagagggcagcagacatcgaacagcaggctgtgtttgctgtgtttgatgagaacaaaagctggtaccttgaggacaacatcaacaagttttgtgaaaatcctgatga

SEQ ID NO: 2213 - DNA, 6690 bp, Artificial Sequence
  derived and/or modified sequence
atgtttcctggctgcccccggctgtgggtgctggtggtgctgggcacctcctgggtgggctggggcagccagggcacagaggccgcccagctgcggcagttctacgtggccgcccagggcatctcctggagctacagacctgagcccaccaacagcagcctgaacctgtctgtgaccagcttcaagaagatcgtgtaccgggagtatgagccctacttcaagaaggagaagccccagagcaccatcagcggcctgctgggccccaccctgtatgcagaggtgggggacatcatcaaggtgcacttcaagaacaaggctgacaagcccctgagcatccacccccagggcatccgctacagcaagctgtctgagggcgccagctacctggaccacaccttccctgctgagaagatggatgatgctgtggcccctggccgggagtacacctatgagtggagcatcagcgaggacagcggccccacccatgatgatcctccctgcctgacccacatctactacagccatgagaacctgattgaggacttcaacagcggcctgattggccccctgctgatctgcaagaagggcaccctgacagaaggaggcacccagaagacctttgacaagcagatcgtgctgctgtttgctgtgtttgatgagagcaagtcctggagccagagcagcagcctgatgtacacagtgaatggctacgtgaatggcaccatgccagacatcaccgtgtgtgcccatgaccacatctcctggcacctgctgggcatgagcagcggccctgagctgttcagcatccacttcaacggccaggtgctggagcagaaccaccacaaggtgtctgccatcaccctggtgtctgccaccagcaccacagccaacatgacagtgggccctgagggcaagtggatcatcagcagcctgacccccaagcacctgcaggccggcatgcaggcctacatcgacatcaagaactgccccaagaagaccaggaacctgaagaagatcacccgggagcagaggaggcacatgaagcgctgggagtacttcatcgctgctgaggaggtgatctgggactatgcccctgtgatcccagccaacatggacaagaagtaccgcagccagcacctggacaacttcagcaaccagatcggcaagcactacaagaaggtgatgtacacccagtatgaagatgagagcttcaccaagcacacagtgaaccccaacatgaaggaggatggcatcctgggccccatcatccgggcccaggtgcgggacaccctgaagatcgtgttcaagaacatggccagccggccctacagcatctacccccacggcgtgaccttcagcccctatgaagatgaggtgaacagcagcttcaccagcggcaggaacaacaccatgatccgggctgtgcagcctggagagacctacacctacaagtggaacatcctggagtttgatgagcccacagaaaatgatgcccagtgcctgacccggccctactacagtgatgtggacatcatgagggacatcgccagcggcctcatcggcctgctgctgatctgcaagagccgcagcctggaccggcagggcatccagagagctgctgacatcgagcagcaggccgtgtttgctgtgtttgatgagaacaagtcctggtacctggaggacaacatcaacaagttctgtgagaacccagatgaggtgaagagagatgaccccaagttctatgagagcaacatcatgagcaacttcaccctgagcgccatcaatggctacgtgcctgagagcatcaccaccctgggcttctgctttgatgacacagtgcagtggcacttctgcagcgtgggcacccagaatgagatcctgaccatccacttcaccggccacagcttcatctacggcaagagacatgaggacaccctgaccctcttccccatgagaggagagagcgtgacagtgaccatggacaacgtgggcacctggatgctgacctccatgaacagcagccccaggagcaagaagctgcggctgaagttcagagatgtgaagtgcatcccagatgatgatgaagattcctatgagatctttgagcccccagagagcacagtgatggccaccaggaagatgcatgaccggctggagccagaagatgaggagagtgatgctgactatgactaccagaaccggctggccgccgccctgggcatccgctccttcaggaacagcagcctgaaccaggaggaggaggagttcaacctgacagccctggccctggagaatggaacagaatttgtgagcagcaacacagacatcatcgtgggcagcaactacagcagccccagcaacatcagcaagttcaccgtgaacaacctggccgagccccagaaggcccccagccaccagcaggccaccacagctggcagccccctgcggcacctgattggcaagaacagcgtgctgaacagcagcacagctgagcacagcagcccctacagcgaggaccccatcgaggaccccctgcagccagatgtgacaggcatccggctgctgagcctgggcgctggggagttcaagagccaggagcacgccaagcacaagggccccaaggtggagcgggaccaggccgccaagcaccgcttctcctggatgaagctgctggcccacaaggtgggccgccacctgagccaggacaccggcagccccagcggcatgaggccctgggaggacctgcccagccaggacaccggcagccccagcaggatgaggccctggaaggacccccccagcgacctgctgctgctgaagcagagcaacagcagcaagatcctggtgggccgctggcacctggccagcgagaagggcagctatgagatcatccaggacacagatgaggacacagctgtgaacaactggctgatcagcccccagaatgccagccgggcctggggcgagagcacccccctggccaacaagccaggcaagcagagcggccaccccaagttcccccgggtgcgccacaagagcctgcaggtgcggcaggacggcggcaagagccggctgaagaagagccagttcctgatcaagaccaggaagaagaagaaggagaagcacacccaccacgcccccctgagccccaggaccttccaccccctgcggtctgaggcctacaacaccttcagcgagcggcggctgaagcacagcctggtgctgcacaagagcaatgagaccagcctgcccacagacctgaaccagaccctgcccagcatggactttggctggatcgccagcctgcctgaccacaaccagaacagcagcaatgacaccggccaggccagctgccccccaggcctgtaccagacagtgcccccagaggagcactaccagaccttccccatccaggaccctgaccagatgcacagcaccagtgaccccagccacaggagcagcagccctgagctgtctgagatgctggagtatgacaggagccacaagagcttccccacagacatcagccagatgagccccagcagcgagcacgaggtgtggcagaccgtcatcagcccagacctgagccaggtgaccctgagccctgagctgagccagaccaacctgagcccagacctgagccacaccaccctgagccctgagctgatccagaggaacctgagccctgccctgggccagatgcccatcagcccagacctgagccacaccaccctgagcccagacctgagccacaccaccctgagcctggacctgagccagaccaacctgagccctgagctgagccagaccaacctgagccctgccctgggccagatgcccctgagcccagacctgagccacaccaccctgagcctggacttcagccagaccaacctgagccctgagctgagccacatgaccctgagccctgagctgagccagaccaacctgagccctgccctgggccagatgcccatcagcccagacctgagccacaccaccctgagcctggacttcagccagaccaacctgagccctgagctgagccagaccaacctgagccctgccctgggccagatgcccctgagcccagaccccagccacaccaccctgagcctggacctgagccagaccaacctgagccctgagctgagccagaccaacctgagcccagacctgtctgagatgcccctgtttgctgacctgagccagatccccctgaccccagacctggaccagatgaccctgagcccagacctgggggagacagacctgagccccaactttggccagatgagcctgagcccagacctgagccaggtgaccctgagcccagacatcagtgacaccaccctgctgcctgacctgagccagatcagccccccaccagacctggaccagatcttctaccccagcgagagcagccagagcctgctgctgcaggagttcaatgaaagcttcccctacccagacctgggccagatgcccagccccagcagccccaccctgaatgacaccttcctgagcaaggagttcaaccccctggtgattgtgggcctgagcaaggatggaacagactacatcgagatcatccccaaggaggaggtgcagagcagtgaagatgattatgcagaaattgattatgtgccctatgatgacccctacaagacagatgtgaggaccaacatcaacagcagccgggaccctgacaacattgctgcctggtacctgcggagcaacaatggaaacagaagaaactactacatcgctgctgaggagatctcctgggactacagcgagtttgtgcagcgggagacagacattgaagattctgatgacatccctgaggacaccacctacaagaaggtggtgttcaggaagtacctggacagcaccttcaccaagagggaccccagaggagaatatgaggagcacctgggcatcctgggccccatcatccgggcagaggtggatgatgtgatccaggtgcgcttcaagaacctggccagccggccctacagcctgcacgcccacggcctgtcctatgagaagagcagcgagggcaagacctatgaagatgacagccctgagtggttcaaggaggacaatgctgtgcagcccaacagcagctacacctacgtgtggcacgccacagagaggagcggccctgagagccctggcagcgcctgccgggcctgggcctactacagcgctgtgaaccctgagaaggacatccacagcggcctcatcggccccctgctgatctgccagaagggcatcctgcacaaggacagcaacatgcccatggacatgagggagtttgtgctgctcttcatgacctttgatgagaagaagtcctggtactatgagaagaagagccgcagctcctggaggctgaccagcagcgagatgaagaagagccatgagttccacgccatcaatggcatgatctacagcctgcccggcctgaagatgtatgagcaggagtgggtgcggctgcacctgctgaacatcggcggcagccaggacatccacgtggtgcacttccacggccagaccctgctggagaatggaaacaagcagcaccagctgggcgtgtggcccctgctgcccggcagcttcaagaccctggagatgaaggccagcaagccaggctggtggctgctgaacacagaggtgggggagaaccagagagctggcatgcagacccccttcctgatcatggaccgggactgcaggatgcccatgggcctgagcacaggcatcatcagtgacagccagatcaaggccagcgagttcctgggctactgggagccccggctggcccggctgaacaacggcggcagctacaatgcctggagcgtggagaagctggccgctgagtttgccagcaagccctggatccaggtggacatgcagaaggaggtgatcatcaccggcatccagacccagggcgccaagcactacctgaagagctgctacaccacagagttctacgtggcctacagcagcaaccagatcaactggcagatcttcaagggcaacagcaccagaaatgtgatgtacttcaacggcaacagtgatgccagcaccatcaaggagaaccagtttgatcctcccatcgtggcccgctacatccgcatcagccccacccgggcctacaaccggcccaccctgcggctggagctgcagggctgtgaggtgaatggctgcagcacccccctgggcatggagaatggcaagattgagaacaagcagatcacagccagcagcttcaagaagtcctggtggggagactactgggagcccttccgggcccggctgaatgcccagggccgggtgaatgcctggcaggccaaggccaacaacaacaagcagtggctggagattgacctgctgaagatcaagaagatcacagccatcatcacccagggctgcaagagcctgagcagcgagatgtatgtgaagagctacaccatccactacagcgagcagggcgtggagtggaagccctaccgcctgaagagctccatggtggacaagatctttgagggcaacaccaacaccaagggccacgtgaagaacttcttcaacccccccatcatcagccgcttcatccgggtcatccccaagacctggaaccagagcatcgccctgcggctggagctgtttggctgtgacatctactag

SEQ ID NO: 2214 - DNA, 6675 bp, Artificial Sequence
  derived and/or modified sequence
atgtttcctggctgcccccggctgtgggtgctggtggtgctgggcacctcctgggtgggctggggcagccagggcacagaggccgcccagctgcggcagttctacgtggccgcccagggcatctcctggagctacagacctgagcccaccaacagcagcctgaacctgtctgtgaccagcttcaagaagatcgtgtaccgggagtatgagccctacttcaagaaggagaagccccagagcaccatcagcggcctgctgggccccaccctgtatgcagaggtgggggacatcatcaaggtgcacttcaagaacaaggctgacaagcccctgagcatccacccccagggcatccgctacagcaagctgtctgagggcgccagctacctggaccacaccttccctgctgagaagatggatgatgctgtggcccctggccgggagtacacctatgagtggagcatcagcgaggacagcggccccacccatgatgatcctccctgcctgacccacatctactacagccatgagaacctgattgaggacttcaacagcggcctgattggccccctgctgatctgcaagaagggcaccctgacagaaggaggcacccagaagacctttgacaagcagatcgtgctgctgtttgctgtgtttgatgagagcaagtcctggagccagagcagcagcctgatgtacacagtgaatggctacgtgaatggcaccatgccagacatcaccgtgtgtgcccatgaccacatctcctggcacctgctgggcatgagcagcggccctgagctgttcagcatccacttcaacggccaggtgctggagcagaaccaccacaaggtgtctgccatcaccctggtgtctgccaccagcaccacagccaacatgacagtgggccctgagggcaagtggatcatcagcagcctgacccccaagcacctgcaggccggcatgcaggcctacatcgacatcaagaactgccccaagaagaccaggaacctgaagaagatcacccgggagcagaggaggcacatgaagcgctgggagtacttcatcgctgctgaggaggtgatctgggactatgcccctgtgatcccagccaacatggacaagaagtaccgcagccagcacctggacaacttcagcaaccagatcggcaagcactacaagaaggtgatgtacacccagtatgaagatgagagcttcaccaagcacacagtgaaccccaacatgaaggaggatggcatcctgggccccatcatccgggcccaggtgcgggacaccctgaagatcgtgttcaagaacatggccagccggccctacagcatctacccccacggcgtgaccttcagcccctatgaagatgaggtgaacagcagcttcaccagcggcaggaacaacaccatgatccgggctgtgcagcctggagagacctacacctacaagtggaacatcctggagtttgatgagcccacagaaaatgatgcccagtgcctgacccggccctactacagtgatgtggacatcatgagggacatcgccagcggcctcatcggcctgctgctgatctgcaagagccgcagcctggaccggcagggcatccagagagctgctgacatcgagcagcaggccgtgtttgctgtgtttgatgagaacaagtcctggtacctggaggacaacatcaacaagttctgtgagaacccagatgaggtgaagagagatgaccccaagttctatgagagcaacatcatgagcaccatcaatggctacgtgcctgagagcatcaccaccctgggcttctgctttgatgacacagtgcagtggcacttctgcagcgtgggcacccagaatgagatcctgaccatccacttcaccggccacagcttcatctacggcaagagacatgaggacaccctgaccctcttccccatgagaggagagagcgtgacagtgaccatggacaacgtgggcacctggatgctgacctccatgaacagcagccccaggagcaagaagctgcggctgaagttcagagatgtgaagtgcatcccagatgatgatgaggacagctatgagatctttgagcccccagagagcacagtgatggccaccaggaagatgcatgaccggctggagccagaagatgaggagagtgatgctgactatgactaccagaaccggctggccgccgccctgggcatccgctccttcaggaacagcagcctgaaccaggaggaggaggagttcaacctgacagccctggccctggagaatggaacagaatttgtgagcagcaacacagacatcatcgtgggcagcaactacagcagccccagcaacatcagcaagttcaccgtgaacaacctggccgagccccagaaggcccccagccaccagcaggccaccacagctggcagccccctgcggcacctgattggcaagaacagcgtgctgaacagcagcacagctgagcacagcagcccctacagcgaggaccccatcgaggaccccctgcagccagatgtgacaggcatccggctgctgagcctgggcgctggggagttcaagagccaggagcacgccaagcacaagggccccaaggtggagcgggaccaggccgccaagcaccgcttctcctggatgaagctgctggcccacaaggtgggccgccacctgagccaggacaccggcagccccagcggcatgaggccctgggaggacctgcccagccaggacaccggcagccccagcaggatgaggccctggaaggaccccccaagtgacctgctgctgctgaagcagagcaacagcagcaagatcctggtgggccgctggcacctggccagcgagaagggcagctatgagatcatccaggacacagatgaggacacagctgtgaacaactggctgatcagcccccagaatgccagccgggcctggggcgagagcacccccctggccaacaagccaggcaagcagagcggccaccccaagttcccccgggtgcgccacaagagcctgcaggtgcggcaggacggcggcaagagccggctgaagaagagccagttcctgatcaagaccaggaagaagaagaaggagaagcacacccaccacgcccccctgagccccaggaccttccaccccctgcggtctgaggcctacaacaccttcagcgagcggcggctgaagcacagcctggtgctgcacaagagcaatgagaccagcctgcccacagacctgaaccagaccctgcccagcatggactttggctggatcgccagcctgcctgaccacaaccagaacagcagcaatgacaccggccaggccagctgccccccaggcctgtaccagacagtgcccccagaggagcactaccagaccttccccatccaggaccctgaccagatgcacagcaccagtgaccccagccacaggagcagcagccctgagctgtctgagatgctggagtatgacaggagccacaagagcttccccacagacatcagccagatgagccccagcagcgagcacgaggtgtggcagaccgtcatcagcccagacctgagccaggtgaccctgagccctgagctgagccagaccaacctgagcccagacctgagccacaccaccctgagccctgagctgatccagaggaacctgagccctgccctgggccagatgcccatcagcccagacctgagccacaccaccctgagcccagacctgagccacaccaccctgagcctggacctgagccagaccaacctgagccctgagctgagccagaccaacctgagccctgccctgggccagatgcccctgagcccagacctgagccacaccaccctgagcctggacttcagccagaccaacctgagccctgagctgagccacatgaccctgagccctgagctgagccagaccaacctgagccctgccctgggccagatgcccatcagcccagacctgagccacaccaccctgagcctggacttcagccagaccaacctgagccctgagctgagccagaccaacctgagccctgccctgggccagatgcccctgagcccagaccccagccacaccaccctgagcctggacctgagccagaccaacctgagccctgagctgagccagaccaacctgagcccagacctgtctgagatgcccctgtttgctgacctgagccagatccccctgaccccagacctggaccagatgaccctgagcccagacctgggggagacagacctgagccccaactttggccagatgagcctgagcccagacctgagccaggtgaccctgagcccagacatcagtgacaccaccctgctgcctgacctgagccagatcagccccccaccagacctggaccagatcttctaccccagcgagagcagccagagcctgctgctgcaggagttcaatgaaagcttcccctacccagacctgggccagatgcccagccccagcagccccaccctgaatgacaccttcctgagcaaggagttcaaccccctggtgattgtgggcctgagcaaggatggaacagactacatcgagatcatccccaaggaggaggtgcagagcagtgaagatgattatgcagaaattgattatgtgccctatgatgacccctacaagacagatgtgaggaccaacatcaacagcagccgggaccctgacaacattgctgcctggtacctgcggagcaacaacggcaacagaagaaactactacatcgctgctgaggagatctcctgggactacagcgagtttgtgcagcgggagacagacatcgaggacagtgatgacatccctgaggacaccacctacaagaaggtggtgttcaggaagtacctggacagcaccttcaccaagagggaccccagaggagaatatgaggagcacctgggcatcctgggccccatcatccgggcagaggtggatgatgtgatccaggtgcgcttcaagaacctggccagccggccctacagcctgcacgcccacggcctgtcctatgagaagagcagcgagggcaagacctatgaagatgacagccctgagtggttcaaggaggacaatgctgtgcagcccaacagcagctacacctacgtgtggcacgccacagagaggagcggccctgagagccctggcagcgcctgccgggcctgggcctactacagcgctgtgaaccctgagaaggacatccacagcggcctgattggccccctgctgatctgccagaagggcatcctgcacaaggacagcaacatgcccatggacatgagggagtttgtgctgctcttcatgacctttgatgagaagaagtcctggtactatgagaagaagagccgcagctcctggaggctgaccagcagcgagatgaagaagagccatgagttccacgccatcaatggcatgatctacagcctgcccggcctgaagatgtatgagcaggagtgggtgcggctgcacctgctgaacattggaggcagccaggacatccacgtggtgcacttccacggccagaccctgctggagaatggaaacaagcagcaccagctgggcgtgtggcccctgctgcccggcagcttcaagaccctggagatgaaggccagcaagccaggctggtggctgctgaacacagaggtgggggagaaccagagagctggcatgcagacccccttcctgatcatggaccgggactgcaggatgcccatgggcctgagcacaggcatcatcagtgacagccagatcaaggccagcgagttcctgggctactgggagccccggctggcccggctgaacaatggaggcagctacaatgcctggagcgtggagaagctggccgctgagtttgccagcaagccctggatccaggtggacatgcagaaggaggtgatcatcaccggcatccagacccagggcgccaagcactacctgaagagctgctacaccacagagttctacgtggcctacagcagcaaccagatcaactggcagatcttcaagggcaacagcaccagaaatgtgatgtacttcaatggaaacagtgatgccagcaccatcaaggagaaccagtttgacccccccatcgtggcccgctacatccgcatcagccccacccgggcctacaaccggcccaccctgcggctggagctgcagggctgtgaggtgaatggctgcagcacccccctgggcatggagaatggcaagattgagaacaagcagatcacagccagcagcttcaagaagtcctggtggggagactactgggagcccttccgggcccggctgaatgcccagggccgggtgaatgcctggcaggccaaggccaacaacaacaagcagtggctggagattgacctgctgaagatcaagaagatcacagccatcatcacccagggctgcaagagcctgagcagcgagatgtatgtgaagagctacaccatccactacagcgagcagggcgtggagtggaagccctaccgcctgaagagctccatggtggacaagatctttgagggcaacaccaacaccaagggccacgtgaagaacttcttcaacccccccatcatcagccgcttcatccgggtcatccccaagacctggaaccagagcatcgccctgcggctggagctgtttggctgtgacatctactag

SEQ ID NO: 2215 - DNA, 999 bp, Artificial Sequence
  derived and/or modified sequence
atggatgatgctgtggcccctggccgggagtacacctatgagtggagcatcagtgaagattctggccccacccatgatgaccccccctgcctgacccacatctactacagccatgagaacctgattgaggacttcaacagcggcctcatcggccccctgctgatctgcaagaagggcaccctgacagagggcggcacccagaagacctttgacaagcagatcgtgctgctgtttgctgtgtttgatgagagcaagtcctggagccagagcagcagcctgatgtacacagtgaatggctacgtgaatggcaccatgccagacatcaccgtgtgtgcccatgaccacatctcctggcacctgctgggcatgagcagcggccctgagctgttcagcatccacttcaacggccaggtgctggagcagaaccaccacaaggtgtctgccatcaccctggtgtctgccaccagcaccacagccaacatgacagtgggccctgagggcaagtggatcatcagcagcctgacccccaagcacctgcaggccggcatgcaggcctacatcgacatcaagaactgccccaagaagaccaggaacctgaagaagatcacccgggagcagaggaggcacatgaagcgctgggagtacttcatcgctgctgaggaggtgatctgggactatgcccctgtgatcccagccaacatggacaagaagtaccgcagccagcacctggacaacttcagcaaccagatcggcaagcactacaagaaggtgatgtacacccagtatgaagatgagagcttcaccaagcacacagtgaaccccaacatgaaggaggatggcatcctgggccccatcatccgggcccaggtgcgggacaccctgaagatcgtgttcaagaacatggccagccggccctacagcatctacccccatggagtgaccttcagcccctatgaagatgaggtgaacagcagcttcaccagcggcaccaccccctag

SEQ ID NO: 2216 - DNA, 6690 bp, Artificial Sequence
  derived and/or modified sequence
atgttccccggctgcccccggctgtgggtgctggtggtgctgggcactagctgggttggctggggcagtcagggcacagaggccgctcaattgcggcagttctatgtcgccgctcagggaatcagttggtcttacaggcccgagcctactaactcaagtttgaacctgagtgtaacaagctttaagaagatcgtgtatagagagtatgaaccctacttcaagaaggagaagccccaaagcacgatcagcggccttctgggacctacactgtatgcagaagtgggcgacatcatcaaagtgcactttaagaataaagctgataagccccttagtattcaccctcagggcatcaggtactcaaagctatctgagggggcatcttatctcgatcacaccttcccagccgagaagatggatgacgctgtggcacctgggcgcgagtatacttacgagtggtcaatttccgaagatagcgggcctacccacgatgaccccccatgtctcactcacatctactattcgcacgaaaatctgatagaggattttaattctgggctgataggtccattgctcatctgcaagaagggaaccctgacggaaggaggaacacaaaagactttcgacaagcagattgttttgttgttcgcagtcttcgatgaatccaagtcctggagtcagtcatcctctcttatgtatacagtgaacggctatgtgaatggcactatgcctgacattactgtctgtgcacacgaccatatctcatggcacctcttggggatgtccagtggaccggagctgttttccattcacttcaatgggcaagttctggagcagaatcaccacaaggtaagcgctatcacattggtcagcgccacctctactaccgcaaacatgacagtgggccccgagggaaaatggattatttctagcctaactccaaaacacctccaggctggaatgcaggcctacattgacatcaagaactgccccaagaagacccgtaacctgaagaagattaccagggagcagcgaaggcacatgaagcggtgggagtacttcatcgcagccgaagaagtaatttgggattacgctcccgttatccccgccaacatggacaagaaataccggagtcagcacctggataatttctcaaatcagattgggaaacactacaagaaagtgatgtatacacagtatgaggatgaatccttcactaaacatacagtaaacccaaacatgaaagaggacggaattctggggccaattatccgtgctcaagttcgagatacgcttaaaattgtcttcaaaaacatggcctccagaccatactctatctaccctcatggggtcacatttagtccttacgaggacgaggttaattcttcctttacatctggccgcaataataccatgatcagagcagtgcaaccaggcgagacttatacttataaatggaacatcctcgagtttgacgaacctaccgagaatgatgcccagtgcctgacccgcccgtattactctgatgtggatatcatgagagacattgcatcgggtttgattggtttgttgcttatttgcaagtcccggagtttggatcggcagggaatccaaagagctgcggatatagagcagcaagccgtgtttgctgtgttcgatgaaaacaagtcttggtatttagaggataacataaataagttctgcgaaaatcctgatgaagttaagagagatgatcccaaattctacgaatccaacatcatgagcaattttacattatcagctatcaatggttatgtccccgagtccatcactaccctggggttctgcttcgacgacaccgtacagtggcacttctgcagcgtgggtacccagaacgagattctgaccattcactttactggccactcattcatttacgggaagcgccatgaagacaccctgacactattcccaatgcgaggggaatctgtcactgtgacaatggacaatgtcgggacctggatgctgacatccatgaatagcagcccgaggagcaagaagctccggctaaaattcagggacgtgaaatgcataccggatgatgatgaggattcctatgaaatattcgaacccccggagtctaccgtgatggccacaagaaaaatgcacgacaggctggagcccgaggatgaagaatccgacgccgattacgactaccagaaccgcctggccgctgcactcggaatccgaagcttcagaaactcgtccttgaaccaggaagaggaagagttcaatctaaccgctctggccctagagaacggtacagaattcgtgtcctctaatacggatatcattgtggggtcaaattactcttcacccagtaacatttctaaattcacggtgaataatctggcggagccccaaaaagctccaagccatcagcaagccacgaccgctggtagtcctctgcggcatctgatcggaaagaattctgtgctgaattcgagcaccgccgagcactccagcccctactcagaggaccccatagaagatccccttcagcccgacgtgaccggaatcagactcctctcactgggggccggcgagttcaagtcccaggagcacgccaaacataaggggcccaaagttgagcgggaccaggcggcaaagcaccggtttagctggatgaagctgttggcgcacaaggtcggacgacaccttagccaggatactggatcaccatccggtatgaggccgtgggaggacctgccaagccaggacaccgggtccccctcccgcatgagaccatggaaagaccccccgtctgacctgttactgctcaagcagtccaattcctccaagattttagtgggtcggtggcacctggcctcagaaaaaggtagctatgaaatcatacaagacacggacgaagacaccgcagtgaataattggctaatatccccgcagaacgcgagccgggcttggggcgagtctacccccctggccaacaagcctggaaagcagtcaggccacccgaaattcccacgcgttcgccacaaatcactacaggttcggcaggatggtggtaaaagtagacttaaaaaatcacaattcctgattaaaacccgcaagaagaaaaaagagaagcacactcaccacgcaccattatcccctcggacttttcatccgttgcgtagcgaagcctataacactttcagcgagaggcgtctaaagcactccctagtactgcataagtccaacgaaaccagcctcccaactgacctgaaccagacactgccctccatggactttgggtggatcgcatcgctccctgatcataaccagaactccagcaatgacaccggacaggctagctgcccacccggtttgtatcagaccgtcccgccggaggagcattatcaaacgttccccatccaagatcccgaccagatgcactctacctcagacccatctcaccgcagctctagccctgagctttccgaaatgttagaatacgatcgctcccataagtctttccccactgacatctcccaaatgtcgccttcatctgaacatgaggtctggcagacggtgatttctcctgatctttcacaggttacattgtcaccagaactcagtcagaccaacctgtcacctgatctgagccacacaaccctttcacctgagctgatacagcgtaacctgagccctgcattaggccagatgcccatttctcctgacctctctcacacaaccctcagcccggatctttcccataccactctctctttggacctttcccaaactaatctgtcgcctgagctgtctcaaactaatttgtcacctgccctggggcagatgcccttaagccctgacctgagccacactactctgagccttgattttagtcagaccaaccttagccctgaattatctcatatgacgctttcacctgagttatcccaaacaaatctcagcccagccctgggtcaaatgcccataagccctgacctatcccatacaaccctttcactggacttcagtcagacaaacctctcccccgagttgagccagaccaatctgagccccgcactgggacagatgcctttaagccctgatccatcacacacaaccctgagcctggacctctcacaaacgaacctgagtccggaactctctcaaactaacttaagcccagatttaagcgagatgccactgtttgctgacttatcacaaatcccactgacaccggatctagaccagatgactctatccccggatcttggggagactgacctgtctcccaactttggccagatgagcctctcccccgacctgtctcaagttaccctgtcacctgatatctcggacacaaccctgctccctgatctgagtcagatctccccccccccagacttagatcagattttttacccgagcgaaagttcccagagcctgttgttacaggaattcaatgaatctttcccgtatcctgatctgggccagatgccaagcccttcttctccgaccctaaacgacaccttccttagtaaggagttcaaccctcttgttattgtagggcttagcaaagatggtactgactatattgagatcatcccgaaggaggaagtccagtccagcgaagacgactacgcagagatcgactatgttccatacgatgacccctacaagacagacgtcagaactaacataaattcctcgagagatccggataacatagctgcctggtacttaaggtccaacaatgggaatcgccgtaattactacattgccgcagaagaaatcagctgggactattccgagttcgtccagagggaaaccgatattgaggactccgatgatattcccgaagacacaacttataagaaagtggtcttcagaaagtaccttgatagcacttttaccaaacgggacccacggggtgaatatgaggaacatcttggtattctgggccctatcatccgggccgaggttgatgatgtgatacaagtcagatttaaaaacctcgcgagcagaccatactcactgcacgcacacgggctgtcatatgagaagtcctccgaaggcaaaacgtacgaggacgatagcccagagtggtttaaagaagataacgcggtacagccaaacagctcctatacgtacgtttggcatgccactgagcggtcaggtcctgaatctccaggtagtgcctgtcgcgcctgggcgtactacagcgctgtcaacccggagaaagacatccattcaggcctgataggaccactcctgatctgccagaagggaatcttacacaaggacagcaacatgccaatggacatgagggagtttgtcctactctttatgacttttgatgagaagaagagttggtattacgagaagaaatctcggtccagctggcggctgacttcaagtgaaatgaaaaaaagccacgaattccacgcaattaatgggatgatttactccctccccggtctgaagatgtacgaacaggagtgggtccggctgcatttactgaatatagggggttctcaggatatccatgtggtccattttcacggccaaacattgctggaaaatggtaataaacaacaccagctgggggtctggccactacttccaggatcgtttaagactctcgagatgaaggctagcaagcccggatggtggttgctcaataccgaggtgggggagaatcagagggccggcatgcagactccctttctgatcatggaccgagactgtcggatgcctatggggctttcaaccggtatcataagcgatagccagattaaagcctctgagttcttggggtattgggaaccccggctggccaggttgaataatggcggaagctataacgcctggagtgttgagaaactcgccgccgagtttgcctccaagccatggattcaggtagatatgcaaaaagaagtgattattacaggcattcaaacacagggagcaaaacactacctgaaatcatgctacacaacagaattctatgttgcgtattctagcaaccaaatcaattggcagattttcaaagggaacagtacccgcaacgtcatgtactttaacgggaattccgacgcctccactatcaaggagaaccagttcgacccgcccattgtggccaggtacatccgcatctcaccaactcgtgcttataaccgcccaacgctgagactggaattgcagggatgcgaagtcaacggctgtagcacgcctctcggcatggagaatgggaagatcgagaataaacagattactgcaagttcctttaaaaagagctggtggggcgattactgggagcctttccgcgcaagactcaatgcccaggggcgagtgaacgcctggcaggcaaaggctaataataacaaacagtggcttgagatcgacctgctgaagataaaaaagatcactgcgatcataacccaaggctgtaaaagtctctccagcgagatgtatgtcaagtcttataccatccactactccgaacagggtgtcgagtggaagccatatagactcaaatcttccatggtcgacaaaatctttgaaggcaatacaaataccaagggccatgtgaagaatttcttcaaccctcccatcatcagtcgcttcatcagagtgatacccaaaacctggaaccaaagtatcgcactgcgcctggagttgtttggctgcgatatctactag

SEQ ID NO: 2217 - DNA, 6675 bp, Artificial Sequence
  derived and/or modified sequence
atgttccccggctgcccccggctgtgggtgctggtggtgctgggcacctcttgggtgggctggggctcccagggtaccgaggccgcacagctccgccagttctatgttgcggcccaaggtatcagctggagctacagacctgagccaacaaactccagcttgaatttatcagttacaagcttcaagaagatcgtataccgcgagtatgagccctattttaagaaagaaaagcctcagtccaccatttctgggcttctcggcccaacgctctacgctgaagtgggcgacatcatcaaagtgcacttcaagaacaaagcggataagcctttatccatccacccacaaggaatcagatattccaagctttccgagggtgcaagttacctggatcacacctttcctgccgaaaaaatggatgatgctgttgcccctggccgggaatacacctatgaatggtcgatcagcgaagacagtgggccaacccacgatgaccccccctgtctaactcacatatactattctcacgaaaacctcatcgaggacttcaactccgggttaataggacccctgctgatctgtaaaaaagggactctaacagaagggggcacacaaaagaccttcgataaacaaatcgttctcctcttcgctgttttcgacgaatctaaatcttggagccagtcatcctcactgatgtacacggtgaatggctacgtcaatggaaccatgcctgatattaccgtgtgtgcccatgaccatatttcatggcacctgcttgggatgtcctccggccctgaactcttcagtatccacttcaatgggcaggtgcttgaacagaaccaccacaaagtgtccgccatcaccctcgtgtcagccactagtaccacagccaatatgactgtcgggccagaggggaagtggataatctcttctctgacccctaaacacctccaggccggcatgcaggcttatatagacattaagaattgtcccaagaagaccaggaacctgaaaaaaatcacaagggaacagcgcaggcacatgaagcgctgggagtattttatcgcggccgaggaagtcatttgggactatgcacctgtcatccccgccaacatggacaagaaataccgcagccaacatctcgacaatttcagcaatcagatcggtaagcattataaaaaggtaatgtacacgcagtacgaggatgagtcttttacaaaacacacagtgaatcccaatatgaaggaggacggcattctagggcctatcattcgcgcacaagtaagagacaccctcaaaattgtgtttaaaaatatggcatctagaccatattcaatatatccccatggcgtcaccttctctccttacgaagatgaagtgaactcttcattcacctcagggcgaaataacacgatgatcagggctgttcagcctggggagacatatacttacaaatggaacatacttgaattcgacgagcccacagagaacgatgcccaatgtcttacacgtccctactattctgatgtggatattatgagggatattgcttccggccttataggactcttgctcatctgcaagagtcgctcactggatcgccagggcatccagcgggcggccgacatcgaacagcaagctgtctttgctgtttttgacgagaacaagtcgtggtacctggaggataatattaacaagttctgcgaaaaccccgacgaggtgaagagagatgatcctaaattctatgagtcaaacatcatgtcaacgataaacggttacgttccagagtccatcactacgctcgggttctgctttgacgatactgtgcaatggcatttttgctccgttggcactcagaatgaaattctgaccatccacttcactggccatagtttcatctacggtaaacggcacgaggacaccttgactttgttcccaatgcgcggtgaaagcgtgacagtcaccatggacaatgtggggacttggatgctgacatccatgaactccagcccgagatcgaagaagctgcgcctaaaatttcgcgacgtcaagtgcatccccgacgacgacgaggactcttatgagatatttgaaccacccgagagtacagtgatggcgactagaaaaatgcacgaccgactggagcccgaggacgaggagtcagacgctgattatgattatcagaatcgcctggctgccgccctgggcatcaggagctttcgtaactcctccttgaatcaagaagaagaagagttcaacttgacagctctggctctagaaaatggaacagagtttgtttcttctaataccgacataatcgtagggagcaattatagctccccttcaaatatttcgaagttcacagtgaataatcttgcagaaccacagaaggctcctagccaccagcaggccactactgccgggtctccactgcggcacctgatcgggaaaaattcagtgctcaatagtagcaccgctgaacatagtagcccatactccgaggatccaattgaagatccgctccagcctgatgttacaggcatccgtctgctctccctcggcgcaggggagttcaaatcccaagagcacgccaaacacaagggtcccaaggttgagcgggatcaggccgctaaacaccgattctcttggatgaagctgctggcacacaaagtcgggagacatctgagccaggatacaggtagtccctctgggatgcggccttgggaagatctgccaagtcaagacaccggaagcccctcacggatgagaccctggaaggaccccccaagcgacctgctgctcctgaaacagagcaattcttctaagatccttgtggggcgatggcacttagcgagcgagaagggtagttatgaaataattcaggataccgacgaggacactgccgtcaacaactggctgataagcccccagaacgcctctcgcgcatggggcgagagcacacctcttgcgaataaaccaggcaagcagtccgggcatccaaagtttcctcgggttcgccataaatctctacaggttaggcaggatggcggaaaatcacggttaaagaagtcccagttcctgataaagacacgaaagaaaaaaaaggaaaagcacacacaccatgccccattatccccaagaacctttcaccctcttaggtctgaggcatataatacgttctcagaaagaaggctgaagcattctctggtcctgcataagtctaacgaaacctcactcccaacggatttaaatcagacgctaccatccatggacttcggttggattgctagcctgccagaccataaccagaacagcagtaacgacactggtcaggcaagttgccccccgggactttatcagacagtccccccggaagagcactatcaaactttcccgattcaggatccagatcagatgcatagcacctccgatcctagccacagaagttcatcgccagaactgtccgagatgctggagtacgaccggtcccataaaagctttccgaccgatattagccagatgagtcctagcagtgagcacgaggtttggcagaccgttatcagccccgacctatctcaggtcacactcagccccgagctatcacagacaaacctgagcccagacctgtctcacactactttatccccggagttgatccagcggaatcttagtccagcactgggccagatgcccatctcccctgacctcagtcacacaacactttcaccagacctgtctcacaccacactctctctggacctgtctcagactaatttgagccctgagctcagtcagactaacttgtcaccggccttgggacaaatgccgctctccccagacctcagtcacactaccctctctctggacttcagccaaacaaacctctccccggagctcagccacatgactcttagtcccgaactgtcacaaaccaatttgtcccccgccctcggtcagatgcctatttctcccgacctgtcacacacgactctgtcacttgacttctctcaaactaacctctcaccagagctctcccaaacgaatctatctccggccctggggcagatgcctttgtcaccagaccctagtcacactaccctctctctggacctgtcccaaactaacctgagcccagagttgagtcaaacaaatctttcacccgacctaagtgagatgccactcttcgccgacctgtcccagattcctttaacccccgacctcgatcagatgactctgtctcctgatctgggcgagactgacctgtcaccgaactttggacagatgagcctgtctcctgatctgagccaagtgaccttatcgccagatatcagtgatacaaccctcttaccagacctttcccagatctctcctcctcccgacctggatcaaattttctatccttctgagagcagccaaagtctgctcctacaggaattcaacgagtccttcccttaccctgatctgggacaaatgccctcaccgagtagtcctaccctcaatgacacatttctgtcaaaggagttcaatccactggtgattgtcgggctgtctaaggacgggacagactacattgagatcattcccaaggaggaggtgcagtctagcgaagacgattacgcggaaattgattacgtgccctatgatgatccttataaaaccgacgtgaggaccaacattaattcgtccagggatccggacaacatagcagcctggtatcttagatccaataacggcaatagacggaactattacattgccgcagaggagatcagctgggattacagtgagttcgtccagcgggagactgacatcgaagacagcgacgacattcctgaagataccacctacaagaaagtggtctttagaaagtatctggactctacattcactaaacgcgacccaagaggggagtatgaagaacacctcggcatcctcggacctataatcagggctgaggtcgacgatgtgattcaggtgagattcaaaaatttagccagccggccttactctttgcacgcacacggcctgagttatgagaaatcttcggaggggaaaacgtatgaggatgacagccctgaatggtttaaagaggataacgctgttcaacccaactccagttacacctatgtgtggcatgcaaccgagagaagtggaccggagtctcccggatcggcatgccgcgcttgggcctactattcagctgtcaacccggaaaaggatatacattcggggctgatcggtcccttgctcatatgtcaaaaaggcatcttgcataaagattctaacatgcccatggacatgcgcgaatttgtgctcctgttcatgacattcgacgaaaaaaaatcttggtactacgaaaaaaaaagccggtcatcgtggcgccttacatccagtgagatgaaaaagtcacatgagtttcatgccattaatggaatgatatatagccttcccggtttgaagatgtacgagcaggaatgggtgagacttcatctgttgaatatcggcggatcgcaggatattcatgtggtacacttccacgggcagacactgctggaaaacggtaacaagcagcatcagttgggcgtctggcctctgctccccggttcctttaagacactcgaaatgaaggccagtaagcctggatggtggctcctgaatactgaggtgggggaaaaccagagggcgggaatgcaaacacccttcttgattatggaccgagactgcagaatgccaatggggctgtccacaggcataatctctgattcccagattaaggcctcagaatttctgggttattgggagcccaggctggccagattaaacaatgggggatcttacaatgcttggagtgttgagaaacttgctgccgaatttgcatcgaaaccttggattcaggtggatatgcagaaagaagtcattataaccgggatccagacccagggggctaagcattatctcaagagctgttataccactgagttctatgtggcctacagcagcaaccagattaactggcagatctttaaggggaactccacgagaaacgtgatgtacttcaacggcaatagcgacgcctctaccatcaaagagaaccagtttgatccaccaattgtcgctagatacatcagaatatcccccaccagagcatataatcgacccactttaaggctcgagctgcagggctgcgaggtgaatgggtgctccactccacttgggatggagaatgggaagatagaaaataagcagatcactgccagttcctttaagaagagctggtggggcgactattgggaacccttcagagcccgcttgaacgctcaaggtcgagtgaacgcctggcaggcaaaagctaacaacaacaagcagtggctggagattgatctcctgaagattaaaaagattacagcaattatcacacaaggctgcaagtcactcagcagtgagatgtatgtaaaatcctacactatccactacagcgagcagggcgttgagtggaagccgtacaggctcaaatcgtctatggtggataagattttcgagggcaatacaaatactaaagggcacgttaagaattttttcaaccctccaataatctctcgatttataagggtgattcccaagacctggaaccagtcaattgcgctgaggttagagctgttcgggtgtgatatatattag

SEQ ID NO: 2218 - DNA, 999 bp, Artificial Sequence
  derived and/or modified sequence
atggacgacgccgtggcccccggccgggagtacacctacgagtggagcatctctgaagactctgggcccacgcacgatgaccctccatgtctcacacacatctactacagccatgaaaacttgattgaggactttaactctggactgattgggcctcttctcatttgtaaaaagggcacgctaactgagggtggcacccagaaaacttttgacaaacagatagtgctgttatttgccgtctttgacgaatcaaagagctggagtcaatctagcagcctgatgtacacagtgaatgggtatgtcaacgggactatgccggacattaccgtgtgcgcacacgatcatataagctggcacctgcttggtatgagttcgggccccgagctattcagcatccatttcaacggccaggtgttggagcagaatcaccataaagtgagcgccatcacactggtgagcgctacatccaccacagccaacatgaccgtgggacctgagggcaagtggattataagcagcctgaccccaaagcacctgcaggcaggtatgcaggcatacattgacattaaaaactgtcctaaaaagacgcgtaacctaaaaaagattacccgggagcagagacgccacatgaagcgctgggagtattttatcgctgccgaggaagtgatttgggactatgcacccgtgatcccggcaaacatggataagaaataccggtctcagcacctcgacaacttctcaaaccagataggaaaacactacaagaaagtcatgtacacccaatatgaggatgaaagctttaccaagcataccgtcaatccgaatatgaaggaggacgggatcctcgggcccattattcgggcccaggttcgggacacccttaaaattgtgtttaaaaacatggctagtagaccctatagtatctaccctcatggggttacattttctccatatgaagacgaggtgaacagctctttcacatcaggaaccacaccctag

SEQ ID NO: 2219 - DNA, 6689 bp, Artificial Sequence
  derived and/or modified sequence
atgttccctgggtgtcctaggttgtgggtgctggtcgtgctcggcacttcatgggtgggatgggggtcccaaggcacagaagccgctcaactacggcaattttacgtggccgcacagggcatctcctggtcgtaccgacctgagccaacaaatagctccttgaatttgagcgtaactagctttaaaaagattgtgtatagagagtatgagccttatttcaaaaaagagaagcctcagtccactattagcggactgctcggaccgactttgtatgctgaggtcggcgatatcattaaagtgcattttaagaacaaggcagacaaacccctgagtattcacccccaaggtatccgatactcaaagctcagcgagggagcgagttatctggaccacacattccccgcagagaagatggacgatgctgtggcgccaggtcgggagtacacttatgaatggtcaatcagtgaggacagcgggccaactcatgatgatcctccctgcctcacccacatctactacagtcacgagaacctcatagaagactttaacagtggcctgattggccctctgctcatctgcaaaaagggtaccttaaccgaagggggtacccagaagactttcgataagcaaatagtcttgctcttcgctgtctttgatgaatctaagtcctggagtcagagcagttccctgatgtatacagtgaatggatatgtcaatgggaccatgcctgatataacagtgtgtgctcatgatcacatctcatggcaccttctagggatgagtagcggcccagaactgttcagtattcatttcaacggacaggtcttagagcagaatcaccataaggtgagtgctatcaccctcgtatccgcaactagcaccacggcaaatatgacagtgggtcccgaaggaaagtggataatcagtagtctgacacctaagcatcttcaggctggtatgcaggcttacatagacatcaagaactgccccaagaagacacggaatcttaaaaagattaccagagagcagagacgtcatatgaagcggtgggagtattttatagccgctgaagaagtcatctgggattatgcccctgtgattcccgctaatatggacaagaaatatcgatcccaacacctggacaatttttctaatcagatcgggaagcactacaagaaagtcatgtacactcaatatgaggacgagtcattcaccaaacatactgtgaatccgaacatgaaggaagacgggatcttggggccaattattagagcccaggtccgggacacgctgaaaattgtcttcaagaatatggcctctagaccgtacagcatttaccctcacggagtcaccttctccccttatgaagatgaggtgaactctagttttacctcaggcaggaacaataccatgatacgtgccgttcaaccaggagagacttacacgtacaagtggaacattcttgagtttgatgaaccaaccgagaacgatgcgcaatgccttacgaggccctactactccgacgtggatattatgagagatatcgcgtcagggctgatcggactgctcctcatttgtaaatctaggtcacttgaccggcaaggcattcaacgagccgcagatattgagcagcaggctgtttttgccgtcttcgacgagaataaatcctggtacctggaggacaacatcaacaagttctgcgaaaatcccgacgaggtgaagcgggatgatccgaaattctacgagtcaaacattatgagcaattttacattatcagctatcaacggctatgtgcccgaaagtattacaactctggggttctgtttcgatgacaccgtgcagtggcatttctgttctgtgggtacacagaatgagattctgaccattcacttcaccggacattccttcatctacgggaagagacatgaggatactcttacactgttccctatgagaggcgagagcgtgaccgtgaccatggacaatgtgggtacttggatgctcaccagcatgaactcatcacctcgaagcaaaaaattacgccttaaattcagggacgtgaagtgtatccccgacgatgacgaggattcatatgagatttttgagccaccggagagcaccgttatggcaacccgcaagatgcacgatcgactcgagcctgaggacgaagagtcggatgcagattacgattatcaaaatcggttggcagctgcacttgggatcagatcattccgaaattcttctctgaatcaggaggaggaagaattcaatctaacagccctggctctggagaatggcacggaatttgttagttccaacaccgacattatcgtgggctctaattactcctcaccttccaacatctccaaattcacggtcaataacctagctgaaccccagaaagctcctagccatcagcaggccactacagctggctcaccccttcgccatttgatcgggaaaaacagcgtgctcaactcatcaacagccgagcactcctctccctatagcgaggatcctatcgaagacccactgcagcccgatgtgacgggtattcggctgttgagtcttggcgcaggggagttcaaaagccaagaacatgctaagcacaaggggcctaaggttgagagggaccaggccgctaaacacagattcagctggatgaaattacttgcccacaaggtcggcaggcatctgtcacaggatacagggagccctagcggaatgagaccctgggaagatctgccttcacaggacacgggctcaccatcgcggatgaggccttggaaggacccaccctcagacttgctgttactgaaacagagcaactcctcaaagattctcgtcggtaggtggcacttggccagtgagaaaggatcatacgagattatccaggacacagatgaagataccgctgtgaacaattggctgatttctccacaaaacgcttctagggcttggggagagtccaccccactcgcgaataaaccagggaagcagtcaggtcaccccaagttcccacgcgtgcgacacaagagtttacaggtgcggcaggatggtggaaaatcccgtttaaaaaagagtcaattccttatcaagacccgcaaaaagaaaaaggagaagcatactcatcatgcgcctctgtcacccagaaccttccatccacttagatccgaggcttataacactttttcagaaagacgcttgaaacactcgctcgtcttgcacaagagcaacgaaacttcgctcccaaccgatcttaatcagactctgccatccatggactttggctggattgcttccttgcctgaccataatcaaaacagcagtaatgacactggccaggcgtcctgccctccaggcctttatcagaccgtgccacctgaagaacactaccaaaccttccctattcaagaccccgatcagatgcattctacatccgatccatcccatagatcatcatcacccgaactatccgagatgttggaatacgatcgctctcacaagtcattcccgaccgatatctcgcagatgtccccgagctccgaacacgaagtctggcagactgtcatctccccggacctgtcccaagttacattgagccctgagctgtctcagaccaatctgtccccagatctgagccataccacactcagccccgaacttatacaacggaacctctcacccgctcttgggcagatgcctatctctccggatctctcccatactacccttagtccagacctttctcatactaccttgtcccttgacctcagccagacaaatctgagtcccgagctctcccaaaccaatctctctcctgcgttaggacagatgcctctgtcgccagacctgagccatacaaccttgtctctggattttagccagacaaaccttagccctgagctttctcatatgacgctgtccccagagctgtcccagactaatctgtcccctgccctggggcagatgcccatttctcccgacttatctcatacgacgctgtctttggactttagccagaccaacctcagccctgagctgtcccagaccaacctaagtccagccctcggacagatgccactttccccagaccccagccataccacattgtccttggacctatcacaaaccaatttgtcgccagaattgtcccagaccaacctgagtccggacttgagcgagatgcctctcttcgccgatttgtcccagattcccctgaccccggacctggatcagatgacactctcccctgacctcggagagacagatttgtcaccaaattttggccaaatgtctctatcaccagatctcagccaggtaactctgagccccgatatctctgacactaccttgctgcctgacctgtctcagatctcacctccacctgacctcgaccagatcttttacccaagcgaatctagccaatcacttctgctgcaggaattcaacgagagttttccctatcccgatcttgggcaaatgccaagtccaagcagccccacacttaacgacaccttcctctccaaggaatttaatccactggtgatcgttggtctgtcaaaagacggcaccgattacatcgagattatcccaaaggaagaagttcaaagcagtgaggacgactatgccgaaatcgattacgtgccttacgatgatccatataagacagacgtgaggaccaatatcaacagctcacgggatccggacaacatagcggcatggtacttgcgctctaataatggtaatcgcaggaattattatatagcagcagaggagatttcatgggactattccgaatttgtgcaaagggagacggatatcgaagacagtgatgatattcccgaggataccacttataagaaagtcgttttcaggaagtacttagactctacatttacaaagcgcgaccctcggggagagtacgaagagcatctggggattctgggaccaatcattagagctgaggtagacgacgtgatacaggtgcgtttcaagaatctcgcatccagaccgtacagcctgcacgctcacggactgtcctacgaaaaatcaagcgagggcaagacatacgaggatgactctccggaatggtttaaggaggacaacgcggtccaacccaactcatcctacacctacgtatggcatgccaccgagcggagcgggccagagtcccctgggtcagcatgccgcgcttgggcatactacagcgccgtgaaccccgaaaaagacattcacagtgggcttatcggtcccctgctgatctgtcagaaggggattcttcataaagactctaacatgcctatggatatgagagaattcgtgcttctgttcatgaccttcgatgagaagaagtcctggtattatgaaaagaaatcacgctcaagttggcggctgacctctagcgagatgaaaaaatcacacgagtttcatgctattaacggcatgatctacagtctccccggattgaaaatgtacgagcaggaatgggttagactacatttactgaatatcggtggcagtcaggatatccatgtggttcattttcatggacagacccttctcgagaacggtaacaagcagcaccagttgggtgtctggcctttgctgccaggaagcttcaagactctcgagatgaaggcatcaaaacccggatggtggctgcttaatacagaagttggtgagaaccagcgcgctggaatgcagacccctttcctaattatggacagggattgcagaatgcctatgggactatccacgggcataatttcagacagccaaattaaagcttccgagttcttggggtactgggaacccagactggcacggctgaataatgggggttcatacaacgcctggagtgtggagaaactggccgctgagttcgcttcaaaaccatggattcaggtggatatgcagaaggaagttatcatcaccggtatacagacacaaggggctaaacattacctcaaaagttgttatacaacagaattttacgtcgcatattcctccaaccagattaattggcagattttcaaaggaaactcaaccagaaacgtcatgtattttaacggaaactccgacgcctctaccatcaaagagaaccagtttgatcccccaattgttgctcgatatattagaattagccctacgagggcttataacaggcccaccctgaggttggaactgcagggctgcgaagtcaacggatgcagtacacccctagggatggaaaatggcaaaatagagaataaacaaatcacggccagctctttcaaaaagagctggtggggggactattgggagccatttagggctcggctcaatgcacaaggcagggtcaatgcctggcaggccaaggcaaataacaacaaacagtggctcgagatcgacttgctcaagatcaagaaaatcacagccattataactcagggctgcaaatcactttcatcagaaatgtatgtaaaatcatacaccatacactactcagagcagggggtcgagtggaagccataccgcttaaagtcctctatggtagacaaaattttcgaaggaaacacaaatacgaaggggcatgtaaaaaacttttttaacccccctattatctctcgatttatcagggtgatcccgaaaacatggaatcagagcatcgctcttaggctggagctattcgggtgtgatatttacta

SEQ ID NO: 2220 - DNA, 6674 bp, Artificial Sequence
  derived and/or modified sequence
atgttccctggctgtccaagactctgggtcttggtagtcttgggtaccagctgggtaggatgggggagccaaggcaccgaggcggctcaacttcgtcaattttatgtggcagcacagggaatatcttggtcctaccgcccagagccaacaaactcctccctgaacctttccgtcaccagtttcaagaagatcgtgtacagggaatatgagccttacttcaaaaaagagaaaccacagtctaccataagcggactgcttggtcccacactgtacgccgaggtgggagatattatcaaggtgcacttcaagaacaaggctgataagccgctgtccatacacccacaagggatccgatattccaaattgagcgagggggcatcttaccttgatcacactttcccggctgagaagatggatgatgccgtggcacctgggagagaatacacgtacgaatggtctatttccgaggattccggaccaactcacgacgatcctccttgcctgacacacatctactactcacatgaaaacctgatcgaggatttcaattcaggactgatcggaccacttttgatatgtaagaagggtacactgacggaagggggaacacagaagaccttcgataagcaaattgtgttactcttcgccgtgttcgatgaatctaaaagttggtcacagtccagctctcttatgtatactgttaatggttacgtaaatggcaccatgcctgatattacagtatgtgcccacgatcatatcagctggcacctgctcggtatgtcctccggacccgaactgttttccatacatttcaacggccaggtcttggagcagaaccaccataaggtttccgccatcactctcgtcagcgcaacaagcaccacagcaaatatgacggtgggcccagagggtaagtggataattagcagcctgacccccaagcacttgcaggccggaatgcaggcctacatcgatatcaagaactgccccaagaagacccgcaatctcaagaagatcactcgggagcagcgtagacacatgaagcgatgggaatactttattgcagccgaggaggttatctgggactacgcccctgtgatccccgctaacatggataagaagtacagatcacaacacctcgataatttctcaaatcagatcggaaagcattacaagaaggtgatgtatacccagtatgaagacgagtccttcaccaagcataccgtaaatccaaatatgaaagaagacgggattctcggccctattatcagagcccaggtgcgagacactctgaagattgtgtttaagaacatggcatccaggccttattccatctatccacacggcgtgaccttttccccatatgaagatgaagtcaactccagcttcactagcggcagaaacaatacgatgattcgagctgtacagcccggtgagacctacacatataaatggaacattctcgaatttgatgagcctaccgaaaacgatgctcagtgtctcacgaggccatattacagtgacgtggatattatgcgcgacatagcaagcggcttgataggattacttctgatttgtaaaagcagatccttagatcggcaggggatccaaagggcagcagacattgaacagcaggcggtctttgccgtcttcgatgagaataaatcttggtaccttgaagacaatatcaacaaattctgcgagaacccggatgaggtgaaacgagacgatccaaaattttacgagtcaaatatcatgagcaccataaatggctatgtcccagagtccattactacactggggttttgttttgatgacacagtgcagtggcatttctgctctgtgggcacccagaacgagatcttgaccattcacttcactggacattcattcatctacggtaagagacatgaggacactctcaccctgtttcctatgcggggtgagtctgtaacagtgaccatggacaacgtgggtacctggatgctgacctccatgaatagcagtcccagatccaagaagctgcgccttaaatttcgtgatgtgaaatgcattccggatgatgacgaggactcctacgaaatattcgagccaccggaaagcaccgtaatggccactagaaaaatgcatgataggctggaaccagaagacgaagaatcagatgcggactatgactatcagaacaggctcgctgccgctctgggaataaggagctttaggaactcttcattgaaccaggaggaggaagaattcaatctgacagccctcgccctggagaatggcacggagtttgtttcctcaaatactgacatcatagtcggcagcaactatagcagcccgagcaacatctcaaagtttacagtcaataatttggctgagcctcaaaaggccccttcacaccagcaagccacaacggccggaagccctttgcgccacctcataggaaagaactctgtgttgaactcttcaaccgctgagcattcttctccatacagtgaggatccgatcgaagatcccctgcagcccgacgttaccggaatacggttactgtctcttggcgcaggagaatttaaaagtcaagaacacgcaaaacataaaggtcccaaagtggagagggatcaggcagccaaacacagattcagttggatgaaactcctggcccataaggtcggtaggcacttatcacaggatactggctctccaagcggtatgaggccctgggaggatctaccaagccaggatacaggatcgccatcacgcatgcgaccctggaaggaccccccttcagaccttctgctgctgaaacagtccaattcctctaaaattctcgtcggcagatggcacctagcctcggaaaaagggtcctacgaaattatccaggacacagatgaagatacagcagtcaacaactggctcatcagtccccagaacgcgagtcgggcatggggggagagtacgcccctagccaataagccagggaagcagtccggtcacccaaagtttccccgagttcggcataagtccctccaagtacgtcaagacggtgggaagtctaggcttaagaagtcacagttcttgatcaagactaggaagaagaaaaaagagaagcacacacatcacgcaccattaagccccaggacgtttcaccccctcagaagcgaggcttacaacaccttctccgagcgcagactgaaacactccctggtgctccataagagtaacgaaacctcattacccacagatctgaatcagaccctcccttccatggacttcgggtggattgcttcattaccagatcacaaccagaacagttcaaacgatacaggtcaggcctcctgccctccaggtctctatcagacggtcccacctgaagagcactaccagaccttccccatccaagaccctgaccaaatgcatagcacctctgacccctctcatcggtcatctagcccagagttgtccgagatgctcgaatatgacagatcccataaaagcttccccactgatatttctcaaatgagcccgagtagcgagcacgaggtctggcagacagtgatcagtcctgatctcagccaggtgactctttcaccggaactgtcccaaacaaatttgtcacctgatttgagccacactaccctgtcaccggagctcatccagcgcaacctatcccctgctctgggacaaatgcccatttctccagacctgtcgcatactacactgtccccagacctgagtcatactactctgtctctcgatctttctcagacaaatctttcgcccgaactctcgcagaccaacctttcgcccgcattgggacagatgcccctgtcccccgatctgtcccacacgacgctgtctctggattttagtcagacgaatctgagtccagagctgagtcacatgacactttctccagagctctcacagacaaatcttagtcccgctttaggacagatgcctatcagccctgaccttagccacaccaccctttccttggatttctcacagaccaacctcagccctgaattgtcccagaccaatctgtctcccgcactgggtcagatgcccctgagcccagatccaagtcatactaccttgtctttggacctgagccaaacaaacctttctccggagctgagccagaccaatttaagccccgaccttagcgagatgcccttattcgccgacctgtcgcaaatcccccttacccctgacctggatcagatgaccttgtcccctgatctgggggagactgacctctcccccaattttggccagatgagtctcagcccagatctcagccaagtcacattatcgccggacataagtgatactacactgctcccagacctctcccaaatctcccctccccctgacctggaccagatcttctacccctccgagagttctcagagcttgctactccaagaattcaacgaatctttcccctatcctgacttaggacagatgcctagtccatcaagccccaccttgaatgatacatttctgtccaaggagtttaatcccctcgtgattgttgggctgagtaaggacggaactgactatatcgagattatacctaaagaagaggtgcagtctagcgaagatgattacgcggagattgactatgtgccttacgatgacccctacaagacagatgtgaggaccaatatcaactcttcaagagatccagataatattgccgcttggtacttgcggagtaacaacggtaaccggaggaattattatatagcagcagaggaaatcagctgggactattccgaattcgtccagcgtgagacagatattgaggattctgacgacatccccgaggatactacctacaagaaagtggtctttagaaaatacctcgattctacctttactaagagggatcctaggggcgagtatgaagaacatctaggcattctgggccctatcatacgagccgaagtggacgatgtcattcaggtgcgttttaaaaatctggcatcacgaccttactctctccatgctcatggactatcctatgagaaaagcagcgagggcaagacctacgaggacgacagtccggagtggttcaaggaggataacgcagtgcagcccaatagctcctatacttatgtctggcatgctacggaaagatccggaccagagtctcccggttccgcctgtcgagcatgggcctactattctgccgttaacccagagaaggatatccactccgggctgatcgggccattgcttatctgccaaaagggtatcttgcacaaggatagtaacatgcccatggacatgcgcgaattcgtattattatttatgacctttgacgagaagaagtcatggtactacgagaaaaaaagtcgaagcagctggagactgaccagctccgaaatgaagaagtcccacgagtttcacgctatcaacggcatgatctactcattgccaggtctaaagatgtacgaacaggagtgggtccgcctgcacttactgaacattggaggatcgcaggacatacacgtggtgcacttccatggccagacgctgctggagaatggcaacaagcagcatcaactgggcgtgtggcctttgcttcctggatccttcaagactctggagatgaaagcaagcaaacctggatggtggttgctgaatacggaggtgggagagaaccaacgagccggaatgcagactcctttcctgataatggaccgggattgtcggatgcccatgggtctaagcaccggtatcatttcggattctcaaattaaggcatctgaattcctgggttactgggaacctcggctcgccaggctcaacaatgggggtagttataacgcatggtccgtggagaagctggctgccgagtttgcctctaagccttggatacaggttgatatgcagaaagaggtgattatcaccggcatccagactcagggagctaagcattacctgaaatcgtgctataccaccgaattttacgtggcttacagcagtaaccagattaactggcagatctttaaagggaattctacaagaaacgttatgtacttcaacggtaactcggatgcgagcaccataaaggagaatcaattcgatccccctatcgtggccaggtatatcagaatctctccaactcgggcatacaatagacccacgcttagattagagctgcaaggctgtgaggtgaacggctgctccactcctctgggaatggagaatggtaagattgagaataagcaaataacagcttctagtttcaagaagtcttggtggggggactactgggagccttttcgtgccaggcttaatgcgcagggcagggttaacgcatggcaggctaaagctaacaacaataagcaatggctggagatcgacttgttaaagattaagaaaatcacggccattattacccaagggtgtaaatccttgagcagtgaaatgtacgtaaagtcttatacgattcattactccgaacagggagtcgagtggaagccataccggctgaagtccagtatggtggacaagatctttgaagggaatactaacacaaaaggtcacgtaaaaaatttcttcaacccacctattataagtcggttcatcagagtgatcccaaagacatggaaccagtccatagcccttaggctggaactgtttggatgtgatatatatta

SEQ ID NO: 2221 - DNA, 999 bp, Artificial Sequence
  derived and/or modified sequence
atggatgacgctgtcgccccaggacgagaatacacgtatgagtggtcaatctccgaagacagcggtccgacacatgatgaccccccatgtctgacccacatctattattcccacgagaacttgattgaggattttaactccggactgattggccctctgcttatttgcaagaaaggaaccctcaccgaaggtgggacccagaagaccttcgataagcagattgtgttgctgttcgccgtcttcgacgagtccaagagctggtcccagtcttcctccttgatgtatacagtcaacggttacgttaatggcacaatgcctgacatcacagtgtgtgcccatgatcacattagctggcacctgcttggcatgtcgtcagggcctgaattgttttctatccactttaatggccaggttttagagcagaatcaccacaaggttagtgctattactctcgtgtcagctacatccacaaccgctaatatgactgtggggccagaaggaaagtggattatatcctctctgacgcccaagcatctacaagcaggaatgcaggcctacatcgacatcaagaattgtccaaagaaaacaaggaatttaaaaaaaatcaccagagaacagcggagacacatgaagcggtgggagtactttatcgccgctgaagaggtgatttgggactatgcaccagtgatcccagcaaatatggacaagaagtacagaagccagcatctggataacttctccaaccagattggcaagcactataaaaaagttatgtatacgcagtacgaagatgaaagctttaccaagcataccgtgaatcctaacatgaaggaagatggcatcctcggcccaatcattcgcgctcaggtgcgcgataccctgaagatcgtcttcaagaatatggcctcgaggccctattccatttaccctcatggggttactttcagcccatacgaggacgaggtgaatagttctttcacatcggggacgacaccctag

SEQ ID NO: 2222 - DNA, 6672 bp, Artificial Sequence
  derived and/or modified sequence
atgttccctggatgccccaggctttgggtcctcgttgtgctgggtacatcatgggtggggtgggggtcacagggaaccgaagccgcccagcttcgccaattttacgtcgctgctcagggtatcagctggagctataggcctgaacctacaaattcgtcattaaatttatctgtgacaagctttaagaagattgtgtacagagaatacgagccgtactttaagaaagaaaagccccagtccacaataagcggcctgctaggcccgacgctgtatgccgaggtgggcgatatcatcaaagttcactttaaaaacaaagctgataaacccctttctatccatcctcagggaatccgatattctaaactgagcgagggcgcctcctaccttgaccacacattccccgccgaaaagatggacgatgcagtggcaccaggcagagaatacacctatgagtggtcaatctcggaagactctggcccaacacatgacgaccctccttgcctcacacatatctactactcacacgagaatctgattgaagattttaattctggtctgatcggcccactcctaatatgtaagaaggggaccttgaccgaaggcggaacacagaaaacttttgacaaacaaatcgttctgcttttcgctgtgttcgatgaatctaagtcctggtctcagagctcttcattgatgtacacggtaaacgggtacgtgaatggcacgatgcccgacatcaccgtctgtgcacatgatcacatctcttggcacctcctcggtatgagctccggccccgaactgttttctatccactttaatggacaagtgctcgaacagaatcaccataaggtgtccgccataactctagtgtctgctacttctaccaccgcgaacatgacagtcggcccagaaggtaagtggatcatctcttccttgacgcctaaacatctgcaggctgggatgcaggcctacatagacatcaaaaattgtcctaagaaaacaaggaacctgaagaagattacgagagagcagcggcgtcacatgaaaagatgggagtattttatagccgcagaagaagtaatctgggattatgcccctgtgattcccgccaatatggacaaaaaataccgaagccagcacctggataacttttctaatcaaattgggaaacactataagaaagtgatgtatacacagtatgaagacgaaagtttcactaagcataccgtaaatccaaatatgaaagaggatggaattctggggccaattatcagggcgcaagtgagggacacactcaaaatcgtgtttaagaatatggcttctaggccctacagtatatacccacacggggtgactttcagtccttatgaagatgaggtcaacagcagtttcacctccggtagaaacaacaccatgatcagagcggttcaaccaggagagacatatacctacaagtggaatatcttggagttcgacgagcccaccgagaatgacgcgcagtgtttgacgcggccatattacagcgatgtggatattatgagggacatcgcctccgggctgatcgggctgctgctgatctgtaagagccgatccctggataggcggggcatacagagagcagccgacattgagcagcaggcagtgtttgctgtctttgatgagaataagagctggtacttggaggataacattaataaattttgtgagaatccagacgaggtgaagcgtgacgatcccaagttttatgagagtaacattatgtcaaccatcaatggctatgtacccgagtccatcaccaccctagggttttgcttcgatgacactgtccagtggcacttttgcagcgttgggacacagaacgagattcttaccatccacttcacaggccactcctttatttatggaaagcgccacgaagatacccttacactgttcccaatgaggggggaaagcgtaactgtcaccatggataacgtcggtacctggatgctgaccagcatgaattctagcccacgcagcaagaaactacgtctcaagttccgtgacgtgaaatgcatccctgatgatgacgaagactcttacgaaatttttgagccacccgaaagcacagtgatggccactcggaaaatgcacgatcgactggagccggaggatgaagaaagcgatgccgactacgattatcagaatcggctggccgccgccctgggaatccggagcttccggaacagcagccttaatcaagaagaggaagaattcaacctcaccgccctggcactcgagaacggcactgagttcgtcagcagcaacacggacatcattgtaggttctaattactcgtcccctagcaacatatctaagtttactgtgaataacctcgcggagccccagaaggcaccctcgcatcaacaggcaaccactgccggaagcccattgaggcatcttatcgggaagaacagcgtcctcaactcttccaccgcagagcactcctctccctatagtgaagatccaatcgaggatcccctccaaccggatgtgacggggatcagattattgtccctgggagcgggggaattcaaatctcaggagcatgccaaacacaagggcccaaaggtggagagagatcaagccgctaagcacagattcagttggatgaagcttctcgctcacaaggtgggtaggcatttgtcgcaggataccgggtccccaagcggcatgagaccctgggaggacctgccctctcaggacaccggatctccaagcagaatgagaccttggaaggacccacctagcgatctcctgctgttgaaacagagcaactcttccaagattcttgtcgggaggtggcacttggcctctgagaagggctcctacgagatcatccaggatacagacgaagacacagcggtcaacaattggctcatctcgcctcagaacgcctccagggcttggggagagtccacgcctttagccaacaagccaggcaaacagagcgggcatcctaagttccctagggtgcgtcataagtccctgcaagtgcgccaagacggggggaagtccagacttaagaaaagccagtttctcatcaaaacacggaagaaaaagaaggagaagcacacgcaccacgcacctttgtcacctaggacatttcatcctcttcgatccgaggcctataataccttttctgaacggaggctaaagcatagtctggtgctgcacaagtctaatgagacctctttgcctaccgatctaaaccagaccctaccctctatggattttggatggattgcgtcgcttccagatcacaaccagaattcttctaatgataccgggcaggcaagttgtcctcccggcctctatcagactgtcccgccggaggagcattatcagacattccctatccaggacccagatcagatgcactccaccagcgacccttctcatcggagttctagtccagagctgagcgagatgctggagtacgatagatcacacaaatccttcccaactgacatcagccagatgtctccctcatccgagcatgaagtctggcagaccgtgatttcaccggacctgagccaggtgacactgtctcccgagctctcacagacaaacctcagcccagatctgtcccatactacacttagcccggaactgattcaaaggaacttgtctccagcccttggccagatgccaatttctcccgacttgagtcatacaaccctcagtccagatctgtctcataccactctatccctcgacctgagtcagacaaatctctcgcctgaactcagccagactaatctctctccggctctggggcaaatgcctctgtctccagatctgtcgcataccactttgtctctggacttctcccaaactaacctctcacctgaactgagccacatgacgctgtcgcccgaattgagccaaacgaacctgagccccgcattagggcaaatgcctattagcccagacctgtcccatacaacattgtccttggacttctctcagacaaatctgtcgcccgaactgtcccagaccaatttgagtcctgcgttgggccagatgcccctgtctccagatcctagtcatacaaccttgtccttggatctgagccagacaaatctgtcacccgaactttctcagacaaacttaagtccagacctgtctgagatgccgctgtttgcagacctttcacagattcccctgacccctgatttggaccagatgaccctgtcgcctgatctgggtgaaacggacctgagtcctaatttcggacaaatgagcctctcgccggacctctcccaagtgacactgtccccagatatttctgacactaccctactccccgacctgtcgcagatctccccacctccagaccttgaccaaatcttctacccctctgagtcctcacagtccctgttgctacaggagtttaacgagagtttcccttatcccgatctggggcagatgccatcaccaagctcaccaacactaaacgatacatttctttctaaggaattcaaccccctagtcatcgtgggtctaagtaaagatggcactgattatatcgaaataatccctaaagaagaggtacaatcctccgaggacgactacgctgagatagattacgtgccctacgacgacccatacaaaaccgatgttcgcacgaatattaatagtagtcgtgacccagacaatattgctgcctggtacctgcgtagtaacaatggcaatcgacgtaattattatattgcggcggaggaaatttcttgggactatagtgagtttgtccaaagggagacagatatagaagattctgacgacattcccgaggatacaacttacaaaaaagtggtgttcaggaagtacctagatagcactttcacgaagagagacccccggggggagtatgaggaacatctcgggatcttaggacctattatcagagcggaggtcgatgatgtgatacaggttcgatttaagaatctagcgtcccggccatactcgctgcacgcccacggtctgtcctatgagaaatcctccgagggtaagacttatgaggatgatagcccggaatggtttaaggaggacaacgcagtccaacctaatagctcgtacacttatgtgtggcacgcgactgagaggagtggccccgagagccctgggtctgcgtgtcgagcttgggcctactacagcgccgttaaccccgaaaaagatattcatagtgggctgatcggaccgctgcttatttgccagaagggcatcctgcacaaagattctaacatgccaatggacatgcgtgaattcgtgcttttgtttatgacatttgatgaaaaaaagagttggtattacgagaaaaagagtagatcatcgtggcgcctgacctcgtctgagatgaagaagtcccacgaattccacgcgatcaatggaatgatctatagcttaccaggcctcaagatgtacgaacaagagtgggtccgactccacctgctaaacatcgggggatcccaggacatccatgtggttcattttcatggccaaacgttgttagagaacggaaacaaacaacatcagttgggagtgtggcctctcctcccaggcagttttaaaacccttgaaatgaaggccagcaagcccggctggtggttgctcaataccgaggtgggcgaaaaccaacgcgcggggatgcaaaccccttttttaattatggaccgcgattgcaggatgcctatgggattatctaccggaatcatttcagattcgcaaattaaagcgagcgaatttctgggctactgggagccccgactggctaggctgaacaacggcggatcatacaatgcgtggtccgttgagaaactggcagctgagttcgcctccaaaccctggattcaggtcgatatgcagaaggaggttattattacaggcatacagacccagggagcaaagcactacctcaagagttgctataccactgagttctacgtggcatactcctccaaccagatcaactggcagattttcaagggaaactctacacggaacgtgatgtatttcaatgggaactccgatgccagtaccattaaagagaaccaatttgatcctcctatagtcgctcggtacattcgcatatctccaacccgcgcgtataaccgtcccaccttgagactcgagctgcagggctgcgaggttaacggctgtagcacacccctggggatggagaacggcaagattgagaacaaacaaattactgcatcttcatttaagaagagctggtggggcgattattgggagccttttagggccaggctgaacgcacagggccgtgttaatgcatggcaggccaaagctaataataacaagcagtggctggagattgacctgttgaagatcaagaaaattactgccataatcacgcagggatgcaagagcctgtcctccgaaatgtacgtgaagtcctatactatccattactcggagcagggagtcgaatggaaaccctatcgcctcaagtcctctatggtcgacaaaatcttcgagggcaacaccaacaccaagggtcatgtcaagaatttctttaatcctccaatcatatcccgctttatccgagtgatccctaaaacatggaatcagtccatagccctccgcctggaactatttggctgtgatatatac

SEQ ID NO: 2223 - DNA, 6672 bp, Artificial Sequence
  derived and/or modified sequence
atgttccctggttgccctcgcctgtgggtcctggtggtcctgggcacatcctgggtgggatgggggagccaagggactgaggctgcccagctcaggcaattttatgtggcagcccaagggatcagttggtcttatcggcccgaacccactaattcaagccttaatctctcagttacgagcttcaagaagatagtgtatagggaatacgaaccgtacttcaagaaagagaaacctcagagcactattagtgggcttttgggacctacgctatacgccgaagtaggggatataataaaggtgcactttaagaacaaggcagacaaacctttgtccatccacccacagggtatacgatacagcaagctctccgaaggggccagctatctcgatcatacttttccagcggaaaagatggacgatgccgtcgcccctggcagagaatacacctacgagtggtctatctctgaagattccggccccacccacgatgaccctccgtgcctgacccacatttattatagtcatgaaaatttgatcgaggattttaattccggtttgatcggaccacttttaatctgcaagaaaggcacactcactgaaggaggaacccagaaaactttcgacaagcagattgtcctcttattcgccgtcttcgacgaaagcaaaagctggtcacagtcaagttcactgatgtacacggtgaatggatacgtgaacggcacgatgccggacataacagtatgcgctcacgatcacatctcatggcacttgttgggtatgtcaagcggcccggaactctttagcatccactttaatggccaggtgttagagcagaatcaccataaggttagtgccattacactagttagcgcaaccagcacaacggccaatatgactgtgggtcccgagggaaagtggattatctcctcactgacacctaagcacctccaggcaggcatgcaggcctacatagacattaagaattgtcccaaaaagacccggaatctgaaaaagattacaagagaacagagaagacacatgaagagatgggagtactttattgctgccgaggaagtgatctgggactacgcaccagtgatccctgcaaacatggacaagaaatatagaagtcagcacctggacaacttttccaatcaaatcggcaagcactataagaaggtgatgtacactcagtatgaagatgaatcttttaccaaacacaccgtcaaccctaacatgaaggaggacggaatcttgggcccaatcatcagggcgcaggttagagatacattgaaaatcgtctttaaaaacatggcatcgaggccatattctatctaccctcacggggtgactttctcaccatatgaggacgaggtgaattcctcttttacctcaggacgaaacaatacaatgatcagagcggtgcagcccggagagacctatacctacaagtggaatatcctggaattcgatgaaccaaccgagaacgacgcccagtgtctgactcgaccatattatagtgacgtagatatcatgcgggatattgcctctggcctgatcgggctgctgctgatctgcaaatcacgctctctcgatcgtagaggcatacagcgtgctgctgatatcgaacaacaggccgtcttcgctgtgtttgacgaaaacaagagttggtacctagaggataatatcaacaaattttgtgaaaatcccgatgaggtgaagcgagacgatccaaaattttacgagtccaacataatgtccacaattaacggttatgtaccggagtccattacgactctagggttttgcttcgacgacaccgtgcagtggcacttctgcagtgtcggaacacagaacgaaatactgacgatccattttaccggacattcctttatttatggaaagcgccacgaagatacgctcacactcttccccatgcgaggcgagtcggttactgtgacaatggataatgtggggacctggatgctgacttccatgaattcaagccctaggtcgaagaaacttaggctgaagtttagggatgtcaagtgtatccctgatgatgacgaggacagctacgagatctttgagcctcctgaatcgaccgttatggccacccggaagatgcacgatcggcttgagcccgaggatgaggagtcggatgccgactacgattaccaaaataggttggcggccgccttaggaatccgatccttcaggaattcgtccctcaaccaagaagaagaggaatttaacctaactgctctggcccttgagaacgggactgagtttgtttcaagcaacaccgacatcattgttggcagtaattatagcagcccatccaacatctcaaaattcactgtcaataatctcgccgaaccccaaaaagccccttcacatcaacaggctactacagccggaagccccctaagacacctgatcggcaagaacagcgtgctcaattcatccactgccgagcactcatcaccatattcggaggatcctatagaggaccctttgcagccggacgtgactggaatcagactgctttctctgggcgcgggagaattcaaaagtcaggagcatgctaagcataagggaccaaaggttgagcgtgatcaagctgcgaaacacaggttttcatggatgaagctactggcccacaaggtgggacgccacctgtcccaggacaccggctcccccagtggaatgcggccatgggaggacttgccctcccaggataccggcagcccatctcgaatgcgcccttggaaagatccacccagtgatctgctgttgctcaaacaatctaactccagcaaaattctggtgggccgctggcatctggctagtgaaaagggcagctatgagataattcaggacacagatgaagacaccgccgtgaacaactggttaattagtcctcaaaatgcgagcagggcctggggagagtctacccctctcgctaataaaccgggcaagcaaagcggccaccccaagttcccgcgggtgcggcataaatccttgcaggttcgtcaggacggaggaaaaagtaggttaaaaaaaagtcagtttcttattaagactaggaagaagaagaaagagaaacacacacatcatgcgccattgagccctaggaccttccatccactacgctccgaggcatataatacgttttctgaaagacgcttaaaacactctctcgtgctccacaagtctaacgagacgagtttgcccacagatctcaaccagacgttgccatcaatggacttcggttggatcgcctcgttacccgaccacaatcagaattcttccaacgacactggacaagcaagctgtccccccggcctataccagacagtgccccccgaggaacactatcaaaccttccctatccaggacccagatcagatgcattcaacgagcgatccaagccatcgctcttcctccccggagctaagtgagatgctggagtatgaccgaagccataagtcatttccaacggatattagccagatgtctcccagctccgaacacgaagtgtggcagaccgtcatctcgccagatttgagccaggttactctgagcccggagctgtcacaaaccaacctctcccccgacctatcacatactactctgtcaccagagctgattcaacgcaacctgtctcccgcattgggccaaatgcccattagcccggacctgtcccatacgacactttcccccgatctatcccacaccacgctctcactagacctgagtcagacgaatctttcccccgaactgagccagactaacctgagtccagcactcgggcagatgcctttgtcacccgacctgtcgcacactaccttgtctctggacttttcacagacaaatctgtctcctgagttgagccatatgaccctttcccctgagttgtcacagacgaatttgagccccgcgctgggtcagatgcccatcagtcccgatctcagccacaccaccctgagcctggacttttcccagaccaacctgagccctgagttatctcaaaccaacctgtcccccgcattaggtcagatgcccttgtctcccgatcctagccataccacgctgagtctggatttatcccagaccaaccttagcccggaactgtcccagaccaacctgagcccagatctcagcgagatgccgctgtttgccgaccttagtcagatccctctgacccctgacctggaccagatgactctgtctccggacctcggagagaccgatttgtcacccaatttcgggcagatgagccttagcccggatttatcccaggtgaccctgagccctgatatcagtgatactacacttcttcccgatctttctcagatatcccccccgccagacctcgatcaaatcttttatccgagcgaatcgtcacaatctctgctgctgcaggagttcaacgagagctttccctatccagatctcggacagatgcctagcccttcgtcaccaaccctcaatgacactttcttgagtaaagaattcaaccctctcgtcatcgtggggctaagtaaagacgggacagattacatcgagattatcccgaaagaggaagtccagagcagtgaggatgattatgcggaaatagactacgtgccgtacgacgacccctataagaccgacgtcagaaccaacattaacagtagtcgcgacccagataatatcgctgcatggtacttacgcagtaacaatggaaatcgccgcaactactatatcgctgccgaagagatatcctgggattatagcgagtttgtgcagcgcgaaactgatatcgaggatagcgacgacatccctgaagacaccacctacaagaaggtggtgttccgtaagtacctggacagcacattcaccaaaagagatccaaggggagaatatgaggagcatttaggaatcttgggtccgatcattagagctgaggtggatgatgtaattcaagtacggttcaaaaacctggcttcaaggccatattcactccacgcacatgggttgtcttatgagaaatcaagcgaggggaagacctatgaggacgacagccccgagtggtttaaagaggataacgctgttcagcctaatagcagctatacttacgtttggcacgccacagagaggtccggacccgagtctccaggatcggcatgtcgagcctgggcgtactacagtgctgtgaacccagaaaaggatatccatagcgggttgatcggcccgctcttgatctgtcagaaaggaattctacacaaggattccaatatgccaatggacatgcgggaattcgtgctgctgtttatgactttcgacgagaagaaatcatggtattatgagaaaaaaagcaggtcgtcctggcgcctgacatctagtgaaatgaaaaaatcccacgaattccatgccatcaacggcatgatctattctctgcctgggcttaagatgtacgaacaagaatgggtgagactccatctgcttaacattggcggatcccaagacatccacgtcgtgcactttcatggacagactctcctcgagaacggcaataagcagcaccagcttggagtgtggccattgcttcctggtagttttaagacattggagatgaaggccagcaagcctgggtggtggctcctgaacacagaagtgggggaaaaccagcgggccggaatgcagacccccttcctcataatggacagggactgcaggatgcccatggggctctcaactgggatcattagcgactcccaaataaaggcttcagaatttctgggttactgggaaccacgactcgctagattgaacaacggcggatcatataacgcctggtcagtggaaaagctggctgccgagttcgcatccaagccatggatccaggtggatatgcagaaagaggttattatcacagggatccaaacccagggggctaaacactacttgaaaagctgctatactaccgaattttatgtagcttattcctctaaccagatcaattggcagatctttaagggcaattcgacccgcaatgtcatgtattttaacgggaactcggatgccagtacgatcaaagagaatcagtttgaccctcctatcgtggccagatatatccgaatcagcccaacacgggcgtataatagaccaactctcaggctagagttgcagggttgcgaggttaacggttgctccactcccctagggatggagaacgggaaaatcgagaacaagcaaattaccgcgagcagcttcaaaaaatcctggtggggtgattactgggaacctttccgagcacgtctcaacgctcaagggagggtgaatgcgtggcaagccaaggctaacaacaataagcagtggcttgaaatcgatctgcttaagataaaaaaaatcaccgccatcataactcagggctgtaagagccttagcagcgagatgtacgtgaagagctataccatccactactctgaacagggcgtggaatggaaaccttacagactcaagagttctatggtggataagatctttgagggcaatactaacaccaagggccatgttaaaaacttcttcaaccccccaatcatcagccgcttcattcgcgtgatccccaagacctggaaccagtctattgctctgcgcctcgagctgtttgggtgtgatatttac

SEQ ID NO: 2224 - DNA, 6672 bp, Artificial Sequence
  derived and/or modified sequence
atgttccctggatgcccgcggctgtgggtgcttgtggtgctgggcacctcctgggtgggatggggctcacaaggaactgaagcggctcagctgcgccaattctacgttgcagcccagggaatcagctggagctaccggccagaacctaccaattcatcccttaatctctcggtcaccagcttcaagaagatcgtgtaccgggaatacgaaccgtacttcaagaaggagaagccgcaatccactatctccggcctgctgggaccgactctttacgcagaagtcggcgacataatcaaagtacactttaagaacaaggccgacaagcctctgtcgattcatccgcaaggcatccgctattcgaagctcagcgagggtgcgtcgtatttggatcatactttccctgccgaaaagatggacgatgccgttgcgccgggccgcgaatacacctacgagtggtccatttcagaggacagcggtccaacgcacgacgacccgccttgccttactcatatctactactcccacgaaaacctgatcgaagatttcaatagcggtcttatcgggccacttttgatctgcaagaaaggaactctgactgagggcggaacgcagaaaactttcgacaagcaaatcgtcttgctgttcgcggtgtttgacgagtcaaaatcctggtcgcaatcatcgtcactgatgtacaccgtgaacggatacgtgaatggaaccatgcccgacatcacggtgtgcgcccacgaccatatctcctggcatctcctcgggatgtcaagcgggcctgagctgttctcaatccacttcaacggacaagtcttggagcagaatcatcacaaagtgtcggccattaccctggtgtccgcaacctcgaccactgcaaacatgacggtgggacccgagggaaagtggattatcagttcactcaccccaaagcacctgcaggctggcatgcaggcgtacatcgacatcaagaactgtccgaaaaagactcgaaacctgaagaaaatcacccgggaacagcgcagacacatgaaaaggtgggaatactttatcgcagctgaggaggtgatctgggactacgcaccggtaatcccggcgaacatggacaagaagtaccggagccaacacttggacaacttctccaatcagatcggaaagcactacaagaaagtcatgtatacccagtacgaggacgagtcctttaccaaacatactgtgaatcccaatatgaaggaggacggcatcctcggacccatcatcagagcccaggtgagggacacccttaagatcgtgttcaagaacatggcatcaagaccttattccatctatccacacggagtgaccttcagcccttacgaagatgaggtgaacagcagctttacttccggtcggaataacactatgatccgcgctgtccagccgggagaaacgtacacgtacaaatggaatattctggaattcgacgagcctaccgaaaatgatgctcaatgcctcacgcgcccctactacagcgatgtcgacataatgcgggatatcgcgagcggactgatcggattgctgctcatttgcaagtcgcgctcgctggatcggcgcgggatccagagagccgcagacatcgaacagcaagcagtctttgccgtgttcgatgagaacaagtcatggtatttggaggacaacatcaataagttttgcgaaaacccagacgaagtgaaacgcgacgatccgaagttctacgaatccaacatcatgtctaccatcaacgggtacgtgccggagtcgatcaccaccctggggttctgctttgacgataccgtgcagtggcatttttgctctgtcggaacccagaacgagatcctcaccatccacttcaccggccatagcttcatctacggcaagcgacacgaggacaccctgactctgtttccaatgcgcggggaatccgttaccgtgactatggacaatgtcggaacttggatgctgactagcatgaactcatctccgcgtagtaaaaagctgcgtttgaaattccgggatgtgaaatgcatcccagatgacgacgaagattcgtacgagatcttcgaaccgcccgagagcactgtgatggccactcggaagatgcacgatagactggaaccagaggatgaagagtcggacgcggactacgactaccagaacagattggcggccgctttgggaatccgaagtttccgaaacagcagcctgaaccaggaagaggaggaattcaacctcactgcgctcgctctggaaaatggcaccgaattcgtgtcgagcaacaccgatatcattgtgggctccaactacagctcgccttcgaacatctcgaaattcactgtcaataacctcgccgaaccccagaaagccccctcgcatcagcaggccaccaccgccgggtccccattgcggcacctgatcgggaaaaactccgtgctcaatagctcaactgctgaacactccagtccctactccgaagatccgattgaagatccgctgcagcctgatgtcactggcatccggctcctttcgctgggagcaggagagttcaaatcccaggaacatgcgaaacataagggacctaaggtggaacgcgaccaggccgcgaagcataggttttcctggatgaagctgctggcccacaaggtcggacgacatctgtcgcaagacacgggctccccgagtgggatgcggccatgggaagatttgccatcgcaggatactggatcaccgtcgagaatgcggccgtggaaggacccaccttctgacctgctcctcctcaagcagtctaactcgagcaagattctggtgggacggtggcatctggcgtcggaaaagggttcatacgaaatcatccaagacactgacgaggacaccgccgtgaacaattggctcatctcgccgcagaacgcgtcccgcgcgtggggcgaatcgaccccgcttgccaacaagccgggtaagcaatcaggccaccccaaattcccgcgcgtgcgccataagtcacttcaggttcgccaagatgggggtaagtcgaggctgaaaaagtcacagttcctcattaagacccgcaagaagaaaaaggagaagcacacccaccacgctccacttagtccgcggaccttccatcccctgcgctcagaagcctacaatactttcagcgagcggcgattgaaacactccctggtgctgcacaagtccaacgagacttcgctccctaccgacctgaaccaaaccctgccttcgatggattttggatggatcgcctccctccctgaccataaccagaattcctcaaatgatactggacaggcttcctgcccacctggactgtaccaaaccgtgccacctgaggagcattaccagacgttccctatccaagatcccgaccagatgcattctacctccgaccctagccaccgctcgtcgtcgcctgaactttcggagatgctggagtacgatagatcgcacaagagcttcccgacggacatctcacagatgtccccatcctcagagcacgaagtgtggcaaaccgttatctcgccggatctgtcccaggtgactctcagcccggagctctcccagaccaatctgagtccggacctgtcacacactactctgtctccagaactcattcagaggaacctctctccagcactcggacagatgcccatctcaccggacctgagccataccacgctctccccagatctctctcacaccaccctctctctcgacctctcgcagaccaacctgagtccggaactttcacaaaccaatctgtcgcctgctctgggccaaatgccactgtctccggatctctcgcacactaccctctcgctggacttttcccaaaccaatctttcaccggaactgagccatatgaccctttcaccggagttgtcccagactaacctgtctccagccctcgggcaaatgccaatcagcccggacctgtcccacaccaccctgtcgctggacttcagtcagactaacctttcacctgaactgtcacaaactaacctgtcaccggcgttgggacagatgccgcttagcccggacccctcgcataccaccctgtccctggacttgtcgcagacgaatctctcacccgagctgagccagactaatctgtcacctgacttgagcgagatgcctttgttcgccgatctgagccagatcccattgaccccagacctcgaccagatgacgctgagccccgaccttggtgaaaccgacctctccccgaacttcggacagatgagcctgtcgccggatttgtctcaagtgaccctctcgccagacatctccgacactaccctgttgccagatctctcgcaaatctcaccaccccccgacttggaccagatcttctaccccagcgagtcgtcacaaagcctgctgttgcaagagtttaacgagtcattcccctacccagacctgggccagatgccatcgccgtcatcgccgacgctgaacgatacttttctgtcgaaggagttcaatccgctggtgatcgtgggattgtccaaagacggaactgactacatcgagatcatccctaaggaagaggtgcaaagcagtgaagatgattacgccgaaatcgactacgtgccctacgatgacccgtacaaaactgacgtccgcactaacatcaactcgtcacgcgacccagataacatcgccgcatggtacttgcgcagcaataatggaaatcgcaggaactattacatcgcggccgaagaaatcagctgggattactcggaattcgtgcagcgggaaaccgacatcgaggactcggatgacataccggaggataccacttacaaaaaggtcgtattcaggaagtacctggattcgacgttcactaagcgggatccgaggggagaatacgaagagcacctgggaatcctgggcccgatcatcagagcagaagtggacgacgtgattcaggtgcggtttaagaacctcgcctcaagaccatactcccttcacgcacatgggctcagctacgaaaagagcagcgaaggaaagacctacgaggatgactcgccggagtggttcaaggaagataacgccgtccagccgaactcgagctacacttacgtctggcacgctactgaacggtcgggaccagaatcaccgggaagcgcttgtagagcgtgggcatactactccgctgtgaatccggaaaaggacattcactcgggactgatcggtccgctccttatctgccagaaaggaatcctccataaggattcgaatatgccaatggacatgagagaattcgtccttctcttcatgactttcgatgaaaagaaatcatggtactacgagaagaagtcgcgcagcagctggcgcctgacctcctccgaaatgaagaagtcacacgagttccacgcaattaacggtatgatctactcactgccaggtctgaagatgtacgaacaagagtgggtcaggttgcatctgctgaatatcggcggttcacaagatattcacgtcgtgcacttccatggacagactctcttggaaaacgggaataaacaacaccaactcggagtctggccgctcctgccgggtagcttcaagactcttgaaatgaaggcgagcaagcccggctggtggctcctcaacactgaggtgggagaaaatcagcgggccggaatgcagacgcctttcttgattatggatcgcgactgtcggatgccaatgggcttgtcaactggaattatctctgacagtcagatcaaggcttcggaatttctgggttactgggaaccgcgcctggcccgcctcaacaatgggggctcgtataacgcctggagcgtggagaaactggccgcggaattcgcctccaaaccgtggatccaagtggatatgcaaaaggaggtgatcatcaccggcatccagactcagggagccaagcactatctgaagtcgtgttacaccactgaattctatgtcgcatacagctccaaccaaatcaattggcagattttcaaagggaactccactagaaacgtgatgtacttcaatggaaactcggatgcgtcgacgatcaaagaaaatcaatttgatccaccgatcgttgctagatacatcagaatctcgccgacccgggcctataaccgtccgaccctgaggttggagctccagggctgtgaagtgaatggctgttcgaccccactgggaatggagaatgggaagatagaaaacaaacaaattactgcatcctcgtttaagaagagctggtggggggactactgggagcctttcagggcaagactgaatgcgcaaggacgcgtgaacgcttggcaggccaaagccaacaataacaagcagtggctggagatcgacctgctgaagatcaagaagattactgctatcattactcagggttgcaagtctctgtcatccgagatgtacgtgaagagttacactattcattactccgagcagggagtcgaatggaaaccttaccggctgaaaagctccatggtcgataagatcttcgagggcaacaccaacacgaaaggccacgtgaagaactttttcaacccgcctatcatttccagattcatacgcgtcatccctaagacctggaaccagtccatcgcgctgcgcctggaactgtttggttgcgacatctac

SEQ ID NO: 2225 - DNA, 6672 bp, Artificial Sequence
  derived and/or modified sequence
atgtttcctggttgcccgcgcctctgggtcttggtcgtgctcggaacttcctgggtgggatggggatcccagggaaccgaggcagctcaactgagacaattctacgtggcggctcaaggcatctcatggagctaccggcctgagccgactaattcttcgctgaacctctccgtgacctcattcaagaagatcgtctaccgtgaatacgagccatacttcaagaaagaaaaaccacaatcgaccatctcgggcctcctgggcccaaccttgtacgccgaggtgggagacatcatcaaagttcactttaagaataaggcagacaagcctctctccatccatccacagggaatcaggtactctaagctgtcagaaggagcttcatacctggaccataccttcccagccgagaagatggacgatgcggtcgcccctggcagggagtacacttatgaatggtcgatctcggaagattcagggcctactcacgatgacccgccttgtctgactcacatctattactcacacgagaatctgatcgaagatttcaacagcggactgatcggtccactcctgatttgtaagaagggaactctgaccgaagggggaacccaaaagactttcgataagcagattgtcttgctgtttgctgttttcgatgaatcaaagagctggagccaatcgagctcgctcatgtacaccgtgaacggctacgtcaacggcacgatgccggacatcactgtctgcgcccatgatcacatctcatggcacctgctgggaatgtcgtcgggaccggaactcttctccatccacttcaatgggcaggtgctggagcaaaatcaccacaaagtgagcgctatcaccctcgtgtcggctacttccaccactgcgaacatgaccgtcggaccagaaggcaaatggatcatctcctccctgaccccgaaacacttgcaggcaggtatgcaggcctacattgatatcaagaactgccccaaaaagaccagaaatctgaagaagattaccagggaacaacgccggcacatgaaacgctgggaatacttcatagctgcagaggaggtcatctgggattacgctccggtgatcccagcaaacatggacaaaaagtaccggtcgcagcacctggacaatttctctaaccaaatcggtaagcactataagaaagttatgtacacccagtacgaggacgaatcctttactaaacataccgtgaatcctaacatgaaggaagatggaattctggggcccattattcgagcccaggtccgggacactttgaaaattgttttcaaaaacatggcctccaggccgtactcaatctacccgcacggggtgaccttcagcccatacgaagatgaggtcaacagctctttcacctccgggaggaacaacactatgatccgcgccgtgcagccgggcgagacttacacttacaagtggaatatcctggaattcgacgaaccgaccgaaaacgacgcgcagtgccttacgcgtccttactactcggatgtggacattatgcgcgatatcgcctcaggcctcatcggtctgctcctgatatgcaagagccggtccctcgaccgccggggaatccagagagcagctgacattgaacaacaagctgtctttgcagtgttcgacgaaaacaagagctggtacctcgaggacaacatcaacaagttctgcgaaaacccggatgaggtgaaaagggacgaccccaagttctacgagtccaatatcatgtcgacgatcaatggatacgtgcccgagtccatcaccaccctgggtttttgcttcgacgacactgtgcagtggcatttctgctccgtcggaactcagaacgaaatcctgaccatccattttaccggacattcctttatctacggcaagagacacgaagataccctcactctgttcccgatgcgcggagaatcagtcaccgtgaccatggacaatgttggaacttggatgctgacttccatgaactcgtccccccggtccaaaaagctccggctcaaattccgggacgtgaagtgcataccagacgatgacgaagattcgtatgagatcttcgaaccccctgagtcaaccgtgatggccacgcgcaagatgcacgacagactcgagccggaggatgaggagtcagatgctgactacgactaccagaatagactcgctgcagcactgggaatccggtcttttaggaacagctccttgaatcaggaggaagaggaattcaatctgactgcgctggccctggagaatggtaccgagttcgtgtcgtcaaacaccgacatcatcgtcggcagcaactacagctcccccagcaacatttcgaaattcactgtgaacaatctggcagagcctcagaaggccccatcccatcaacaagccaccacggccggctcaccactgcggcacctgatcggaaagaattcggtcctgaattcgtcgactgccgagcactcctccccatattccgaggatccgatcgaagatcctctccagcccgacgtgacggggatcagactgctgtcgcttggcgccggcgagttcaagtcgcaggaacacgccaaacacaagggcccaaaggtggagcgcgaccaggctgccaagcatagattcagctggatgaaactgcttgcccacaaggtgggacgacatctctctcaagacactggatccccgtcaggaatgcgcccgtgggaagatctgcccagccaggacactggaagcccttccagaatgcggccgtggaaggaccccccgagcgacttgttgctccttaagcagagcaattccagcaagatcctggtgggtcggtggcatctggcttcagaaaagggttcatacgaaatcatccaggacactgacgaagataccgcagtgaacaattggcttatctcaccgcagaacgcctccagagcctggggagagtcgacccctctggcgaacaaaccggggaaacagtccggccaccctaagtttcccagagtgcggcacaagtcgctgcaagtccgccaagatggaggcaagtccaggctcaaaaagtcgcagttcctgatcaaaactcggaagaagaaaaaggaaaagcacacccatcacgcgcccctgtccccacgtacctttcatccactcagatcggaggcttataacaccttttccgagcgccgcttgaagcactccctggtcctgcacaagagcaacgagacttcgctccctacggacctgaaccaaacgttgccgagcatggacttcggatggatcgcttcgctgcccgaccacaaccaaaacagcagcaacgacaccggccaggcatcctgtcccccagggctgtaccagacggtcccgccagaggaacattaccaaaccttcccgatccaggatccggatcaaatgcactcgacttccgacccatcacataggagctctagcccagaactcagtgaaatgctcgagtacgacagatcccataaatccttcccgaccgatatctcacaaatgtcaccatcatccgaacacgaggtctggcagaccgtaatctcgccagatctgtcgcaggtgaccctctcccctgaactcagccagacgaatctgtcaccagacctctcacacaccactctctccccggaactgatccaacgcaacttgtcccctgccctgggacagatgcctatttcgccggatttgtcgcacactactctctcgcccgatttgtcccacacgactctttcgctggaccttagtcaaactaatctgtcgccggagctgtcccagactaacctgtctcctgccctggggcagatgccgctttcaccagatctgtcccatactaccctttcgttggacttctcgcagactaatctcagcccagaactttcgcacatgactctctcaccggaactgtcgcagaccaaccttagtcccgccctgggccagatgccgatcagccctgatctgagccatactactttgtcgctggacttttcgcaaacgaatctgtcccctgagctgtcgcagacgaacctgtccccggcactcgggcagatgcccctgagccccgatccgtcccacactacgctctccttggacctgtcacagaccaatctgtcgcctgaactctcgcagaccaatttgtcaccggacctgtcagaaatgccgctgttcgccgatctctcccagatcccactcacgccggatctggatcaaatgaccctgtcccccgatctgggtgaaacggacctgagcccgaattttggacagatgagcctgtcgccagacctcagccaggtgaccctgtcaccggatatcagcgacacgactctcctgccggacctctctcagatctcaccgccgcccgatctggatcagatcttctacccttcagagagctcgcagtcactgctcctgcaagagttcaatgaatcgttcccataccctgaccttggacagatgccctccccgtcaagcccgaccctcaacgacacctttctttcaaaggagtttaatccgctggtcatcgtggggctctccaaggatggcactgactatatcgagataatccctaaggaagaagtgcaaagctccgaggatgattatgctgagatcgactacgtgccctatgacgacccctacaagactgatgtgcgcaccaatatcaattcatcgagggaccctgataacattgccgcatggtacctgcgctcgaacaacggaaaccgcagaaattactacatcgccgcagaagaaatctcatgggattactcggaattcgtgcagagggaaactgatatcgaggactcggatgatatccctgaggacacgacctacaaaaaagtggtgtttcgcaaatacttggacagcaccttcacgaagcgcgatccacggggagaatatgaagagcatctcggtatcttgggaccgatcattagagcagaagtggacgatgtcattcaagtccgcttcaagaacctcgcttccagaccgtacagccttcatgctcacggactgagctacgaaaaatcatccgagggaaagacttacgaggatgactccccagaatggtttaaggaggacaacgcggtgcagccaaatagctcgtacacctacgtatggcacgccactgagcggtctggcccagagtcacctggaagcgcgtgtagggcttgggcgtactactccgcggtgaacccagaaaaggacatccatagcgggctcattggaccactcctcatttgtcaaaagggaatcctgcacaaagacagcaatatgcctatggacatgcgggaattcgtgctcctcttcatgacttttgatgagaagaaatcgtggtactacgaaaagaagagccgcagctcgtggcgcctcactagctcagaaatgaaaaagtcacatgaattccacgccattaacggaatgatctactcgttgccaggactcaagatgtacgaacaagagtgggtgcgactgcatctgctgaacattggcggttcacaggatattcatgtcgtgcacttccacggacaaaccttgctcgagaacggtaacaagcagcatcagctcggagtgtggcctctgttgccgggatccttcaaaaccctcgagatgaaggcgtctaagcctggatggtggttgcttaataccgaggttggagaaaatcaaagggccggcatgcagactccgtttctcattatggacagggactgcagaatgcccatgggattgtcgaccgggataatctcggactcccagatcaaggcgtccgagttcctcgggtactgggaaccacgtcttgcccgcctgaacaacggtggctcatacaatgcctggtcagtggagaagctcgccgccgagttcgcgtctaaaccatggatccaagtggacatgcaaaaggaggtgatcatcaccggaatccaaactcaaggcgcaaaacactatctcaaaagctgttacactactgagttctacgtggcctacagctcaaatcagataaactggcaaatcttcaagggaaattcgaccaggaacgtgatgtacttcaatggaaatagcgacgcgtccacgatcaaggaaaaccagttcgatcctccgatcgtcgccaggtacatccggatctcccccacccgggcttacaaccgtcctaccctcagactggaactgcaagggtgcgaggtgaatgggtgcagcactccattgggtatggaaaacggcaagatcgagaacaagcagatcactgcctcatcgttcaaaaagtcatggtggggagactactgggaaccgtttagagcccggctcaacgcccaggggcgcgtcaacgcatggcaggccaaagccaacaacaataagcagtggctggaaatcgacctgctcaagatcaaaaagataaccgccatcattactcagggatgcaagtcgctgtcatcagagatgtacgttaagtcctacactattcattacagtgaacagggcgtggaatggaaaccgtacaggcttaaatcatcaatggtcgataagatctttgaaggaaataccaacaccaagggccacgtgaagaatttctttaacccgccaatcatctcgcggtttatcagggtgattccaaaaacctggaaccagtccatcgctctccgcctggaactgttcgggtgcgatatctac

SEQ ID NO: 2226 - DNA, 6672 bp, Artificial Sequence
  derived and/or modified sequence
atgttcccgggctgccctaggctgtgggtgctcgtggtcctgggtacgtcctgggttggctggggttcacaggggaccgaagcagcacagcttagacagttttacgtagccgcacagggaatttcatggtcataccgcccggagcctacgaacagctcccttaacctcagcgtcacttcctttaagaagattgtgtacagagaatacgaaccttacttcaagaaagaaaagccacagtcgaccatctcggggttgctcgggcctaccctttatgctgaagtgggcgacatcattaaggtgcactttaagaataaggctgacaaacctctttcgattcatcctcaaggaatcaggtactcaaaactttcggaaggagcatcctaccttgaccatacctttcctgcagagaagatggatgacgccgtggccccgggtcgagaatacacctacgaatggtccatctccgaagatagcggccccacccatgacgaccctccatgtctgactcatatctactactcccatgagaacctcatagaagatttcaactcaggtcttatcggccctctcctgatttgtaagaaaggtaccttgaccgaaggtggaactcaaaagacgtttgacaagcagatcgtcctgcttttcgccgtgttcgacgaatcgaagtcgtggagccaatcctcgtcacttatgtacaccgtgaatggctacgtgaatggaactatgccagatatcactgtgtgtgctcatgatcatatttcgtggcatctgcttgggatgtcgtcgggaccagagcttttttccattcatttcaatggacaagtgctggaacagaaccatcacaaagtgtcagctattacgcttgtttcagctactagcaccactgccaacatgactgtgggacccgaagggaaatggatcattagtagcctgaccccaaaacacttgcaagccggtatgcaagcatacattgacattaagaattgtcccaaaaagactagaaatctcaagaaaatcactagagaacaacggcgccacatgaagaggtgggaatactttattgcagccgaagaggttatttgggactacgcaccagtgattcctgccaatatggataagaagtaccggagtcaacatttggacaacttttcaaaccaaattggaaagcattacaaaaaggtgatgtacacgcaatacgaggacgaatcgtttactaagcacaccgtgaatccgaacatgaaggaagatggtatactgggtccgataatcagagcacaagtgagggacaccctgaagattgtctttaagaatatggcaagcagaccctacagcatttacccgcatggagtcaccttctccccatacgaggatgaagtcaactcgtcgtttacctcgggacgaaataacacgatgattcgggcggtgcaacccggtgaaacgtacacttacaaatggaatatactggagtttgacgaaccaaccgagaatgatgcacaatgtctcaccaggccctattactcggatgtcgatatcatgcgggacattgcgtccggtctgataggacttcttcttatttgcaagtcccgctcacttgatcgacgtggtattcagagagcagcagacattgagcaacaggcagtgtttgccgtgtttgacgagaacaagtcgtggtacttggaggataacatcaataagttttgtgaaaacccagatgaggtcaagcgggatgatcccaagttttacgaatccaacataatgtccactatcaatggttacgtgcctgaatccataacgaccttgggtttttgttttgatgatactgtgcaatggcatttttgcagcgtgggaacccagaatgagatactgaccattcattttactggtcactccttcatttatggaaagagacatgaggacactctgactctctttcccatgcgtggagaaagcgtgaccgtgactatggataatgtcggaacctggatgcttacttcgatgaactcatcgccgcgcagcaaaaagctgcgattgaagttcagggacgtgaagtgcatcccggacgacgacgaggattcctacgagatctttgagccccccgaatcgaccgtcatggcgactcgcaagatgcacgaccgtcttgaacctgaggatgaagaatcagatgctgactacgattatcaaaacagactggctgcagcgttgggaatccgctcgtttagaaactcgtccctgaaccaagaagaggaagagtttaaccttacggctcttgcactggaaaacggaacggaatttgtcagttccaacaccgacataatagtcggaagcaactactcatcgccatccaacatcagcaaattcactgtgaacaacctggccgagccgcagaaagcaccttcgcatcaacaggccaccaccgccggatcacccctgagacaccttatcgggaagaattctgtgcttaactcttcgaccgcagaacattcgagcccctactcggaggatcccatcgaagatcctctgcaaccggatgtgactgggatccggctgctgtcgcttggagcaggcgaattcaagagccaagaacatgccaagcataaggggcctaaggtggagagagatcaagcagcaaaacacagattttcgtggatgaagctgctggcccataaggtcggtagacatctttcgcaggacactggttcaccatcgggcatgcgaccttgggaggatctcccttcccaggacaccggcagcccctcgagaatgcgcccttggaaggatcctcctagcgatcttctgctgttgaagcagagtaattcctcgaagatccttgtgggtcggtggcatcttgcaagcgaaaagggttcctacgaaatcattcaagatactgatgaagataccgcagtcaataactggctgatctcacctcaaaacgcaagccgcgcctggggagaatccactcccctggcgaataaacctggaaaacaatccggacatccgaagttcccaagagtgaggcataagtccctccaagtcaggcaggacggaggtaagtcacgactgaaaaagtctcagtttctgataaagaccagaaagaaaaagaaagaaaaacatacgcatcacgcgccattgtcccccagaacttttcatcccctgcgctccgaggcatacaatacttttagcgaacgtaggttgaagcacagcctggtgctccataagtcgaacgagacttccctccctaccgacctgaaccagaccctgccatcaatggactttggttggattgcctccctgccagatcataaccagaactcctccaacgatactgggcaagcatcatgtccacccgggctgtaccagaccgtgcctcccgaagagcattaccaaaccttcccaattcaggatccggaccaaatgcattccacctcggacccatctcatcgctcatcctccccagaacttagtgaaatgctggaatacgatcgctcgcataagtcttttccaaccgatatttcacaaatgtcgccttcgtccgagcatgaagtttggcaaaccgtgatatcgccggatctctcccaggtcacgctgagccctgagctctcccagactaatcttagcccggacctctctcacaccaccttgtcgcctgagctcatccaaaggaacctgagcccagcgctcggtcaaatgccaatctcacccgatctgtcgcacacgactttgagcccggacctttcccacacgaccctcagtctggacttgtcgcagaccaatctgtcaccggaactgtcgcagactaacctgtcgccagcactgggacagatgcctctttctcccgatctgtcacacaccactttgtcgcttgatttctcgcaaaccaatctctccccagagctttcacatatgacgctttcacctgagctttcgcaaacgaacctttcacccgccctcggccaaatgcctatatcgccagacttgtcgcacactaccctgtccctggatttctcccaaactaatctcagtcccgagctttcacagacgaacctcagccctgcactgggtcaaatgccgctttcgccagatccgagccatactactttgtccctggacctgtcacagaccaatctttcaccagaactgtcccaaaccaacctttcgccggacctttcggagatgccacttttcgcggacctgagccaaattcctctgacgcctgatctcgatcagatgaccctctccccagatcttggtgaaactgacttgtcgcctaatttcggacaaatgtcccttagccctgacctttcccaagtgactctctcacctgatatttcagataccaccctcctgccagacctctcgcagatttcgccgcctccggatctggaccaaatcttttacccaagcgagtcatcacagtcgctgctgctccaagagtttaatgagagcttcccctaccctgaccttggacagatgccctcgcccagctcgcctacgctgaacgatacctttctctcgaaagaattcaatcctctggtgatcgtcggtctgtccaaggacggaacggattacatagagattattcctaaggaagaagtgcagtcgtccgaagatgattacgcggaaattgattacgtgccatacgacgatccttacaagacggatgtgagaactaacatcaactcctccagagatcccgacaatatcgcagcgtggtatcttaggtccaacaacggaaataggagaaactactacatagccgccgaggaaatcagctgggattactctgaattcgtgcagagagagactgatatcgaagattcggatgacatcccggaagatacgacttataagaaggtggtctttcgtaaatacctggattccacgtttactaagagagatcctagaggggaatacgaagaacacctcggcattcttggcccaattatcagggcagaagtggacgacgtgattcaagtgagatttaagaacctggcatcccggccttactctcttcatgcccatggccttagctatgaaaaaagctcagaagggaaaacctacgaagatgatagcccagagtggttcaaggaagataacgctgtgcaacctaatagctcctacacctatgtgtggcatgcgactgaacgatcggggccagagtcaccgggttcggcatgtagggcatgggcatactactcagcagtcaacccagaaaaggatattcattcagggttgattggaccactgcttatttgtcaaaagggaatattgcataaggatagcaacatgccaatggacatgagggaattcgtgttgctgttcatgactttcgacgaaaagaagtcatggtactacgaaaagaaaagccgatcttcctggcgcctgacttcatccgaaatgaagaagtcacatgaattccatgccattaacgggatgatctactcactccctggactgaagatgtacgagcaggaatgggtccggcttcatcttcttaacattggcggtagccaagatattcatgtcgttcattttcacggacagaccctgcttgagaatggcaacaagcagcatcaactcggagtctggcccctgctgcctggtagttttaagaccctcgaaatgaaggcatccaaacctggatggtggttgctcaacaccgaggtaggagagaaccaacgtgcaggtatgcagacgccattcctgattatggatcgagattgtcggatgccaatgggcctgtcgaccggaatcatatccgatagccagattaaggcatccgagtttcttgggtactgggagcctcgactcgcacgccttaacaacggtgggagctacaacgcatggtccgtggagaagttggcagcggaatttgcatcgaaaccatggatccaggtggatatgcagaaggaggtgattatcactgggattcagactcaaggagctaaacattacctcaagtcctgttacactactgaattctacgttgcatactcatccaaccagatcaattggcagattttcaagggcaactccactcgcaatgtcatgtactttaacggcaatagcgatgcctcgaccattaaggaaaatcaatttgatccacctattgtcgcccggtacattcgtatttcgcctaccagggcttacaaccgtcctactttgaggcttgaactgcaggggtgcgaagtcaacggatgctcgaccccccttgggatggaaaacggcaagattgaaaacaagcaaattactgcctcgtcgttcaagaaaagctggtggggggattattgggaacccttcagggcaagactgaacgcacaaggcagagtgaatgcctggcaggcgaaggctaacaataacaagcaatggcttgagattgatctgctgaagattaagaagatcaccgcaattatcacccagggttgcaagtcactgtcctcggagatgtatgtgaagtcttacactattcattattcggaacaaggagttgaatggaaaccttacagactcaagtcatcaatggtcgataagattttcgaaggcaacaccaacaccaagggacacgtcaagaactttttcaatccacccatcatttcaagattcatcagggtgattcctaagacttggaatcagtcgattgcactgcgcctcgagctgtttggatgcgacatctac

SEQ ID NO: 2227 - DNA, 6672 bp, Artificial Sequence
  derived and/or modified sequence
atgttccccggatgtccgcgcctctgggtgctcgtggtgctggggactagctgggtgggctggggaagccagggcaccgaggccgcgcagcttagacagttttacgtcgcggcacaagggatctcatggtcgtatagaccggaacctaccaactctagcttgaacctgtcagtgacgtcgttcaagaagatcgtgtaccgcgaatacgaaccgtacttcaagaaagagaagcctcagtccaccatctcgggcctgctggggcctaccctctacgccgaagtcggagacatcatcaaggtgcatttcaagaacaaagcagataagccgctgtccatccacccacagggcatccggtacagcaaactttcggaaggggcctcgtacctcgatcatactttcccggcggaaaaaatggacgacgcagtggcgccgggacgggaatatacgtacgagtggtcaatctcggaggactcaggcccgactcacgacgaccccccatgcctcactcatatctactactcccatgagaatctgattgaggatttcaactccggcctcatcggcccgcttctcatctgcaaaaagggaacccttactgaaggaggcactcaaaagacctttgataagcaaatcgtcctgctcttcgctgtgttcgacgagtcgaaatcctggagccagtcgtcctccctcatgtacaccgtcaatggatacgtgaatggaaccatgccggatattacggtgtgcgcccacgaccacatttcatggcacctgttgggtatgtcgagcggaccggagctgttctccatccacttcaacgggcaagtgctggagcagaaccatcacaaggtgtccgcaatcactctcgtctcagcgactagcaccactgcgaatatgactgtcggaccagaaggaaagtggattatctcgtccctgaccccgaagcatctgcaagccggcatgcaagcctacatcgacatcaagaactgcccgaagaaaactcgcaacctgaagaagatcacccgggagcagcgccgacacatgaagcggtgggaatacttcattgccgccgaagaagtgatttgggattacgcgccagtgatccccgctaatatggacaaaaagtacagaagccagcatctggacaacttcagcaatcagatcgggaaacactacaagaaggttatgtacactcagtatgaagatgagtcgttcactaagcacactgtcaatccaaatatgaaagaggatggcattctgggcccgattattcgcgcgcaggtgcgcgataccctcaagattgtgttcaaaaacatggcgtcacgcccgtactcgatctatccacatggagtgactttctcaccgtacgaggacgaagtcaacagttccttcaccagcgggcgcaataacactatgatcagagctgtgcaaccgggtgaaacttatacctacaagtggaatatcctggaattcgatgaaccaaccgagaatgatgcgcagtgcctgactcgcccttactactcagatgtggacatcatgcgggacatcgcctcaggactcatcggactgctgctgatctgcaaatcgcgcagtctggaccggcgcggaatccaacgcgcagccgatatcgaacagcaggcagtgtttgctgtctttgatgagaacaagtcgtggtacttggaagataacattaacaagttctgtgaaaacccagatgaggtaaaaagggatgaccccaagttctacgaatcaaacatcatgtctactatcaacggttacgtcccggagtccatcaccaccctgggtttttgtttcgatgatacggtgcagtggcatttctgctcggtgggaacccagaatgaaatcctgactatccactttaccggtcactcgttcatctacggcaagagacatgaagatactctgacccttttcccgatgcggggcgagtccgtcaccgtgactatggacaacgtgggtacctggatgctcactagcatgaatagctccccaaggtccaagaagctcagactgaagtttcgcgacgtgaagtgcatcccggatgacgatgaagatagctacgaaatttttgaaccgccggagtcgaccgtcatggccactagaaaaatgcacgaccgccttgagcctgaggatgaagaatcagacgcggactacgactaccaaaacaggctggcagccgctttgggtatccgtagcttccggaattcctccctgaatcaggaagaggaagagttcaatctcaccgccctcgctttggaaaatgggaccgagttcgtgagctcgaatactgacatcatcgtgggatcgaattactcatcaccaagcaatatctcgaagtttaccgtcaacaacttggccgaaccgcagaaagccccgtcgcaccaacaagcaactaccgcaggctccccgctgagacatcttatcggaaagaactcggtgctgaacagcagcaccgcggagcattcctctccgtattcggaggacccaatcgaagatcctctgcagccggacgtgactggcattcggctcctgagcttgggggctggcgagtttaagagccaggaacacgctaagcacaagggccctaaggtcgaacgggaccaggcagccaagcatagattcagctggatgaagctgttggcgcacaaagtgggacggcatctctcacaggacaccggatccccgagcggaatgcgtccgtgggaggacctgccatcccaggacactggttcgccgagcaggatgcggccgtggaaggacccgccttccgacctcctcctgctgaagcagtcaaattccagcaagatcctggtcggacgctggcacctggcttcggagaagggatcgtacgagatcattcaagatacggacgaagatactgcagtcaacaattggctgatctccccgcagaacgcctcaagagcctggggagaatcgactccattggctaacaagcctggaaagcaaagcgggcaccctaaatttccgagggtgaggcacaagtccctgcaggttcgccaggacggcggaaagtcgcggctgaaaaagagtcaatttcttattaagacccgcaagaagaagaaggaaaaacacacccatcacgccccactgtcgccgcgcacttttcacccgctgcggtcggaagcctacaacaccttcagcgaacgccggctgaagcactctctggtgctccataaatcaaacgaaacttccctgccaactgatttgaaccagactctcccctcgatggacttcggatggatcgcatccctgccagaccacaaccagaactcatcaaatgacactggccaagccagctgtccacccggactgtaccaaaccgttccaccagaagagcattatcagaccttccctatccaggaccctgaccagatgcactcgacctccgatccgagtcacaggtcgtcatcccctgaactgtccgaaatgctggagtacgaccggagccacaaatcgttcccgaccgacatcagccaaatgtcgccctcgtcggagcacgaggtttggcagaccgtgatctcgccagacctgagccaggtgacgctgtcgccagagctgtcccagaccaaccttagcccggacttgagccacaccaccctttcacccgagctcatccagcgaaatctgtcacctgccctggggcaaatgcctatcagccctgatctcagccacacgaccctgtcgcccgacctgtcccacactacgctttcgctcgatctgtcacagacgaacttgtcaccggaactgtctcagactaatctcagcccggctctgggccaaatgccgctgtctcctgatctgtcgcataccactctttcactggacttctcccagactaacttgagcccggagttgtcgcatatgacgctttcccctgagctctcacagactaacctctcgcctgcccttggtcagatgcctatatctccagacctgtcacataccaccctgtcattggactttagtcaaaccaacctgtctccagaactgagccagaccaatctcagtccggcactgggacaaatgcctctgtccccagatcctagccatactaccctctcgttggatctctctcaaacgaacctctccccagaattgagccaaacgaatctctcacccgatctctcggagatgcccctgttcgcggacctttcacagatccccctgactccggacctcgaccaaatgacgcttagccctgacctgggggaaacggatctttcgcctaacttcggccagatgagcctgtccccggacctctcccaggtgaccctttccccagacatcagcgataccacgctcctcccagacctctcacaaatcagcccgccgcccgatctggatcagatcttctacccgagcgaatccagccaaagcctgctgctccaagaattcaacgaatctttcccataccctgaccttggccagatgccttccccctcatcaccgacgctgaatgataccttcctctcgaaagagtttaacccgctcgtgatcgtgggcctgtccaaagacggaactgactacattgagatcatcccaaaagaggaagtccaaagctccgaagatgattatgctgaaatcgactacgtcccttatgatgatccatacaagaccgacgtgcgaaccaatatcaacagctcccgggacccggacaatatcgcagcctggtacctccgctccaacaatggaaacaggcgcaactactacatcgcagccgaggaaatctcctgggactactcggagtttgtgcaacgcgagactgacatcgaggactccgatgacatcccagaggataccacttataaaaaggtggtgtttcggaagtacctggactccacgttcaccaaaagagatccgcgcggtgagtacgaagaacacctggggatcctcggccctatcatccgggcggaagtggacgacgtgatccaagttaggtttaagaacctggcctcgcgcccatactcactgcacgctcatggactgtcgtacgaaaagtcctcggagggtaaaacttacgaagatgactccccagagtggtttaaggaggataacgccgtgcagccgaattctagctacacttacgtctggcacgcgaccgaaagatcaggccccgaatcgccgggatcggcctgtagggcgtgggcctactactctgcggtgaacccggagaaggatatccattccggacttattgggcccctgttgatctgccagaagggaatcctgcacaaggattcgaacatgccaatggatatgagagaattcgtgttgctgttcatgaccttcgatgaaaagaaatcatggtactacgagaagaaaagtcggtcgtcatggcggctgacctccagcgagatgaagaaatcgcacgagttccatgccatcaatggaatgatctactcacttcccggcctgaagatgtacgagcaggagtgggtgagacttcacctgttgaacatcggaggatcacaagacatccatgtggtccatttccacgggcagaccctcctcgaaaacggaaacaaacagcaccagctcggagtctggcccttgctccccggatccttcaaaactctggaaatgaaggcgtccaagccaggctggtggctgctgaacactgaagtgggagaaaaccagagagccggaatgcagaccccgttcctcattatggacagggactgccgcatgccgatgggtctgtctactggaatcatctcggactcgcagatcaaggcttcagaatttctcgggtactgggaacctcgcctggctcggctgaacaacggagggtcctacaacgcgtggtcagtggaaaagctggcggcagagttcgcgtcgaagccctggatccaagtcgacatgcaaaaggaagtgattatcactggaatccaaacccaaggagcaaagcactacctcaaaagttgctacaccactgaattctacgtcgcttactcctcaaatcaaattaattggcagatcttcaagggaaactccaccaggaacgtgatgtactttaacggaaactccgacgcatcgactataaaggaaaatcagttcgacccgccgatcgtcgcacgctacatccggatcagccctactcgggcgtacaacagaccgactctccggctcgagctgcaaggatgcgaagtgaacggatgcagcactccactcggtatggagaatggaaaaattgaaaacaagcagatcaccgcctcgtcctttaagaagtcatggtggggggattactgggagccgttccgggcccgcctcaacgcccagggacgcgtcaatgcctggcaggccaaggccaacaacaacaagcagtggctggaaatagacttgctgaagatcaagaaaattaccgccatcatcacccagggttgcaagtcactgtcgagcgagatgtacgtgaaatcctacaccatccactactccgagcaaggtgtggaatggaaaccataccgcctgaaatccagcatggtcgacaagatcttcgagggcaacaccaataccaagggccatgttaaaaatttcttcaatccaccgatcatctcgcgattcattagagtaattccgaaaacttggaaccagtcgatcgctctcagactggagctcttcggatgtgacatttac

SEQ ID NO: 2228 - DNA, 6672 bp, Artificial Sequence
  derived and/or modified sequence
atgtttcctggctgtccgaggctgtgggtcctggtcgtcctgggcactagctgggtgggatgggggtcccagggtactgaggcggcacagctgcggcaattctacgttgctgcgcagggaatttcctggtcgtatcgacctgaaccgactaactcttccctgaatctgtccgtgacctcgttcaaaaagatcgtgtatcgggagtacgagccgtacttcaaaaaggaaaagcctcaatcgaccatctccggtctgcttggcccgaccctgtacgccgaagtgggagacatcatcaaggttcacttcaaaaacaaggcagacaagccgctgtcgatccatccgcaaggaatcagatactccaaactgtccgaaggagcgtcatacctggatcataccttcccggcggagaagatggatgacgcagtggccccggggagagaatacacctacgaatggtcaatctcagaggactcaggcccaacccacgatgatccaccgtgtctcacccacatctactattcgcatgaaaatctgatcgaggactttaacagcgggctgatcggaccgcttttgatctgtaagaagggaacccttactgaaggcggaacccaaaagactttcgacaagcagatcgttctgctgttcgctgtgtttgatgagtcgaagtcgtggtcacagtcgagcagcctgatgtacactgtgaacggttacgtgaacggtaccatgccagatatcactgtgtgcgcgcatgaccatatttcatggcatctgttgggaatgtcgtcgggaccggaactcttttccatacactttaacggacaggtgctggaacaaaatcaccacaaagtctcggcgattacccttgtgagcgcgacctccactactgcgaacatgaccgtgggaccggaaggaaagtggatcatctcctccttgacgccaaaacatctgcaagcaggcatgcaagcctatatcgacattaagaactgtccgaaaaagactcgcaacctcaaaaagatcactcgggaacagaggcgccacatgaaaaggtgggaatactttatcgccgcggaggaagtgatctgggactatgcacccgtgatcccggccaacatggataagaagtaccggtcccagcatctggacaacttctcaaaccagattggtaagcactacaaaaaagtcatgtacactcagtacgaggatgagtcttttaccaagcataccgtcaacccgaatatgaaggaggacggaatcctcggcccgatcattagagcccaggtgcgcgacaccctcaagatcgtgttcaagaacatggcttcgcgcccatactcgatctacccgcatggcgtgactttcagcccgtatgaagatgaagtcaactccagctttacgagcggacggaacaatacgatgatccgggccgtccaaccgggcgagacttacacctacaaatggaatatcttggagttcgacgagccaaccgaaaatgacgcccaatgcctgactcgcccatactattccgacgttgacatcatgcgggatatcgcttcgggattgataggcctgctgctcatctgcaagtcgaggtcgctcgatcggcgggggatacaacgcgctgccgacatcgagcagcaagctgtctttgctgtctttgatgagaataagtcgtggtacttggaggataacatcaataagttttgcgaaaatccggacgaagtcaagcgggacgacccgaagttctacgaatcaaatatcatgtcgaccatcaacggatacgtgccggaatcgattaccactctgggcttctgcttcgacgacaccgtccagtggcacttctgctcggtcggaacgcagaacgaaattctgactatccactttactggccacagctttatctatggaaagcggcacgaagatactcttactctcttcccaatgcggggagagtcggtgaccgtgactatggacaatgtcggcacgtggatgttgacttccatgaactcgtcgccacgcagcaagaagctgcggctcaaatttcgggacgtcaagtgcatcccagacgatgatgaggattcttatgagatcttcgagccaccggaatcgactgtgatggctactcggaaaatgcatgatcggctggagccagaggacgaggagagcgatgccgactacgactatcaaaataggctcgcggcagcgctgggcatccgctccttccgcaactcctccctcaaccaagaggaagaagaattcaacctcaccgcactggcgctggaaaatggaactgaattcgtgtcaagcaataccgatatcatcgtgggatcgaactactcctccccgagcaatatcagcaagttcacggtgaacaatctggccgaaccccaaaaagccccatcgcaccaacaggccacgaccgcaggatccccactgagacacctgatcggcaagaactcggtgctgaactcaagcactgctgagcattcatcaccgtactctgaggaccctatcgaggacccgctgcagccagacgtgacgggcatcagactgctgtcgcttggagctggagagtttaagtcccaggaacatgccaaacacaagggaccaaaagtggagcgggaccaggcagccaaacatcgcttctcgtggatgaaactgttggcgcacaaggtgggacgccacctgtcacaggacactggctccccgagcgggatgaggccgtgggaggacctcccatcgcaggataccggatcaccctctcggatgcgcccgtggaaggatcctccgagcgacttgctgcttctgaaacagtcgaattcgtcaaagatccttgtgggtcgctggcacctggcttccgaaaagggatcttacgaaatcattcaggatactgacgaggatactgccgtcaacaattggcttatttccccacagaacgcatcaagagcctggggtgagagcactccgttggcgaacaagccggggaagcaatccggacacccgaaattcccccgcgtcaggcataagtcactccaagttcgccaggacgggggcaagtccagactgaaaaagagccaattcctcattaagactcggaaaaagaagaaagaaaagcacacccaccatgcaccgctctcgccgcgcaccttccacccactgcggtcggaagcctacaacactttcagcgaaagacggctcaagcactcattggtcctccataaatccaatgagacttctctgccgaccgatctgaatcagactctcccgtcaatggacttcggctggatcgccagcctgccggaccacaaccagaacagcagcaacgacaccggacaagcgtcgtgcccacccggactgtaccaaaccgtgccgcccgaggaacattaccagacttttccaatccaggacccagaccagatgcattcaacctccgatccgtcacatcgctcctcgtccccagaactgtcagagatgctggaatacgatcggagccacaagtcgttcccaacggacatcagccaaatgtccccatcttcggaacacgaagtgtggcagaccgtcatctcaccggacctgtcccaggtgaccctgtctcctgagctgtcgcaaactaacctttcaccagatttgtcgcacaccaccctcagcccggagctgatccaacgaaatctcagccccgccctggggcagatgccaatcagcccagatctgtcacacaccaccctttctcccgacctgtcccataccactctgagcttggatctttctcagaccaacctctccccggaactgtcgcagaccaacctgtcgccggcgctcggccaaatgcctctctcccccgacttgtcgcatactaccctttccctcgacttttcacagactaatctctccccggagttgtcccacatgactctgtcaccagagctctcacaaacgaatctgtcaccagcgctgggacagatgccgatttccccggatctctcccataccacgctctcccttgatttctcgcaaacgaacttgtcccctgagctctcccaaaccaacctgtcacctgctctcgggcagatgccgctcagcccggacccttcgcacaccactctgtcgctggacctctcccagacgaaccttagccctgaactgtcccaaacgaacctgtcgccagatctctccgagatgccactcttcgcggacttgtcacagattcctctgactcccgacttggatcaaatgactcttagccccgacctcggggaaaccgacctgtcaccgaacttcggacagatgtccctgtcgccggatctgagccaagtgaccctgtcgcctgacatcagcgacaccaccctgctgcctgacctctcgcagatcagcccgccacctgatctggaccagatcttttacccttcggagtcgtcacagagcctccttctgcaagagttcaacgaatcgtttccgtacccggacctgggccagatgccatcgccatcatcgccgaccctgaacgataccttcctctcaaaggaattcaaccccctggtcattgtgggcctgtccaaggatggaactgactacatcgaaatcatcccgaaggaagaagtccaaagcagcgaggacgactacgccgagatcgactatgtgccgtacgacgatccctacaagaccgatgtgcgcactaacatcaactcttcccgcgacccggacaacatcgccgcatggtacttgcgctctaacaatggcaacaggcgcaactactacatagcggcggaggaaatcagctgggattactccgaattcgtccaacgggaaaccgatatcgaggactcagacgacatcccagaggacacgacttacaagaaggtggtgtttcggaagtaccttgactcgactttcacgaagcgcgaccctagaggagaatacgaggaacatctgggcatccttgggccgatcatccgcgcagaggtggatgatgtcatccaagtgcgcttcaaaaatctggcaagcaggccatattcacttcatgcgcatggattgtcgtacgaaaagagctctgagggaaaaacctacgaagatgattctccggagtggttcaaagaagataatgcggtccagcctaactcgtcgtacacgtatgtctggcacgccactgagaggagcgggcctgaatcgccgggctccgcctgccgcgcatgggcctactactcggccgtgaatccggagaaggacattcactcaggattgattggacctctgttgatctgccaaaaaggcatccttcacaaagattcgaatatgcctatggatatgagggaattcgtgctcctgttcatgaccttcgacgagaaaaagtcctggtactatgaaaagaagagccgctcgagctggagattgacgtcaagcgagatgaagaaatctcacgagttccacgccatcaacggaatgatctactccctgcccggactgaagatgtacgaacaggaatgggtgaggctgcacctcctcaacatcggaggcagccaggatattcacgttgtgcactttcacggacagactcttctggaaaacgggaataagcagcaccaattgggagtgtggcccctcctgcctggatcgttcaaaactctcgagatgaaggcctcgaagcctggttggtggctgctgaacaccgaggtgggtgaaaatcagcgcgcaggtatgcagacccctttccttatcatggaccgggactgcagaatgccgatggggctgtccactggtattatctccgactcgcaaatcaaggcctccgaattcttgggatactgggaaccgcggctggcaagacttaacaatgggggtagctacaatgcctggtccgtggaaaagttggccgccgaattcgcctccaagccctggatccaagtggacatgcagaaagaagtgataatcactggaatccagacccagggcgccaagcactaccttaaaagctgctacaccactgaattctacgtggcgtacagctcgaaccagattaactggcaaatcttcaaggggaactcaacgaggaatgtcatgtacttcaacgggaactccgacgcatccaccatcaaggagaaccagtttgatcctccaatcgtcgccagatacatcagaatttctcccactcgggcctacaatcgaccaactctgagactcgaactgcagggttgtgaggtgaatggctgctccaccccactcggaatggaaaatggcaaaatcgagaataagcagatcaccgcctcctcattcaagaaatcctggtggggcgattattgggagcccttcagagccagactgaatgctcaaggccgggtgaacgcctggcaggcgaaggcgaacaacaacaagcaatggctcgaaattgacctgctcaagatcaagaagattaccgccatcattacccagggatgtaagtccctgtcgtcggaaatgtacgtgaagtcatacactatacattactccgaacagggcgtggagtggaagccttaccgcctgaagtcctcgatggtggacaagatcttcgagggaaacactaacactaaaggacacgtgaagaactttttcaacccgccgattatctcccgcttcatccgggtgatcccaaagacctggaatcaatctatcgcactgagactggaactgttcggatgcgatatctac

SEQ ID NO: 2229 - DNA, 6672 bp, Artificial Sequence
  derived and/or modified sequence
atgttcccgggatgtccccgcctgtgggtcctggtggtgctcggcacttcgtgggtcgggtggggaagccaaggaactgaagccgcacagctgcggcagttttatgtcgctgctcaaggaatcagctggagctatcgcccggagcccaccaacagctccctgaacctttccgtgacctcgttcaagaaaatcgtgtacagagaatatgagccttacttcaaaaaggaaaagccacagtcaaccatctctggcctcctgggaccgaccctgtacgcggaagtgggagacatcatcaaggtccactttaagaataaggccgacaagcctctctccatccatccgcagggaatacgctactcaaaactgtcggaaggtgcctcataccttgatcatacctttccggccgagaaaatggacgatgcggtggccccgggacgggaatacacttacgaatggagcatctccgaggactccggtccgacgcatgatgaccctccgtgcctgactcacatctattacagccacgaaaatctcatcgaggatttcaatagcggactcatcgggccattgttgatttgcaagaagggaactctgaccgagggagggactcaaaagacgtttgacaagcagatagtgctcctgtttgccgtgtttgatgaatcaaaatcatggagccagtcgtcctcgttgatgtacactgtcaacggatacgtgaacgggactatgccggacatcacggtgtgtgcgcacgaccacatttcctggcatcttcttggaatgtcatcgggaccagagctcttctcgatccatttcaatggacaggtgctggagcaaaaccatcacaaggtgtcagcgattactctggtttccgcgacctcaaccaccgcgaatatgaccgtgggcccagagggtaagtggattatcagctcgctgacccctaagcaccttcaggcgggaatgcaggcgtacattgacatcaaaaactgtccaaaaaagactagaaacctgaagaagatcactagagagcagcgtcgtcacatgaaaagatgggagtacttcatcgctgccgaagaagtgatctgggattacgccccagtgatcccggcaaacatggacaagaagtacaggtcgcagcatcttgataacttttcaaatcaaatcggcaaacactacaaaaaggtgatgtacacgcagtacgaggatgagtcttttaccaaacacactgtgaatcctaacatgaaggaagatggaattctgggccctatcatccgcgcccaagtgcgcgacacgttgaaaatcgtgtttaagaacatggcttctcggccatactcgatttaccctcacggagttaccttctcaccgtacgaggacgaagtgaattccagctttacgtccggtaggaataacaccatgatccgcgcagtccagccaggtgaaacttacacctacaagtggaatatcctggaattcgacgaacctaccgaaaacgacgctcagtgtcttaccagaccttactattcagacgtcgacatcatgagagacatcgcaagcggcctcatcgggctgctgctgatctgcaagtctcggtcactcgacaggcgtggaatccaaagggccgccgacatcgagcagcaagccgtgttcgccgtgttcgatgagaacaaatcttggtacctggaagataacatcaacaagttctgcgagaatcctgacgaggttaagcgcgatgatccaaagttctacgaaagcaatatcatgtcgactattaacggttacgtgccggaatcgatcaccactctgggattttgcttcgacgacaccgtgcaatggcacttctgctccgtggggacgcaaaacgagatcctgactatccatttcaccggacactcgttcatttacggcaagcgacacgaggacactctcacgctctttccaatgagaggagagtccgtgactgtcactatggacaacgtgggaacctggatgttgacctcaatgaacagctcaccgcggtcaaagaagctgcggctgaagtttcgcgatgtgaagtgcatcccagacgacgacgaggattcgtacgaaatcttcgaaccgccagagtcgaccgtgatggcgactcggaagatgcacgaccggctggagcccgaagatgaagaatcagatgccgactacgactaccaaaatcggcttgcggcagccctcggtatccggagctttcggaactccagcctgaatcaagaagaagaagaattcaatctgaccgcgctcgcattggaaaatggaacggaatttgtctcctcgaacactgacatcattgtgggaagcaactacagctctccctcgaacatcagtaaattcactgttaacaacctggcagaacctcaaaaggcgccgtcgcaccagcaagctactactgctggatcccctctgcgccacttgatcggaaaaaacagcgtgctgaactcctcaactgcggagcatagctcgccctattccgaggacccgatcgaagatccactgcagccagacgtgacgggtatcaggctgctctctctcggagcgggtgaattcaagtctcaagagcacgccaagcataagggaccaaaagtggaacgcgaccaggccgctaagcaccgctttagctggatgaagctcctcgcccacaaagtcggccgccacctcagccaggataccggatccccgtcgggaatgcggccatgggaggacctcccatcacaagacactggctccccatcgcggatgcgcccatggaaggacccgccgtcggatctgctcctgctgaagcaatcgaacagctccaaaattcttgtgggacggtggcatctcgcttccgaaaagggatcctacgaaatcatccaagacactgacgaggacactgcagtcaataactggcttatttccccgcaaaacgccagcagggcgtggggggagagcactccgctcgctaacaagccaggtaaacagtccggacaccccaaattcccgcgcgtgcgccataagtcactgcaggtgcggcaggacggaggcaaatcgcggctcaagaagtcccagttcctcatcaagacccgcaagaaaaagaaggaaaagcacactcaccatgcgccgttgtcaccccggaccttccacccactgcggtcggaagcgtacaataccttctctgaacgcagattgaaacacagcctcgtgctccacaagtccaacgaaacctcattgccaaccgaccttaaccagactctgccgtcaatggacttcggatggatcgcttcactgcctgatcataaccagaactcctcaaatgacaccggacaagcgtcctgtccgccgggactgtaccagaccgtgccgccagaagaacactaccaaacctttccgatccaagatccggaccagatgcactccacttctgacccatcgcaccggtccagctcaccagaactttcggaaatgctggaatacgatcgcagccacaagtcctttccgaccgacatttcacagatgtcgccttcctcggagcatgaggtgtggcaaaccgtcatctcaccggatctctcgcaggtgacgctctccccggaactgtcgcaaactaacctgtcgcccgacctgtcccacacgaccctgagcccggaactcatccaacgcaacctctcgccagcactcggtcaaatgccaatttcacctgatctttcacataccaccctgagcccagacctgtcacacaccactctgtccttggacctgtcccaaactaacctctctccggaactctcccagaccaatttgtcccctgccctgggtcaaatgcctctctcaccggatttgtcgcatactacgctctcgctggacttctcacaaaccaacttgtcgccagagctgtcccacatgactctgagcccagaactgtcgcagactaatctgtcacccgctctgggacaaatgcccatcagcccggatctttcgcatactactctgtctctggatttctcgcagacgaatctctcgcctgagctgagtcagaccaacctgtcaccagctctgggccagatgcctctttcgccagatccgtcgcacactactctgtcgctcgatctgtcccagactaacctgagccctgaactttcacaaacgaaccttagcccggacctgtccgagatgcccctgtttgccgacctctcccaaattccgctgaccccagacctcgaccagatgacccttagccccgacttgggggagactgatctttccccaaatttcgggcagatgtccctgtcgccggatctctctcaggtgaccctgtcgccagacatctcggatactactctcctccctgacctgagccagatctcacctcccccggatctggaccagatcttctacccttccgagagctcgcagtccctcctgctgcaagagttcaatgaatcttttccgtaccctgatcttggacagatgccatccccctccagcccgacgctgaacgatactttcctgtccaaggaattcaatccactcgtgatcgtgggcctgtcaaaagatggaactgactacattgagatcatccctaaagaagaggtgcagtcaagcgaggacgattacgcggagatcgactacgtgccctacgacgacccgtacaagaccgacgtccggactaatatcaatagctccagggatccagataacattgccgcctggtacctccgctcaaacaatggaaatcggagaaactactatattgcggccgaggaaatctcctgggattactcggagtttgtgcagagggagactgatatcgaagattcggacgacattccggaagataccacttacaagaaagtcgtgttcagaaaatacctggactcaaccttcaccaagcgggatccgcggggcgagtacgaagaacacttgggaatccttggacctatcattcgcgcagaggtcgatgacgtgatccaggttcggttcaagaacctggcctccagaccctacagcctgcacgcgcatggattgtcatacgagaagtctagcgaaggcaagacctacgaagatgattcgccagaatggttcaaggaggacaacgccgtacagccaaactcatcctacacgtatgtgtggcatgctaccgagcgcagcggacctgagtcgcccggatctgcgtgtcgcgcgtgggcctactatagcgcggtgaacccagagaaggatatccattcgggtctgatcggaccgttgctcatctgccaaaaaggaatcctgcataaggattcgaatatgccgatggacatgagagaattcgtgctgctgttcatgacgttcgacgagaagaaatcatggtattacgaaaagaagtcccggtcatcctggcgcctgacctcaagcgaaatgaagaagtcgcatgaattccacgccattaacggtatgatctactccctcccgggcctcaagatgtacgagcaggaatgggtgcgccttcacctgctcaacattggcgggagccaagacatccacgtggtgcatttccatggtcaaactctgctcgaaaatggtaacaaacaacatcagctgggagtgtggccgctcctgcctgggtcgttcaaaaccttggagatgaaagcatcgaagccggggtggtggctgctgaacactgaggtgggcgaaaatcagcgggcaggaatgcagaccccgtttctgatcatggatagagactgccgcatgcctatggggctctcaaccggaattatctccgactcgcaaatcaaggcatcggaatttctgggatactgggaaccgaggctggccagactgaataatggcggctcttacaacgcgtggtcagtcgagaagctggccgccgaattcgcgtcgaaaccgtggatacaagttgatatgcagaaggaggtgatcatcactggaatacaaactcagggagccaagcactacttgaaaagctgctacactaccgagttctacgtggcctactcctccaaccaaatcaactggcaaatcttcaaaggcaattccacccgcaatgtcatgtacttcaacggaaattccgacgcatcaaccatcaaggaaaaccagttcgacccccctatcgtggccagatacattcgcatcagccctactagagcatacaaccggcctactctgaggttggaactccagggttgcgaggtcaatggatgcagcacgcctttgggaatggagaacggtaagatcgagaacaaacaaatcactgccagcagcttcaaaaagtcctggtggggagactactgggagccctttcgggcccgcctgaacgcccaggggcgcgtcaatgcctggcaggcgaaagcgaacaacaataagcagtggctggagattgacctgcttaagattaagaagatcaccgccatcatcactcagggatgcaaatcactgtcctcagagatgtacgtgaagtcatacaccatccactactcggaacaaggcgtggagtggaagccataccggctgaagtccagtatggtggataagatcttcgaaggaaacactaataccaaggggcatgtgaagaacttcttcaacccaccaatcatctcgcgctttatcagggtcattccaaagacctggaatcagtccatcgccctgaggcttgagctcttcggatgtgatatctac

SEQ ID NO: 2230 - DNA, 6672 bp, Artificial Sequence
  derived and/or modified sequence
atgtttcctggatgtcctcgcctgtgggtacttgtggtgctgggaacttcatgggtcggctggggctcacagggaaccgaggcagcacagctgcgccaattctacgtggccgctcaaggaattagctggtcctacaggccagagccaactaactcgtcgttgaacctttcggttacgagctttaagaagatcgtgtacagagaatacgaaccttacttcaaaaaagaaaagccacaatcgacgatttcaggcctcctcggtcccactctttacgcagaggtcggagacataatcaaagtccacttcaaaaacaaggcagacaaaccactgtccatccacccccagggtattagatacagcaaacttagcgaaggtgcaagctaccttgatcacacgttccctgcagaaaagatggatgacgcagtggcacctggtcgggaatacacttacgaatggagcatttcggaggacagcggaccgactcatgatgaccccccttgtctgacccacatctactactctcacgagaacttgatcgaagatttcaactcaggcctgatcggtccacttctgatatgtaagaagggaaccctgaccgagggcggaacccaaaaaacttttgataagcagatcgtgcttctgttcgcagtgttcgacgaatccaagtcctggagccagtcgtcatcccttatgtacactgtgaatggatacgttaatggaactatgcccgatataaccgtgtgtgcacatgatcatatttcctggcatcttttgggaatgtcgtcgggacccgaacttttttcgattcatttcaacggacaggtgttggagcaaaaccatcacaaagtgtcggccatcaccctggtcagcgcgacctcaactaccgcgaatatgaccgtcggacctgagggtaagtggataatcagctcattgaccccaaaacaccttcaagcgggaatgcaagcatacatagacataaagaattgtccaaaaaagacccgaaacctgaagaagattactcgagaacaacgccggcatatgaagagatgggagtactttattgccgctgaagaggtgatttgggattacgcacctgtgattcctgcaaatatggacaagaaatacagatcgcaacatcttgataacttttccaatcagataggaaagcattacaagaaggttatgtacacccagtatgaggatgaatcttttactaaacacaccgtgaatcctaacatgaaggaggacggaattcttggacctatcatccgtgcacaggtccgcgacaccttgaagattgttttcaagaatatggcatcccggccgtactccatttatcctcacggtgtgaccttttccccctacgaggacgaagtcaacagctcgtttacgtcgggtaggaacaacaccatgattcgggctgtgcaacctggtgagacttacacctataagtggaacattctcgaattcgacgaaccgactgaaaacgatgcacaatgcctgaccagaccatactactcagatgtggacataatgcgggatatcgcctccggcctcattggattgctcctgatttgtaaatcgcgttcgctcgaccgacgtggtatccagagggcagcggacattgaacaacaagctgtctttgcagtgttcgatgagaataagtcttggtacctggaagataacattaacaaattctgcgaaaaccccgacgaagtgaaaagagatgaccctaagttctacgaatccaacattatgtcaacgattaacggatacgtgcctgaatcgatcaccacgctgggcttctgttttgatgataccgtgcaatggcatttctgttccgtcggcactcaaaatgaaattctgacgatccattttaccggacattcctttatctacggaaagcgccatgaggacactctgactcttttccctatgagaggtgaatcagtgactgtcaccatggataatgtggggacctggatgctcacgtccatgaattcaagcccgagaagcaaaaagctgcgattgaagtttcgggatgtgaagtgcatacccgacgacgatgaggacagctatgagatttttgaaccccctgaatcaacggtcatggccacgcgcaagatgcatgacagattggaacccgaggacgaggagtccgacgcggattacgattaccaaaaccgtttggccgccgcactgggcatccggtcctttagaaactcatccctgaatcaggaggaagaggaattcaatctgacggcactggctctcgagaatggaactgaatttgtgtcgtcaaataccgacataattgtcggaagtaactactcgtcaccatcaaacatatcgaaattcactgtcaataacctggccgaaccccaaaaggcaccctcgcatcaacaagcaaccactgcaggcagtccactgagacatctcatcggcaagaattcagtgctgaattcatcaactgcggaacattcgtccccctacagcgaagatcctattgaagatcctctgcagcctgatgtcaccggaatcaggctccttagcctcggtgcgggggagtttaagtcccaggaacacgcaaagcataagggtcccaaggttgagcgcgaccaagcagcaaaacataggttctcttggatgaagctgcttgcccacaaggtcggacggcacttgagccaagacactggatccccgtcgggaatgcgcccatgggaagatctgccatcgcaggataccggatcaccaagccgcatgaggccgtggaaggatcctccttcagaccttctcctgctgaagcaatcaaattcgtccaaaatcctcgttgggagatggcatctggcctcagaaaaggggtcatacgaaatcatacaggatacggacgaggacactgccgtgaacaattggcttatttcacctcaaaacgcatcccgagcttggggggagtcaactcctctggccaacaagccaggtaagcaatccggacacccaaaattccctagagtgagacataagtcgctgcaagtgcgccaggacggaggaaagtcacgtttgaagaagtctcagtttctcattaagactcgcaagaagaaaaaggaaaaacatacccaccatgcacctctttcgcctagaactttccaccctcttcgtagtgaggcctacaatacgttttccgaacgcagacttaagcattcgctggtgctccataaatccaatgagacttcattgcctactgatcttaaccagactcttccctcaatggacttcgggtggatcgcttcgcttccggatcacaaccagaactcctcaaacgatactggccaagcatcctgtcctcctggattgtatcagacggtccctccggaggagcactatcagacgtttcctatacaagaccctgatcagatgcattccacttcagatccgtctcataggtcgtcgagcccggaactttctgagatgctcgagtacgatcgctcgcacaaatcctttcccacggatatttcacagatgagcccttcatccgagcatgaggtgtggcaaactgtgatttcgcctgatttgtcgcaagtgactcttagcccagaactctcccagacgaatctgagccctgacttgtcccataccaccttgtcccctgaactcatccaacggaacctgtccccagcacttggacagatgccaatttcacccgacctttcacacaccaccctttcccctgatctgtcccacaccactctgtctttggatctgtcacaaaccaatctctccccagagctttcccagactaacctctcgccggcgcttggtcaaatgcctctgtctccagacctttcgcataccaccctctctctcgacttttcgcaaacgaacctgtctcctgaacttagccatatgaccctgtcgcccgaactgagccaaacgaatctgtcgcctgcactcggtcaaatgcccatcagtcccgacctctcccacacgactcttagcttggatttttcccagaccaacctgtcgccagaactctcgcagaccaatcttagcccagcactgggtcagatgccgctttccccggatccctcccatactaccctttcactggacctctctcaaaccaacctcagccctgaactgagccagactaatctctcgcccgacctcagcgaaatgccacttttcgccgacctttcgcagatcccactgactccagatctcgaccaaatgaccctgtctcccgatttgggtgaaaccgacctgtccccaaactttggtcagatgagcttgtcgccagacctttcccaagtgaccctctcgcctgatattagcgataccaccctcctgcctgacctttcacaaatctcgccccctcctgaccttgatcaaatcttttacccatcagaatcgagccagtccctgctgcttcaggaattcaacgagtcgtttccatacccggatcttgggcaaatgccctcgccttcatcgcctactctgaacgacacctttttgtccaaggagtttaatccactcgtgatagtcgggctcagtaaggatggcactgactacattgaaatcattcctaaggaggaagtgcaatcctcggaagatgattacgcggagatcgactacgtcccatacgatgatccctacaagaccgacgtgcggactaacatcaattcatcccgggatcctgacaatattgcagcgtggtacctccgctccaacaatggaaacaggcggaattactacattgcagcagaggagatcagctgggattacagcgaattcgtgcaaagagaaaccgatattgaggattcagatgatattccagaagatactacctacaaaaaggttgtctttagaaaataccttgatagcacttttaccaaacgagatcctagaggtgaatacgaagaacacctggggatcctcggcccaataatcagggccgaagtggacgatgtgattcaggtcagattcaaaaacctcgcatcgaggccatattcgcttcatgcacacggcctgtcctacgaaaagtcctctgagggaaagacttacgaggacgattcgcctgaatggtttaaggaggataacgcagtgcaacctaacagctcctacacctacgtgtggcatgcaactgaaagatcaggccctgaatcgccaggtagcgcatgcagggcgtgggcgtactacagtgcagtgaatcctgaaaaggacatacattcgggtcttatcggcccacttctcatctgtcagaaggggattctgcacaaggattccaacatgccaatggatatgcgtgaatttgtgctgctctttatgacctttgatgagaagaaatcgtggtattatgaaaagaagtcccgaagctcctggagactcacgagcagcgaaatgaagaagtcccatgaatttcacgcaattaacggtatgatctacagcctgcctggactgaagatgtacgagcaggaatgggtgcggcttcatcttttgaatataggaggatcacaagatatccatgtcgtccacttccatggacagactcttcttgagaacgggaacaagcagcaccagcttggggtgtggccgctgctcccaggttcgtttaagaccctggaaatgaaggcatcaaaaccgggatggtggctgctgaataccgaagtgggggaaaaccagcgggctggaatgcaaacccctttcctcataatggatagagattgtaggatgccaatgggtctgtccactgggatcatatcggacagccaaatcaaggctagcgaattcctcgggtattgggagcctcgccttgccagactcaacaacggagggagctacaatgcatggtcagtagagaaacttgcagcagagttcgcttcaaaaccgtggatccaggtcgatatgcagaaagaggtgattatcacgggtattcaaactcaaggagctaaacactacctcaagagctgttacaccactgagttttatgtggcctactcgtcgaaccaaatcaactggcagattttcaaaggtaacagtaccagaaacgtgatgtactttaacggtaactctgatgcttccaccattaaggaaaatcaatttgatcctccaattgtggcgcggtacatccgaatttcgcctacgcgagcatacaaccggccgacccttagacttgagctgcagggctgcgaggtgaacggctgttcgacgcccctgggaatggaaaacgggaaaatcgaaaacaagcaaattacggcctcgtcgttcaagaagtcatggtggggagactactgggaaccgttcagagctcggcttaacgcacagggaagagtgaacgcatggcaagcaaaggcaaacaacaacaagcaatggcttgagattgatcttctgaaaatcaagaagatcactgcgatcattacccagggttgcaagtcactgtcgagcgagatgtacgtgaagagctacaccattcattacagcgaacaaggggtcgagtggaagccctaccgcctcaagtcgagtatggtggacaagatctttgaaggcaacactaataccaaaggacatgtaaagaacttctttaaccccccaatcattagccggttcattagggttattcctaagacctggaatcagtcgatcgcactccggcttgaactcttcggctgtgacatttat

SEQ ID NO: 2231 - DNA, 6672 bp, Artificial Sequence
  derived and/or modified sequence
atgtttccggggtgtccacggctgtgggttctcgtagtgttgggcactagctgggttgggtggggtagtcaaggaaccgaggcagctcaactgaggcagttttatgtcgcagcacagggcatctcatggtcataccgccccgagcccaccaatagctccctcaatctgtccgtgacctcctttaagaagattgtgtatcgggaatatgagccttacttcaagaaagagaaacctcaatcaacaatttcggggctgctcgggccgactctgtatgcagaggtgggcgacatcattaaagtccatttcaaaaataaggcagacaaacccctgagcatacacccccaggggattcggtactctaaattaagtgagggggcaagctatctcgatcatacctttccggccgaaaaaatggacgatgccgtcgccccaggtagggagtacacttacgaatggagtatttctgaggactccggccctacccacgacgacccaccatgcttgacacacatttactactctcacgaaaacttaatcgaagatttcaattccggactcattggtcccctgctcatttgtaagaaaggaacactgaccgaggggggaacccagaagacttttgataagcaaattgttttgctgttcgctgtctttgatgaaagcaaatcttggtcacagtctagtagcctgatgtataccgtcaacgggtacgtcaatgggacgatgccggacatcacagtgtgtgcccacgatcatatctcgtggcacctgctgggcatgagttccggccccgagctgttctctatccattttaacggccaggtgttggagcagaaccatcacaaagtgagtgccattaccttggtaagtgccactagcacgacagctaacatgacggtcgggcctgagggtaagtggattattagctcgctaacccccaagcacttacaggctggtatgcaggcatacatcgatataaagaattgtccaaagaaaacgcgaaatcttaagaaaatcaccagagagcaacgacgccacatgaagaggtgggagtatttcattgccgcagaggaggtgatttgggattatgctcctgtcatccctgctaacatggataaaaagtaccggagtcagcatttggacaattttagcaatcagattggaaagcactacaagaaagtgatgtatactcagtacgaggacgagtcatttacaaaacacaccgtgaatccaaatatgaaagaggatggcatactgggtccaatcattcgcgctcaggtgcgtgacaccttgaaaatagtttttaagaacatggcctctagaccttattccatttacccacatggtgtgacctttagcccgtacgaagatgaagttaacagttcctttacgtcgggaaggaacaatactatgatccgggccgtccagcctggcgagacctatacctacaaatggaacattcttgagtttgatgagcccaccgaaaacgatgctcaatgcctaactcggccttattattcagatgtcgacattatgagagacattgcatcgggcctgataggcctactactgatttgtaagagcaggtcattggatcggcgtggcatccagcgggctgccgacattgagcagcaagctgtgttcgctgtgttcgatgaaaataagtcctggtaccttgaagataacataaacaagttttgcgagaaccctgacgaagttaagcgggatgaccctaagttctacgagtctaacattatgagtactatcaacgggtatgtgccggagagcattacaacccttggattctgcttcgatgacaccgtccagtggcatttctgttccgtcggcacgcagaatgaaattcttacaatccacttcacagggcattctttcatctatggcaagaggcacgaagacaccctcactctctttccaatgcggggcgaaagcgtgacagtgactatggacaacgtcggaacttggatgctgaccagtatgaactctagcccgcggtcaaaaaagctacgcctgaagtttagggacgtcaaatgcatacctgacgacgacgaggattcctacgaaatttttgagcctccagaatctacggtaatggctaccaggaaaatgcatgaccgcctggaacccgaggatgaagagagcgacgcagactacgattaccagaaccggttagcagcggcacttggcatcagatctttcaggaactcttccctgaaccaggaggaagaggagtttaatttgaccgcactggctcttgaaaatggaacagaattcgtcagtagtaatacagacatcatcgtaggctctaattacagttccccctcaaacatcagcaagttcaccgtaaacaatctagccgaacctcagaaggctccctcgcatcagcaggcaaccaccgccggttcaccccttcggcatctgatcgggaaaaactctgtgcttaactcctcaaccgcagagcactcctcaccatacagtgaggatccaatagaggatcccctgcagcccgacgtgaccggtattaggttactaagccttggagcgggagagtttaaaagtcaggaacacgccaagcacaaaggccctaaagtcgaacgggatcaagccgcaaagcatcggtttagctggatgaagctgttagcccataaagtgggcagacacttaagtcaggacacgggctcgccctcaggcatgaggccttgggaggacctgccttcgcaggatacaggttcacccagtcggatgcggccatggaaggatccgccatctgacctactcctgctgaaacagagtaattcctccaaaatcctcgttggcaggtggcacctcgcatcggagaaaggtagttatgagatcattcaggatacagatgaagacacagcagtcaacaactggctgattagtccacaaaatgccagcagagcttggggagaatcaacccctctggctaacaagcccggtaagcaatccggccatcctaagttccccagagtgcgacataaatccttgcaggtgagacaagacggaggtaagtcacggcttaagaaatcacagtttctcatcaaaaccaggaaaaagaaaaaggagaaacacacacaccatgcaccattgagtccccgaacttttcacccccttcggtctgaagcgtacaatacattttcggaacgacggctgaagcattctctagtcctccacaagtcgaatgagacctccctccccacagatctcaaccaaactctgccctcaatggattttggctggatcgcgtctttgccagatcataaccagaacagctccaatgacaccggccaggcttcctgcccccccggcctctatcaaaccgttccccccgaagaacactaccagacgttcccaatccaggaccctgaccagatgcacagcacatccgacccgagccatcgctcttcatctcctgaactctccgaaatgctggagtacgaccgctcccacaaatcttttcccaccgatataagccagatgtctccctcttccgaacacgaggtctggcaaactgttatatcacctgacctgagccaggtgacgctgtcccccgaattatcccaaacgaatctgtcccctgacctgtcgcacaccaccctgtctcctgaactgattcagcggaatctttcccctgcgttgggccaaatgcctatctcccccgacctttcccacaccacactctcccccgatctttcccacactactttgtcactagacttgtcccagacgaacctgtcgccggagctctctcagacgaacctgtccccagcactgggccagatgccactaagtcctgacttatcacacaccactctatcgctggatttttctcagactaacctctcacctgagttatcccacatgacactatccccagaactctcccagacaaatttgtcccccgcccttggacaaatgccaatctcccccgacctgtcacatactaccctgagtttggactttagtcagacgaacctgtcccctgaactgtcacagactaatttatccccagcactgggacagatgccactctcccctgatccaagccataccacactctcactggatctgtcccagactaacctttcacccgagctgtcccagactaacctcagtccagacctgtccgagatgccacttttcgcggacctgagccaaatccccctcacaccggatttggatcagatgactctttctccagaccttggcgagactgacctgtccccgaactttggacagatgagcttgagtcctgatctctctcaggtcactctgtctcccgatatctccgacacaacgctgctgccggacctcagccagatttctcccccccctgacctagaccaaatcttttacccaagcgagtcatcacagtccctactgctgcaggagttcaatgagagtttcccataccccgacttggggcagatgccctcgccaagctccccaaccttgaatgatactttcttgtccaaggaatttaatcccctggtgatcgtgggcttgtctaaagatggcactgattatatcgagatcattcctaaagaagaagttcagtctagtgaggacgattatgccgagattgactacgtcccctacgacgatccttacaaaaccgacgtgcgtaccaatatcaactcctcccgggacccagacaatatcgcagcctggtacctcagaagcaacaacggcaacaggcgcaattactatatcgcagccgaagaaatttcgtgggattacagcgagttcgtacaaagggaaacagatattgaagacagtgatgacattccagaagacactacttataagaaggtggtttttagaaagtatctcgatagcactttcaccaagcgggatccgcgtggggaatacgaagagcatcttggaatcctaggacctataatacgggctgaggtcgatgatgtcattcaggtccggtttaagaacttggcttctcgaccttattcactgcacgcacacgggttgtcatatgagaaaagttcagagggtaaaacctatgaagacgatagcccagagtggtttaaggaagataatgcagtgcaaccaaactccagttacacctatgtctggcacgcgaccgagagatctggcccggaatctccgggctccgcttgtagggcatgggcttactacagcgccgtgaatcctgagaaggatattcactcgggcctcatcggccctctcctgatatgtcagaagggcatcctgcacaaagattccaacatgcccatggacatgcgcgagttcgtattattgttcatgacattcgatgagaaaaagagctggtactacgaaaaaaagagtcgcagctcttggcggttgacctcgtctgagatgaagaaaagtcacgaattccacgctattaacggaatgatctacagtttaccagggttgaagatgtacgagcaggaatgggtccggctacatttactgaatatcgggggttcacaggacatacacgtggttcacttccacggtcaaacacttctggagaacggaaataaacagcatcagctcggtgtatggcctcttcttcccggctcatttaaaacactggagatgaaggccagcaaaccaggatggtggctgctgaacacggaagttggagaaaaccagagggccgggatgcagacaccattcctgatcatggatcgggattgtcggatgccaatgggcctgagcacaggcattatatccgactcccagatcaaggcctcggagtttctgggttactgggagccccgtctcgctcgcttaaataacggtggttcttataatgcgtggtctgtagaaaagctggcagcggaatttgcatccaaaccttggattcaggtggatatgcagaaagaggttataattaccggaattcagacacagggggctaaacattacctcaagtcttgctacactacggaattctatgtggcctactccagtaatcagatcaactggcaaatatttaagggcaattccacgcgaaatgtcatgtacttcaatggaaacagtgacgcctctacgattaaggaaaatcagtttgatcccccgattgttgccaggtatattagaatttctccaactcgggcctataaccgtccaacactgcggctggaattacaggggtgtgaggtgaatgggtgctccactccgctgggaatggagaatgggaaaatcgagaataagcagattactgccagctctttcaagaaatcttggtggggggattattgggaaccttttagggcacgactgaatgcgcagggtcgtgtcaacgcttggcaagccaaagctaataacaataagcagtggttggaaatcgatttactgaagatcaaaaaaatcacagctatcatcacacaaggctgtaagtctctgagttccgagatgtatgtcaaatcctatacaatccactattcagagcagggcgttgaatggaaaccttatcggctcaagtcttctatggtcgataagatcttcgaaggcaatactaacaccaagggtcatgtcaaaaatttctttaatcctcctattatttccaggtttattagagtgatacccaagacctggaaccagtcaatcgccctgcgactggagcttttcggctgcgatatatat

SEQ ID NO: 2232 - DNA, 6672 bp, Artificial Sequence
  derived and/or modified sequence
atgtttcctgggtgccctagactgtgggtgctggtcgtactgggtacatcctgggtcggatgggggtctcagggcaccgaggcggctcaactgaggcagttctatgtggctgctcagggaattagctggtcgtaccgcccagagccgaccaactcatctttgaatctgtccgtgacatcttttaaaaaaattgtataccgagagtatgaaccttacttcaagaaagaaaagccccaaagtacgatttctggcttactgggacccaccctctatgctgaggtgggagatattataaaggtacatttcaagaataaggccgacaagcccctttctatccacccacaaggtatcagatactcgaaactctctgaaggtgcctcctaccttgaccacacgttccccgccgaaaaaatggacgatgcagttgcgcctggacgagagtacacgtacgagtggagcatatcagaggacagtggtcctacccatgacgacccaccgtgtctaacgcatatatactacagccacgagaacctcatagaagacttcaacagcggcctgatcggacccctgctgatctgtaaaaaggggacactgaccgagggcggcacacagaagacttttgataaacaaatcgtgctgctgtttgccgtttttgatgagtctaaatcctggagccagagctcctccctgatgtacaccgtcaatgggtatgtcaacggaacgatgcccgacatcactgtgtgcgctcacgaccacatttcgtggcacttgctaggaatgagtagcggacctgagttgttttctattcatttcaatgggcaggtgctggaacagaaccaccacaaggtttctgccatcacactcgttagcgcaacatcaacaaccgcaaacatgactgtcggcccagaagggaagtggattataagtagcttgacaccaaaacacctgcaggcagggatgcaagcatacattgatatcaagaactgccctaagaaaacccggaacctaaagaaaatcactcgggagcagcgaaggcacatgaagaggtgggagtacttcatcgcagctgaggaggtgatctgggactacgccccggtcatcccggccaacatggacaagaagtaccgctcccagcatcttgacaacttcagcaaccagattggaaagcactacaaaaaggttatgtacacccagtacgaagacgagagttttaccaaacatacggtgaacccaaatatgaaagaggacggcatcctgggaccgattattagggcccaggtgagggacaccctaaagatcgtattcaagaacatggccagcagaccctacagcatttatccccacggagtcacatttagtccatatgaggacgaggtcaattctagttttacgtctggacggaacaacactatgatacgggctgtgcaaccaggggagacttatacctataagtggaacatcctggaatttgatgaacccaccgaaaacgacgcccagtgcctgacacgcccctattatagcgacgtggacatcatgcgcgatatcgcctctggcctcatagggctgcttcttatctgtaagtccaggtctcttgaccgtcggggtatccagagggctgccgatatcgagcagcaggctgtctttgcagtctttgacgagaataagagctggtacctggaggataacataaacaaattctgcgaaaaccccgatgaagtgaaaagggatgatccgaaattctatgagtctaatataatgtcaaccatcaacggatacgtccctgagagcatcactaccctggggttctgttttgatgacacagtacagtggcatttttgctcggtgggcacacagaatgagatactgacaattcatttcacaggtcatagttttatctacggtaagaggcacgaagatacgctcacactcttccctatgcgtggagaatctgtcactgtgacgatggacaacgtgggaacctggatgcttacttccatgaactcctcccctcggtcgaaaaagcttcgactgaagtttagggatgttaagtgtatccccgacgatgatgaagatagctatgagatttttgagcctcctgagtcaactgtgatggccactagaaagatgcacgataggctcgagccagaggacgaggaatctgacgctgattacgactatcaaaaccgcttggcagctgctctgggcatacgatccttccggaactcctctctgaaccaggaggaggaagaattcaatctgactgcattagctctcgaaaacggcacagaatttgtaagtagcaatacggacatcatcgttggaagcaactattctagcccaagcaatatttcaaaatttactgtaaataatcttgccgaaccccagaaggcaccttctcaccagcaagctacaactgccggtagtccgctgcgtcacctcattggtaagaactccgtccttaatagtagtaccgccgagcattcatcaccatactctgaggaccccatcgaggatcccctccagccagatgtgaccggaatacggctactgtccctgggagcaggcgaattcaagtctcaggaacacgccaaacacaagggtcccaaggtggagcgcgatcaggcggcaaagcaccggttttcctggatgaaattgctggcacataaggtcggacgtcatctctcgcaggatactggttccccgtcaggaatgaggccctgggaggaccttccatcccaggatactgggagtccaagccgcatgcgcccatggaaggatcctcctagtgacttgctgttgctgaagcagtccaatagcagcaagatactggtagggcggtggcaccttgcctccgagaagggctcctatgagatcatccaggatacagatgaggataccgccgttaacaactggttgatcagccctcagaatgcctcacgcgcatggggcgaatccacacccctggcgaataagcctggaaaacaatctggacacccgaagtttccgcgagtgcgtcataagtcactccaggtgagacaggatggtggcaaaagtagactaaagaagagccagtttctcatcaagacacggaaaaagaagaaggagaaacatacccaccatgccccattgtccccaagaactttccacccactgaggtctgaggcatataacacttttagtgagcgccgattgaagcattctctggttctacacaagagcaatgagacttcacttcccacagatctcaatcagaccctgccatctatggactttgggtggatcgcttctctgcccgatcataatcagaattcgtctaacgacacgggtcaggcctcttgcccaccagggctgtaccaaactgttccgcctgaggagcactatcagacctttccaattcaggaccccgaccagatgcacagcacttctgatcctagtcataggagcagctccccagagctctctgagatgctcgaatacgatagaagtcacaaatcttttcctaccgatatcagccaaatgtcacctagtagcgagcatgaggtatggcagacggtgatttccccggacctctcccaggtgaccctttctcccgagctttctcagaccaacctgagcccggacctcagtcacacgaccttaagtcctgagctgatccagcgaaaccttagccccgccttggggcagatgcctatctcaccggacctctctcatacgaccctctcacctgacctgtcacacactaccctatcccttgacctgagccagactaatctgagcccagagctatcacagacaaacctatctcccgctctcggccagatgcccttgagtcccgatctttctcacaccacactttctctggacttcagccaaacgaatctttctcctgagctgtctcacatgaccctgagtcctgaactttcccaaaccaacctatctcctgcccttgggcaaatgcccatcagtccagacctatctcataccacactctccctggacttctcccagacaaatctttcacctgaattgtcacaaacaaatctgtcccctgccctgggacagatgcccctgtctcctgacccctcccatactacattgagcctggatctcagtcagacaaacctcagcccagaattgagccaaacaaacttatctccggacctcagcgaaatgcccttattcgccgacctgagccagatcccactgacacccgatctggaccagatgacactgtccccagacctgggtgagaccgacctcagcccaaattttggacagatgtctttgtctcccgacctttcccaggtcacgctatctcccgacatcagtgacacgacattgctccctgacctcagtcagatctctcctccaccggacctggatcagattttttacccgtccgaatcttcccagtctctgctgctgcaggaattcaacgagtcatttccataccctgacttgggccagatgccttccccttcctcccccaccctcaatgacaccttccttagcaaggagttcaatccgctcgtaatcgtgggactgtcgaaagacggaacagattacatagagatcatacccaaagaagaggtgcaatctagtgaggatgactacgccgaaatcgattatgtcccctacgatgacccttacaagaccgatgttcggactaacatcaatagctcgcgtgaccctgataacatcgctgcctggtatctgcggtctaacaacgggaaccggagaaactactatatcgcagcggaagaaatatcctgggactacagtgagttcgtgcagcgtgagactgatattgaggactctgatgacatcccagaggacacaacttacaaaaaagttgtgttccgcaaatacctggactcgacattcactaagagggacccgcggggcgagtatgaagagcacctcgggattctcggccctataattcgcgctgaggtggatgacgtgatacaggtgcgttttaaaaaccttgcctctagaccttattcccttcacgcacatggactcagttacgagaaatcaagcgagggtaagacttacgaagatgattcgcctgaatggtttaaggaagataatgccgtgcagcctaactcttcttacacatacgtgtggcacgcaacagaacgttccgggccagagtctccgggctccgcttgtagggcatgggcatactactcagctgtcaaccctgaaaaagacatccacagcggtctgataggccccctattgatttgtcagaagggaattctgcacaaggatagcaacatgccaatggatatgcgggaattcgttctcctgttcatgaccttcgacgaaaagaagtcttggtattacgaaaagaagtccagaagctcctggcgccttacatcttcagagatgaaaaaatctcatgagttccacgccattaatgggatgatctactctttgccaggcttgaagatgtacgagcaggagtgggtgcggttgcaccttcttaacataggaggctcccaggatattcacgtggtacatttccatggacagaccctattggaaaacggcaacaagcagcaccagctcggggtctggcctttgctgcccgggtcatttaaaaccttagaaatgaaagcttccaaaccagggtggtggctcctgaacactgaagtgggggagaatcagcgagcaggcatgcaaaccccatttcttattatggatagagattgccgcatgcccatggggttgtccaccgggataatttcagacagtcagattaaagcatcggagtttttgggctattgggagcctcgcctggccagattgaataacggaggttcatacaacgcctggagcgtagagaagttggccgcagagtttgcttctaaaccctggatacaggtcgatatgcagaaagaggtcatcatcaccgggatccagacacagggagctaagcactatttaaaaagctgttatactactgaattctacgtggcatacagcagcaaccagatcaattggcagatcttcaaagggaactcaactcgtaacgtaatgtactttaatggcaattctgacgcatctaccattaaagaaaaccagttcgatcccccaatcgtggcacgctacatacgaattagtcctacccgagcttacaacagaccgactctgcggctggaattacagggttgcgaagttaacgggtgttccacgccgctcggaatggaaaacggtaaaatcgaaaataagcagatcacagcctcttcgttcaagaaaagctggtggggagactactgggagccatttcgtgctcggctgaacgcacaaggcagggttaatgcctggcaggcgaaggccaacaacaacaagcagtggttagaaatcgatttgcttaagatcaagaaaataaccgcaatcattactcagggctgtaagtccctgagcagtgagatgtatgtgaaaagttacaccatccactactcggaacagggggttgagtggaagccttatcgtctgaagtccagcatggtagacaagatattcgaggggaacacaaataccaaaggacacgtaaagaatttcttcaaccctccaatcatttccagatttattagggtgattccgaagacctggaaccagtctatcgctctccgcctggaactcttcggatgtgatatttac

SEQ ID NO: 2233 - DNA, 6672 bp, Artificial Sequence
  derived and/or modified sequence
atgtttcccgggtgccctcggctgtgggtgctcgtagttctgggaacttcatgggtcgggtgggggtctcagggtacggaagccgcccaactgcgacagttctacgttgccgctcagggaatatcttggagttacaggcctgaaccaaccaactctagtctgaatctgagtgtgacgtcattcaagaaaatagtgtatcgcgagtacgaaccctattttaagaaggagaaacctcagagtactatctccggtttgctgggccccactttgtacgcagaggtgggcgacatcatcaaggtgcattttaagaataaagcagacaagcccctgagcatccacccccagggaataaggtactcaaaacttagcgagggtgcctcgtacttggaccatacttttcccgcagaaaaaatggatgatgctgttgctcccgggcgggaatatacttatgagtggtccattagcgaagactcgggccccacacatgatgaccctccgtgcctgactcatatctactactctcatgaaaatctcatcgaggattttaacagcggactcatcggtccgttgttgatttgcaaaaagggtacgctcactgaaggcggaacccagaagactttcgacaaacagattgtgctcctgttcgccgtgttcgacgagtccaagagttggtcccagtctagtagcctcatgtacaccgtcaacggctatgttaacggcactatgcccgatataacagtttgtgcgcacgaccacatcagttggcatctcctgggaatgagttctggtccagaacttttttctatacatttcaatgggcaggtcctcgagcagaatcatcacaaagtttcggctattacactcgtgagtgccacctctacaacagcaaacatgaccgtagggccagagggtaagtggatcatctcctctctgacacccaaacatctccaggcaggcatgcaagcatatattgatattaagaactgccctaaaaagacaagaaacctgaaaaaaatcacaagggaacaaaggcgccacatgaaacggtgggaatactttatcgctgcggaagaagtcatatgggactacgcacctgtcatcccggccaacatggacaagaaatacaggtcacaacaccttgacaacttcagcaaccagattggtaagcattacaagaaggtgatgtatacgcagtacgaagatgagtcttttactaagcatacagtcaatcctaacatgaaagaggacggcattctgggacccattatcagagcacaggtccgggacacactgaagatcgtatttaagaacatggcgtcccggccttacagcatttatccccatggcgtaacctttagcccatatgaggatgaagtaaactcaagttttacaagtggacggaacaataccatgattagagcggtacaacctggagaaacgtatacttacaaatggaacattctagaattcgacgagccaacggagaatgatgcacagtgcctgactcggccttattattctgatgtggatatcatgcgggacatcgcctctggcctcataggtttgctgctcatatgtaaatcaagaagtttagatcggcgcggcatccagagagccgctgatattgagcagcaggctgttttcgccgtttttgatgaaaataaatcttggtacttggaggacaacatcaacaagttttgtgaaaatcccgatgaagtcaagcgggatgatccgaagttctatgagtcaaatattatgagcacaatcaacggctatgttccagagtccatcactaccctgggcttttgtttcgatgatactgtccaatggcatttttgttccgtcggcacgcagaacgaaatccttacaattcactttactggccactcctttatttatgggaagagacacgaggatacgctcacactttttcctatgcggggtgagtccgttaccgtcacaatggacaacgtgggtacatggatgctgaccagcatgaactcttccccccgcagcaagaaactccggttgaagttccgtgacgtcaagtgcatcccagacgatgatgaggactcctatgagatctttgagccaccagagtccactgttatggccaccagaaagatgcacgataggctcgagccggaggacgaggagtctgatgctgattacgattaccaaaacagactggctgccgcactcgggatacggtcctttagaaatagttcgctaaatcaggaagaggaagagtttaatctaactgcccttgccttggagaatgggacggagttcgtttcaagtaacactgatataatcgtgggttccaactattcctctccatcaaacatctccaagtttaccgtaaataacctggctgagccacagaaggcccccagtcaccagcaggctactacagcaggttctccgctgcgacacctaatcggcaagaatagtgtgcttaacagctcgactgccgagcactctagtccatactcagaagacccaattgaagatcccctgcagccggatgtgacaggcattagactcttaagtctgggcgctggagagttcaagtcacaggagcatgccaaacacaagggtcccaaggtagagcgcgatcaggccgcaaaacatcgattctcctggatgaagctgttagcccacaaggtggggagacacctgtcacaagatactgggagccctagcggaatgaggccttgggaggatctgccatcccaggatactgggagtccatcccgaatgcgtccttggaaggatcccccatccgacctgttgctgttgaagcagtctaacagtagcaaaattctggtagggagatggcatctggcctcggagaaaggctcatatgagattattcaggataccgacgaggatacagcagtcaataactggctgatttctccccagaatgcctcccgtgcctggggcgagtctactcctctggctaacaagcctgggaagcagtcaggacaccctaaattcccccgcgtgcggcacaagagcctgcaagtgcgacaggatggtggcaaaagtcgcctaaagaagtcacagttcttaattaaaacacgcaaaaaaaagaaggagaaacatacccaccacgcccctctttcacctaggactttccacccgctaaggtcggaggcttataatacgttttcagaaaggcgtctcaagcacagcttagtcctccataaaagcaacgagacttccctcccaaccgacctgaatcaaaccctcccttccatggatttcgggtggatagcctcactccctgatcacaatcaaaacagctccaatgatacaggtcaggctagttgccctcccgggctgtatcagactgtgccaccagaggagcattaccagacattcccaatccaggaccctgatcagatgcacagtacttcagatcccagtcataggtccagctcacctgagctgtcagagatgctcgagtacgacagaagccacaagtcattccctactgatatcagtcagatgagtccatccagcgaacacgaggtctggcaaacagtgatctcacccgacctgtcccaggtcaccctgtcacctgagctttcccagactaacctgtctccagatctgtcacacacaacactgtcccccgaattaatccagaggaacctgtctccggcattaggccagatgccgatcagccccgatctgagccacacaacactgtctccggatctttcccatacgaccctttcgttagacctctctcagaccaatttaagtcccgagctgagccaaaccaatctttcgcctgccctgggccagatgccattgtcccccgatctctctcacactacgctgagtttagactttagtcaaaccaacctcagtcctgagcttagccacatgactctatctcctgaactgagccagacaaacctgtccccagcactgggccagatgcccatctcccctgatctgagccacacgacactcagccttgacttctctcagacaaacctttcccccgagctgagccagaccaatttgagcccagccttgggccaaatgccactttctcccgatccgtcgcacaccacactgagtctggacttgtcacagactaacttatcccctgagctgtcccaaacaaatttgtcgccggacctgtccgaaatgcccctattcgccgacttatctcagattccacttacccctgacctggaccaaatgacgttaagcccagaccttggggaaacagatctttcacctaatttcgggcaaatgtccctatcccccgatctgagccaggtgacactgtctcccgatatttcagacaccaccctgctacctgacctctctcaaataagcccgccaccggacctggaccaaatcttctacccctctgaaagctcgcagagtcttctgctgcaggaatttaatgagagttttccttaccctgacctggggcagatgccaagcccatcatcgcccaccttgaacgacacattccttagcaaggaattcaatccgctggttatcgtcgggctgtcaaaggatggcaccgactatatcgagatcatccccaaggaggaggtccaatcttcggaggacgattacgcggaaatcgattacgtcccttatgacgatccatacaagactgatgtaaggacaaatatcaattctagtcgggaccctgataacatcgctgcctggtatctcagatctaataatggtaacaggcggaattactacattgctgctgaggagatctcgtgggattattcggagttcgtacagcgggaaactgacatcgaagactctgatgatattccagaagatacaacctacaaaaaagtggtcttccgcaaatatcttgattccacgtttactaaacgtgaccctcgcggggagtatgaggaacatttaggaattctgggccctatcatccgagccgaggtcgacgatgtcatccaggtacgatttaagaacctcgcgtctagaccctacagtttacacgcgcatgggttgtcatacgagaagtcttccgagggaaagacatatgaagatgacagtcccgagtggtttaaggaggataatgcggtccagcctaattccagttatacttacgtgtggcatgccacggagaggtcgggcccagaatctcccggatccgcttgcagagcatgggcctattacagtgctgtgaacccagagaaagatatacactccggattaataggccctcttctcatctgtcagaagggcatactacacaaggattctaacatgccaatggacatgagggagtttgttctgctatttatgactttcgacgagaaaaagagctggtactacgaaaagaaaagtcgatccagctggagactgacttcctcagagatgaaaaaaagccacgaattccatgctatcaacgggatgatctacagcctcccaggattaaaaatgtacgaacaagaatgggtgcgcctgcacttgctaaacattgggggttcacaggacatccatgtggtccatttccacggccagacactcttagaaaatggcaataagcagcatcagctgggggtttggcccttactgcctggatcctttaaaacgctggagatgaaggcgagtaaacccggctggtggctgctgaacacggaggtcggagagaatcaacgggccggtatgcagacaccatttctgatcatggacagggactgtaggatgcccatggggctgtcgacggggattatctcggattcacaaattaaagcaagcgagttcctgggttactgggagccccgattagcccggttaaacaacgggggcagttataacgcttggtccgtggagaagcttgctgctgagttcgcctcaaaaccctggatacaagttgacatgcagaaggaagtgattatcaccgggatccagacacagggggcaaaacattatctgaagagctgctacactactgaattctatgtggcatactcgtccaaccagattaattggcaaatctttaagggcaattctacccgcaacgtgatgtacttcaacgggaactccgacgcttcgaccataaaggagaaccagttcgatcctccaatcgtagctaggtacatcagaatatccccaacgcgggcctacaacagacctacactcagattggagttgcagggctgcgaagtgaacggatgttctacccccctcggtatggaaaacggaaagatagagaataaacagattacggcgagcagctttaaaaaatcctggtggggggattattgggagcctttccgggcaagactgaacgcacaggggagagtgaacgcttggcaagccaaagctaacaataacaaacaatggctcgagatagatcttctaaagatcaaaaagattacagcaatcatcacgcaagggtgcaagagcctgtctagcgagatgtacgtcaaaagctatacgatccattactctgaacagggagttgaatggaaaccctaccgtctcaaatcatctatggtagacaagatttttgagggcaacaccaataccaagggacacgttaagaactttttcaatccaccaatcatttctagatttatacgggtaatccctaagacctggaaccagagcatagcactccgactggagcttttcggatgtgatatttat

SEQ ID NO: 2234 - DNA, 6672 bp, Artificial Sequence
  derived and/or modified sequence
atgtttcctggatgtccccgactctgggtgctggtcgtcctgggaacttcctgggtggggtggggatcgcaaggaactgaagctgcgcaactgcgccaattctacgtagcggctcagggaatctcatggtcgtaccggccggaaccaactaattcgtccctcaacctgtctgtcacctcgttcaagaagatcgtgtaccgcgaatatgagccatacttcaagaaggaaaaaccgcaaagcactatctcgggactgctggggcccacgctttacgcagaagtcggagacattatcaaggtgcatttcaagaataaggcggataagccgctgtccatccaccctcaaggcatccggtactccaaactgagcgagggggcctcctacttggaccacacctttccggccgagaagatggacgacgctgtggcgcccggacgggagtacacgtacgagtggtccatctcggaagatagcgggcctacccacgatgacccgccctgccttacccacatctactactcccacgagaacctgatcgaggatttcaattcgggcctcatcgggccacttctgatctgcaaaaaaggaactctgactgagggaggaactcagaaaacttttgacaagcaaatcgtgcttttgttcgctgtgttcgatgaaagcaagtcttggtcccaatcgtcgtcgctgatgtataccgtgaacgggtacgtgaacggaaccatgcccgacatcaccgtatgtgcccacgaccatattagctggcatctgctgggcatgtcctccggaccggaactgttttcgatccatttcaatggacaggtgctggaacaaaaccaccacaaagtttcagcgattaccctggtgtccgccacctccacgactgcgaacatgaccgtcggaccggaggggaagtggataatctcgtccctgaccccaaaacacttgcaggcagggatgcaagcctacatcgatatcaaaaactgccctaagaaaacccggaacctgaagaagataactagggaacagcgtcggcatatgaagagatgggaatacttcatcgctgcggaagaagtgatctgggattacgcaccggtgatcccggcgaacatggacaagaaataccgctcgcagcatctcgacaatttctccaatcagatcggcaaacactataagaaggtgatgtacacccagtacgaggacgaatcgttcaccaagcacacggtgaatcctaatatgaaggaggacggaatcctcggcccaatcatccgagcgcaggtccgcgacaccctgaagatcgttttcaagaatatggcctcacggccttactcgatctaccctcacggagtcaccttttcgccttacgaagatgaggtgaacagcagctttacttcgggacggaataacaccatgatccgggcagtgcagcccggcgaaacttacacctacaagtggaacattctggagttcgatgagcctaccgagaacgacgcccagtgcctcaccaggccctactattctgatgtggacattatgcgggacatcgcctcaggacttatcggcttgctgcttatctgcaaaagtagatctctcgacagacgcggcatccagagagccgctgatatcgaacaacaggcggtctttgccgtgttcgacgaaaacaaatcgtggtacctggaggacaacattaacaaattctgtgagaacccggacgaagtgaaacgcgatgacccgaaattctacgagtccaacatcatgtcgaccatcaacggttatgtgccagaatccatcaccaccctgggcttttgcttcgacgataccgtccagtggcatttctgttcggttggcacccaaaacgagatcctcaccatccattttactggacactccttcatctacggcaagcgccacgaagatacccttacgctgttcccaatgaggggcgagtctgtgaccgtgaccatggataacgtgggtacctggatgctcacgtcgatgaacagttcgccgcgctcgaagaaacttcggctgaaatttcgcgatgttaaatgcatcccggacgatgatgaggactcatacgaaatctttgagccgccggaatcaaccgtcatggccacccgcaaaatgcacgaccgcctggaaccggaggatgaggaatccgacgccgattacgactaccaaaaccggctggcggcagccctgggaatccgctcgttcagaaattcgtccttgaatcaggaagaagaagaattcaacctgactgccctcgctctcgaaaatggaacggaatttgtctccagcaataccgacatcatcgtgggatccaactactcatccccgtcgaacataagtaaattcactgtgaacaatctcgccgagccacagaaggccccgtcgcaccaacaggctaccaccgctggttcaccactgcgccacctgattggcaagaactcggtgcttaattcatccacggcggaacattcatccccatacagcgaagatcctatcgaagatccgctgcagccggacgtgactggtattcggcttctgtcgctgggagccggagagtttaagtcacaagagcacgcaaagcacaagggacctaaggtcgaaagagatcaggctgctaagcatagattcagctggatgaaattgctggcgcataaagtggggaggcacctgtcccaggacactggaagcccgtcggggatgcgcccatgggaggacttgccttcccaggacaccggatcgccttcccgcatgcgcccttggaaggacccgccgtccgacctgcttctgttgaagcaaagcaattcatctaagattctcgtcggacgctggcatctggcgtcagaaaaggggtcgtatgaaatcattcaggatactgacgaggataccgcagtcaacaattggttgatctcgccacagaacgcgtcgagggcatggggggaatccactccgctggccaacaaaccgggaaagcagagcggtcatccaaagttcccgcgggttagacacaagtccctgcaggtgcgccaagacgggggaaagtcccgcctcaagaagtcgcaattcctgatcaagaccagaaagaagaagaaggaaaagcacactcatcatgccccgctgtcgccaagaactttccatccgctccgctcagaggcgtacaacactttctccgaacggcgcttgaagcacagccttgtgcttcataagtccaatgaaactagcctgccgaccgaccttaaccagactctgccatccatggacttcgggtggatcgccagcctgcctgatcacaatcaaaatagctcgaacgacaccggtcaagctagttgtccgccgggactgtatcagactgtcccgccggaagaacattaccagactttcccgatccaggacccagatcagatgcactcgacctcggacccgtcgcaccgctcgtccagcccagaactcagcgagatgctcgagtacgacaggtcgcacaagtcgttcccgactgacatctcccagatgtcgccaagcagcgagcacgaggtgtggcagaccgtgatttccccggatttgagtcaggtcacgctgtcaccggaactttcccagacgaacttgtccccagacctcagccacaccaccctgagccccgaactcatccagagaaatctgtcaccggcccttgggcaaatgcctattagtcccgacctctcccacactacgctctcaccagatctgtcacacaccactctgagtttggacctgtcccagactaatctctcgccggagctgagccagacgaacctgtcaccagcccttggccaaatgccgctgtcaccagacctttcccacaccactttgtctctggatttttctcagactaacctttccccagagctctcacacatgaccctctcaccagaacttagccaaacgaacctttctcccgccctgggtcagatgccgatatcacccgacctgtcacacacgacgctgtccctcgacttctcgcagacgaacctcagccctgaactctctcagacgaatctttcacccgcactggggcaaatgccgctctcccccgacccctcgcatactaccctctcgctggatttgtcgcaaactaacctctcgcccgagctgtcacagactaatctgtcgccggacctgagtgagatgccactttttgccgatctcagccagatccctctgaccccggatctggaccaaatgaccttgtcgccagatttgggtgaaactgacctcagccctaactttggacagatgagcctctctcctgacctgagccaggtcactcttagcccggacatatctgataccaccctgctgccagatctctcgcaaatcagccctccgcctgacctggatcagatcttctacccctctgaatcaagccagtcgttgctgctgcaggaattcaatgaatcattcccgtaccccgacttgggacagatgccttcaccgagttcaccaactctgaacgatactttcctctccaaagagttcaatcctctcgtgatcgtgggcctgtccaaggacggaaccgactacattgagattatcccaaaggaagaagtccagagttccgaagatgattacgctgaaatcgattacgtgccgtacgacgatccatacaagactgacgtgcgcaccaacatcaactcgagccgggacccggataacatcgccgcctggtacctgaggagtaataacggcaatcggcgcaattactacatcgcagcagaggagatttcatgggattactccgaattcgtgcagcgagagactgacattgaagatagcgacgacatccctgaggatactacctacaagaaggtggtgttccgcaagtacctcgattcaactttcaccaaacgcgacccaaggggtgagtacgaagagcatctgggcatcctgggaccgatcatcagagccgaagtcgacgacgtgatccaagtcagattcaagaacctggcctcaagaccgtacagcttgcacgctcacggcctgtcatacgagaagtcgtccgaaggcaagacctacgaagatgactcgcctgagtggttcaaggaagataacgcggtgcagcctaactcctcctacacttacgtgtggcatgcaactgaaagaagcggtccggagtcaccgggttccgcctgccgtgcctgggcctactacagcgcggtgaacccagagaaagatatccactccggtctgatcggacctctgctcatctgccagaaaggaatcctgcataaagactcgaacatgccgatggacatgcgggaattcgtcctgctctttatgactttcgatgagaagaaatcctggtactatgaaaagaagtctcggtcctcgtggcggctcaccagcagcgaaatgaaaaagtcccacgaatttcatgccattaatgggatgatttactcgctccctggactcaagatgtacgaacaagaatgggtgcgcctgcacctgctgaatatcggaggatcacaggacatccacgtcgtgcatttccatggtcaaacgctgctcgaaaacggaaacaagcagcatcagctgggagtgtggccgctgctcccgggatcgttcaagactctggagatgaaggcatcaaagccaggatggtggctgctgaatactgaggtgggcgagaatcagcgcgctggaatgcaaaccccattcctcatcatggatagagattgccggatgccaatgggtctgagcactggaatcatttccgattcgcagattaaagcatccgagttccttggctactgggagccgcggttggcaagactcaataatggcggctcatataacgcttggtccgtcgagaagctcgcggccgaatttgcatcgaagccgtggatccaggtggacatgcagaaggaggtgatcattactggaattcagacccaaggcgcgaagcattacctcaaatcttgctacaccactgagttttacgtggcttacagctcaaaccaaatcaactggcaaatctttaagggaaactctacccgaaacgtgatgtactttaacggcaattcagacgcctcgaccatcaaagaaaaccaattcgacccgcccatcgttgcaaggtacatccggatcagcccaactcgggcgtacaaccgcccaaccctcagactggaactgcagggctgcgaggtgaatggatgttcgactcctttgggaatggaaaacggaaagatcgagaacaagcagatcactgcctcatcgttcaaaaagagttggtggggcgactactgggaaccgtttcgggccaggctcaatgctcagggacgggtgaacgcctggcaagccaaggcgaacaacaacaaacaatggctggagatcgacttgctcaaaatcaaaaagataaccgcaatcatcactcagggttgcaagagcctgtccagcgagatgtacgtcaagtcgtacaccatccactactcagaacaaggcgtggaatggaaaccctatcgcctcaagagcagtatggtggacaaaatcttcgagggaaacaccaacaccaagggacacgtcaagaatttcttcaatccgccaatcatcagccggttcatccgcgtcatccctaagacttggaatcaatcaattgcactgcggctcgaactcttcggctgcgacatctac

SEQ ID NO: 2235 - DNA, 6672 bp, Artificial Sequence
  derived and/or modified sequence
atgtttccggggtgccccagattgtgggtgcttgttgtcctgggaacaagctgggtgggctggggatcccaggggacagaagcagcccaacttcgccaattttacgttgccgcgcagggcataagctggtcttaccgccccgaacccacaaactccagtctgaatctgtctgtgacttcatttaaaaagatcgtttaccgggagtacgagccatatttcaaaaaggagaaaccacagagtaccatttcaggactgttgggacctaccttgtacgccgaggtcggcgatatcataaaagtgcactttaaaaacaaggccgacaagcccctgtccattcatccacagggcatccgatatagtaagctgtctgagggtgcaagttacctggaccacactttccccgccgaaaaaatggatgatgcagtggcacctgggcgggaatatacctatgagtggtccatctcagaagacagtggtcccacacacgatgacccaccctgtctgacacacatctattattcccacgagaatttgatcgaagattttaacagtgggcttatcggccctctcctcatctgcaagaaaggaactctgactgaaggcggcacacagaagaccttcgacaaacagatagttttactatttgccgtctttgatgaatctaagtcctggagccagagcagctcactgatgtatactgtgaatggctatgtaaacgggacaatgcctgatatcaccgtgtgcgcccacgatcatatcagttggcatctgctggggatgagcagcggtccagagctcttttccattcatttcaatggacaagttctggaacagaatcatcacaaggtttcagctatcacactggtctcagccacgagcacaacagccaacatgaccgtcggaccagagggtaagtggattatttcgagtctcactcctaaacacctgcaagcggggatgcaggcatatatcgatataaaaaattgtcccaagaaaacgcgcaatctcaaaaagatcacgcgggagcaacggaggcacatgaaaaggtgggaatacttcattgccgccgaggaagtcatctgggactatgcacctgtgatccccgccaatatggacaagaaatatcgatcccagcatctagataatttcagcaatcagattggaaagcattacaaaaaggtgatgtatacacagtacgaggacgagtcgttcacgaagcataccgttaatcctaatatgaaggaagatggtatcctgggacctatcatccgagcgcaagtgagggacaccctgaaaattgtcttcaaaaacatggccagtagaccatattcaatttatcctcatggggttacctttagcccatacgaggatgaagtgaacagctcctttaccagcggtcggaacaatacaatgatcagagctgtccagcctggagagacctacacctataagtggaacatactcgaattcgacgaacccacagagaacgacgcccaatgtctgacccggccttactattcagacgttgatatcatgcgagatattgcctcgggattaatcggcctcctgctcatttgtaagtctcgaagcttggacagacgtgggattcaacgcgctgctgatattgaacagcaggctgtatttgccgtcttcgacgaaaacaagtcatggtacctcgaggacaacatcaataaattttgcgaaaaccctgatgaagtgaagagggacgatcccaagttctacgagtctaacatcatgagcaccatcaacggatacgttcccgaaagtataacaacactgggcttttgctttgacgatacggtgcagtggcatttttgttcggtgggaacccaaaacgaaatcctcacaattcactttacaggtcacagtttcatctacggtaaacgacacgaagataccctgaccctgttccccatgagaggtgagtctgtgactgtcaccatggataatgtggggacatggatgctcacttcaatgaactcttctcccaggtcgaagaagctgcgccttaagttcagggatgtcaagtgtatcccggacgatgacgaggactcttacgagatcttcgaacctccagaatcaactgttatggccacacggaaaatgcacgaccgcctggaaccagaagatgaggagtccgacgcagattatgattatcagaaccgcctcgccgccgctctcggcataaggagcttccgcaattcctctctcaatcaggaggaggaggagttcaatctgaccgcgttagccctagaaaacggcacagagtttgtatcttccaataccgatatcatcgtgggctcgaactacagtagcccaagtaacatctccaagttcactgtgaataatcttgccgagcctcagaaggcaccaagccaccagcaggctaccaccgccggtagcccattgcgtcatcttataggaaagaattccgtcctgaatagcagcactgccgaacattcgagcccatacagcgaggacccaattgaggatcctctccaacccgacgtgaccggcatcaggctcctgtctctcggagccggggagtttaagtctcaggagcatgcaaaacataagggacctaaagtggaacgtgatcaggccgccaaacatcggttcagctggatgaagctcctagcacacaaggtggggcggcatctgagccaggacactgggtctccatctggcatgagaccatgggaggacctgccctctcaggacaccggtagccctagccggatgcgcccgtggaaagatccaccgtctgacctcctgctgttgaagcagagcaattcctcaaagattctggttggacgctggcaccttgcttcagagaaagggtcgtacgaaattatccaggacacagatgaagacactgccgtcaataattggctgatttcgccccaaaatgcgtctcgagcgtggggcgagagtacccctttggccaataagccgggaaaacaaagcggacatccaaaattcccacgcgtcaggcacaagtctctccaggtaaggcaagacggcggtaaatcaagactcaagaagagtcagtttttgataaaaacacgcaaaaagaagaaggagaagcacacccatcatgcccccctctctccaagaacattccacccgctgcggtccgaggcctataacacgttttccgaacggagactgaagcactccttagttctgcataagtcaaatgaaacatccttgccaaccgatcttaatcaaacgctgccgagcatggactttggttggatcgcaagcctcccggaccacaaccagaatagctcaaacgacacaggtcaggcctcatgccccccaggcctgtatcagactgtcccaccagaagagcactaccagacttttcctattcaggaccccgaccaaatgcactccacatctgacccgtcccaccggtcatcctcacctgagctgagcgagatgttggagtatgatagaagccataaaagctttccaaccgacatctctcagatgtccccatccagtgaacacgaggtctggcagaccgtaattagcccagatctaagtcaggtcacactgagcccagaactgtcccagactaatttaagtcctgatttgagtcacacaaccctgtcacccgagttgattcagagaaatctgtccccagctctggggcaaatgccaatctcaccagatctaagtcacaccacgctctcgccggatttatcgcataccacattgagtcttgacctgtcccagacaaacctttctcctgagctgtcccagaccaatctcagccccgctttagggcagatgccgttgtctccagatctaagccacaccactctgtcccttgatttctcccagacgaatctttcgcctgagcttagtcacatgacgctcagtcctgaactttcccagacaaatctgagcccggcgttgggtcagatgcccatcagcccggatctaagtcatacaacgctatctctggatttctcccagaccaacctctccccagagctgtcccagacaaatctcagtcccgccctgggtcagatgccactgtcccccgacccgtcccatacaaccctctcgcttgatctgtcccaaaccaacttatcccctgaattgtcacagacaaacctgagtccggatttgtccgaaatgccactctttgcggatctcagccagatcccattgacgccagatcttgatcagatgacactcagtccggatctcggcgagacagatttgtcccccaacttcggccaaatgtccctctcgcccgatctctcacaggtgaccctgagtcctgacatttcggatactacgctgctgccagatctcagtcagatcagtccaccccccgacctggaccaaatattttacccctcagagagcagtcagagcctcctgctgcaggaattcaatgagtcctttccttacccggacctcggacagatgccctccccatcatctcccacattaaatgacacatttctgtccaaagagtttaatcctctggtcatcgtaggtctgagtaaggatggaactgattacattgaaataattcctaaagaagaggtccaatctagcgaagacgattatgcggaaatcgattatgtgccttatgacgatccttacaaaacagacgtcaggacaaatattaactccagcagagacccagataacatcgccgcctggtacttacgatccaataacggtaacagacgtaactactatatagcagctgaagaaatatcatgggactatagcgaattcgtgcaacgggagacagatattgaggactcagatgatatcccagaggacaccacttacaagaaggtggttttccgaaaatacctggactcaaccttcactaagagggatccccggggcgagtacgaagagcaccttgggattctggggcctattatacgggcggaggtggatgatgtaatccaggtccgttttaaaaacctcgcgagccgaccctacagcctgcacgcccacggcctcagctacgagaaaagttcggagggcaaaacgtatgaagatgatagtcctgaatggtttaaagaagacaacgctgtacagcccaactcatcttatacctatgtgtggcacgccacggaaaggtccggacccgagagcccaggctcagcttgtagggcctgggcatactactccgcagtcaaccctgagaaggacatccactcagggctgatcgggccactgctgatctgtcagaagggaatcctacacaaagactctaacatgcctatggatatgcgcgaatttgtgctgctgtttatgacatttgacgaaaaaaagtcgtggtactacgaaaaaaagtcccgatcaagttggcgtctgacgtcctcagaaatgaagaaaagccatgaattccatgctatcaacgggatgatctactccttgcccgggctgaagatgtacgagcaggagtgggtgaggctgcacctacttaacatcggcggcagccaagacatccacgtagtgcactttcacgggcagacgctgttggagaacggaaataagcagcaccaactcggagtgtggccattacttcccggttcatttaagaccttggagatgaaggctagtaagcctgggtggtggctgctcaatacagaagtcggggaaaaccagcgggctgggatgcagaccccattcttaattatggatagagactgtagaatgccaatgggcctgtcgacggggattatctctgattcacagatcaaagcgtccgagttcctcggttactgggaaccacggttggctcggctgaacaacggaggcagctataatgcgtggtccgttgaaaagctggctgccgagttcgcgtccaagccttggatccaagttgatatgcagaaagaggttatcatcacagggatccagactcaaggcgcaaaacactatttgaagtcttgttataccaccgagttttacgtggcttactcttctaatcagatcaattggcaaatatttaaagggaattctactcgcaacgtcatgtacttcaacggtaactctgacgcgagtactataaaggagaatcaatttgacccccccatagtggctcgctacatcaggatcagcccaactcgcgcttataaccgcccgacactgaggttggagctgcagggttgcgaggtgaacggatgctcgactcccttgggaatggagaacgggaaaatcgaaaacaaacaaattactgcttcttcctttaaaaagtcctggtggggcgactattgggaacctttcagggctcgcctgaatgcacaggggagggtcaatgcctggcaggcgaaggcgaataataataaacagtggcttgagatcgacttactgaagatcaagaagatcaccgctattatcacccagggctgcaagtcactcagctcagagatgtatgtaaaaagttatactatccactattctgagcaaggggtcgagtggaaaccatacagactaaaaagttcgatggttgacaaaatcttcgagggaaacacgaacaccaaaggacatgtgaaaaatttcttcaacccccccattatttctcggtttattcgagtgattccgaaaacatggaaccaatccattgcacttcgtctagaattgtttgggtgtgacatctat

SEQ ID NO: 2236 - DNA, 6672 bp, Artificial Sequence
  derived and/or modified sequence
atgtttcctggatgccctaggctgtgggttctcgtggtacttggtacaagctgggtgggatggggatctcaaggaactgaagctgctcagctacgacaattctacgttgcagcccagggaattagttggtcttatagaccagaaccaacaaactcaagtctaaacctgtcagtgacaagcttcaaaaagatagtgtaccgggaatatgaaccttacttcaagaaagagaaacctcagtctacaatcagtggactcctcggccccaccctgtatgctgaagttggggacatcatcaaggtccatttcaagaacaaggctgataagcccttaagtatccaccctcagggaatccggtatagtaagttaagcgagggggcctcttacctggatcataccttcccagctgaaaaaatggacgatgctgtggcccccgggagggagtacacgtatgagtggagcatatctgaagactccggtcctacccacgacgaccccccttgtctcacacacatttattacagccatgagaacctgatagaagactttaactctggattgatcgggcccctgctgatttgcaaaaagggcaccttaaccgagggaggtactcagaagacatttgataagcagatcgtcctacttttcgccgtcttcgacgaaagcaagtcctggagccaatcaagtagtttgatgtatacagtcaatggatatgtgaatggaactatgcccgatattactgtgtgcgcgcacgaccatatcagctggcaccttctgggcatgagtagcggtcctgaactgttcagtatacattttaatgggcaggtgctggaacagaaccaccataaagtgagtgctataaccttggttagcgccacttcaaccacggccaacatgacggttgggcctgagggaaagtggatcatttcaagccttacacctaaacacctgcaggcgggcatgcaggcctacattgatatcaaaaattgtcccaagaaaactcggaacctgaagaagataacacgcgaacaaaggcggcacatgaaaaggtgggagtactttattgctgctgaagaggtcatctgggactatgcgcctgtcataccagctaacatggataaaaaatacaggagtcagcatctagataacttctccaaccaaataggcaaacactataagaaggtaatgtatactcaatatgaggacgagagttttacaaagcataccgtcaatcccaatatgaaggaggacggtattttgggcccaatcattagagctcaggtcagggatacactgaaaatagtttttaagaacatggcttcccggccctactcaatctacccacatggcgtaaccttctccccttacgaggatgaggttaactccagcttcactagcggcaggaataatacaatgatcagggcagtgcagcccggtgaaacatatacctacaagtggaacatactggagttcgacgagccaaccgagaacgatgcccagtgtctgacacgaccctattattcagatgtagatatcatgcgggacattgctagtgggctgattggactcctgctgatttgtaagagcaggagcttagacaggcgcgggattcagcgcgccgcagacatagaacagcaagccgtatttgcagtctttgatgagaacaagtcttggtatctggaagataatatcaataagttctgtgaaaaccccgacgaagttaagagggacgatccaaaattttacgagagtaatataatgtcaacaattaacggatatgtaccagagagcattactactcttggattctgcttcgatgatacagtccagtggcacttttgcagcgtgggcacgcagaatgaaattttgacaatccactttactggacatagtttcatctatgggaagagacacgaagatactctaaccctgtttcccatgcgcggggagtcagtcactgtaaccatggataacgtaggaacttggatgttgacatccatgaactcctcaccgagatctaaaaagctgcgacttaagttcagagatgttaagtgtatacctgacgatgacgaggactcttacgagatatttgagcctccagagtccaccgttatggccactcgcaagatgcacgatagactggagccagaagacgaggagtccgatgcagattacgactatcagaaccggctggctgcagctctggggataagaagtttccggaacagtagtctgaatcaggaggaagaagagtttaacctgacagcgctagctctcgaaaatggcactgagtttgtgtcttctaacacagacatcatcgtaggcagtaattattcatctccaagtaatatatcaaagttcacggttaataatcttgccgaaccacagaaagcaccgtctcaccaacaggctacgaccgctggatcccctctgagacatctcattggcaaaaactccgtcttgaactcctctaccgcagaacactccagcccctatagtgaggatccaattgaagaccccctgcagccagacgttactgggatccggctgctgtcccttggggccggggagtttaagagccaagagcacgccaagcacaagggaccaaaggtcgagcgggatcaggcagccaaacaccgcttttcctggatgaaactgcttgcgcataaggtcggccgacatctatcccaggataccgggtcacctagtggcatgcgaccctgggaggatttgccaagtcaggatactggttcaccttcacgcatgaggccctggaaggatccaccttccgaccttctactgctcaagcagtctaacagttctaagatcctcgtgggtagatggcacctggcctctgagaaaggctcttatgagataatccaggacaccgatgaagataccgcagttaacaactggttgatttcacctcaaaatgccagcagagcctggggggagtccactcccctggccaataagccgggcaagcagtcaggacaccctaagttccccagagtaaggcacaagtccctgcaggttcggcaggatggaggcaagtcgcgactgaagaagagccagttcttaattaaaacgagaaaaaaaaagaaggaaaaacacactcaccatgcacccttaagcccccgcacattccaccccctgcgctccgaagcttacaatacattttccgagcgaagactcaagcatagcctggtccttcacaaaagcaacgagaccagtctgcccactgatcttaaccaaactctaccttctatggattttggatggatagcgagccttccggatcacaatcagaacagcagtaatgataccggccaggccagttgtccaccaggcctatatcagaccgttccacctgaggagcattatcagactttccccatacaggaccctgatcaaatgcattccactagcgacccgtcccaccggagctcatcccctgaactctcagaaatgttagaatacgaccggagccacaaaagctttccaactgacatatcacaaatgtctccgagttctgagcatgaggtgtggcagactgtgatctccccagatctttctcaagttactctgagtccagagctaagtcagaccaacctatctccggacttaagtcacactactctgtcaccggaattaatccagagaaatctgagtcccgcccttggacagatgcccatctctccggacctgagccatacgactctttcccccgatttaagccataccactctgagtctcgacctgtcccagacaaatctgtccccggagctgtcacagacaaacctgagccctgccctaggccagatgcctttgagcccagacctcagtcacaccaccttatcactggattttagccagaccaatttgtcgcccgagctgtctcacatgacgttatcacccgagctgtcccagaccaatctgagcccagccctcggccagatgcctatctctcctgacttgtcgcatacaacactttctctggacttttcccagactaatctgtctccagaactgagtcagactaatcttagtccagccctcggccagatgcccctgagcccagacccgtctcacaccacattaagtctggacctctcacagaccaatctttcgccagaactcagtcaaaccaatctttcccctgacctttccgagatgcccctctttgcagacctgagtcagatccccttgacccccgacttggatcagatgacgctctcaccagacttaggggaaacggatctcagccctaatttcgggcaaatgtcactctccccagacttgagtcaggttactttatcaccagatatctccgacaccacattgctccccgacctgtctcagatatctcctcccccagatctggaccagatattctaccccagcgagtccagccagtctcttctcttgcaggagttcaacgagagctttccataccctgacctgggccagatgcctagtccgagcagcccaacactgaatgacacgtttctttccaaggagttcaaccctttggtcatagtgggcctctcgaaggacggtacagactacatcgagatcattcctaaagaagaggttcaaagttccgaagacgactatgcggagattgactatgtgccatatgacgatccctacaagaccgacgtacgtacaaacatcaattctagcagagatccggacaacatagcagcctggtacctccgatcgaacaatggaaacagacgcaattattatatcgccgcagaagaaatttcatgggactactctgagttcgtccagcgggaaaccgacatcgaagacagcgacgacataccagaagatacaacttacaaaaaagtggtcttcagaaagtacctggatagcacattcacaaaacgggatcctagaggagaatacgaggagcacctcggtatccttggccccattattcgggctgaagttgatgatgtgattcaagttaggtttaagaatctggcttcccgtccctactctctgcacgctcatggcctgagctatgagaagtcatccgaaggaaaaacctacgaggacgacagccccgaatggttcaaagaggacaacgccgttcagcctaacagctcatatacgtacgtgtggcacgccaccgagcgctctggtcccgagagccctggctccgcatgtcgggcatgggcttattactcagctgttaaccctgaaaaagatatccatagtgggttgattggaccactcctcatatgccaaaagggcatcctacacaaggactccaatatgcctatggatatgcgggaattcgtgctgctgtttatgactttcgatgagaagaagtcatggtactatgaaaagaaatctcgctcttcctggagacttacctcatccgagatgaagaaatcgcatgagttccacgccatcaacggaatgatctacagccttcccggtctaaaaatgtatgagcaggaatgggtgcgactccatctgctgaacatcggagggtcccaagatatccacgtagtgcactttcatggtcagactctgctggagaacggaaataaacaacaccaactaggtgtctggccgctcctgcccgggtccttcaaaactctcgaaatgaaggcttccaaaccgggctggtggctacttaacacagaggttggagagaatcagcgcgcggggatgcaaacccccttcctgataatggacagggattgccgcatgcctatggggctctctacaggaatcataagcgattcacagatcaaggcttcagaatttctggggtattgggaaccacgattggcccgcctgaacaacgggggctcttataacgcttggtcggtggaaaaactggctgccgaattcgctagcaagccctggatccaggtggatatgcagaaagaagtcatcatcaccggaattcagacccaaggggccaagcactatctcaaatcatgctatactactgagttttacgttgcttatagctctaaccagattaattggcagatctttaagggcaactcaactcgaaatgtgatgtactttaacggaaactctgacgcttcgacgattaaggagaaccagtttgaccctcctattgttgccaggtacatccggatcagccccaccagggcatacaatcggccaaccttacggctggagcttcagggttgcgaagtgaatggctgttcaactcctcttggtatggagaatggcaaaatcgaaaacaaacaaatcaccgctagcagctttaagaagtcttggtggggagactactgggaacctttccgcgccagactgaacgcacaggggagggtgaacgcttggcaggctaaagccaacaacaataagcagtggctagagatagacttactgaagatcaaaaagattacggcaatcattactcaggggtgtaaatccttgtcatccgagatgtacgtaaagtcgtacacaattcattactcggaacagggcgttgagtggaagccgtaccgattgaagtcctcgatggtggacaagatcttcgaggggaataccaataccaagggtcatgtaaagaatttctttaatccccctatcatttctagattcatacgcgttattccgaaaacctggaaccagtcgatcgcactgcgattagaactttttggatgcgatatctac

SEQ ID NO: 2237 - DNA, 6672 bp, Artificial Sequence
  derived and/or modified sequence
atgtttcctggttgccctagattatgggtgctggtggtcttaggaacttcttgggtgggctgggggagtcaagggacggaagctgcacagctccgacagttctatgttgccgcacagggaatatcctggtcctatcgccccgagccaacaaatagctcccttaatctcagcgtgaccagtttcaagaaaatagtctacagagagtatgagccttattttaagaaggaaaagcctcagtccacaatctcagggctgctgggacctaccctctatgcggaggtgggagatatcattaaggtgcacttcaagaacaaggcagacaagcccttatcgatccatccccaaggcattcgctactccaaactgagcgagggcgctagctaccttgaccacacctttccagctgaaaagatggacgatgccgtagcacctgggagggaatatacttatgagtggagcatttctgaggattccggtccgactcacgatgaccctccctgtctgactcatatttattacagtcatgagaacctgatcgaagacttcaacagtggtctcatcggcccacttctgatctgtaagaagggcaccctgacggaggggggaacccagaagaccttcgataagcagatagtgttactctttgcggttttcgacgaatccaagagctggagccagagcagttctctgatgtatactgtgaacggctacgtaaacggcactatgcccgatatcaccgtgtgtgcccatgatcacataagctggcacctgctggggatgagtagcggccccgagcttttttccatacattttaacggccaagtcctggagcagaaccaccacaaggtgtccgcaattaccctggtgagcgcaaccagcaccactgccaatatgaccgtaggacctgaaggtaaatggatcatctcctccttaacaccgaagcacctgcaggccgggatgcaggcctatatcgacatcaagaattgtcccaagaagaccagaaatcttaagaaaattacccgcgagcagcgtcggcatatgaaacgctgggaatacttcatcgcggcagaagaagtcatctgggattacgccccggttataccagcgaatatggacaagaagtacagaagccagcacctcgacaacttcagcaatcagattgggaagcactataagaaggtgatgtacacacaatacgaggacgagtccttcacaaagcataccgtgaacccaaatatgaaggaggacggcatcctggggcccattatcagggcacaggtgagggatacactgaaaattgtgttcaagaatatggctagcaggccttacagcatatatcctcacggcgtcacattttctccttacgaagacgaggtgaatagtagctttacatctggtaggaacaatacgatgatccgggcagtgcaaccaggcgagacatatacctacaagtggaacatcctcgagttcgatgagcctactgagaatgacgctcagtgtttgaccaggccatactatagcgacgtcgatatcatgcgcgacattgcctccggcctgatcggtctgctgctcatttgcaagagccgcagcctggaccgacgtggtatccaacgggcagctgacatcgagcaacaggccgtgttcgcagtcttcgacgagaacaagtcttggtacctagaggacaacattaataaattctgcgagaatcctgacgaggttaagcgtgatgaccctaagttctacgagtctaacatcatgagtaccatcaacggatacgtgcctgagtctataactaccttaggattctgcttcgacgacactgttcagtggcatttctgttccgtgggcacacagaacgagattctgacgatccactttacaggtcatagcttcatatacggcaaacgacatgaagacaccttaaccctgttccccatgagaggcgagtctgtgacagtaacaatggataacgtgggtacttggatgctgacctccatgaactcttcgcctcgctcaaaaaagctccggctgaaattcagggacgtcaagtgtattcctgacgacgatgaagattcatatgaaatctttgaaccccccgagtctaccgtaatggccacccggaagatgcacgaccgactcgaacccgaggatgaggaaagtgatgccgactacgactatcagaacagacttgccgccgcccttgggattaggagttttcggaattcgtcgctgaaccaggaagaggaggagttcaatttgaccgcactcgcactggagaacggcacagagtttgtgtccagtaacactgacatcattgtgggctccaactatagtagcccctcaaacatctcaaaattcaccgttaataacctggccgagccccagaaggcacccagtcaccaacaggcaaccactgccggcagcccccttcgacacctgataggtaaaaattctgtgctcaacagctcaactgccgagcattccagcccatacagcgaggatcccattgaggacccgctacagcctgacgtcacagggatccgcctcttgtcgttaggtgccggagagttcaagagccaggagcatgcgaagcataagggccccaaggtggagcgcgaccaggcggcaaagcatagattcagctggatgaagctcttggctcataaagtgggccggcacctgtctcaggacactggaagccctagcggaatgaggccttgggaggatctgcccagccaagacacaggcagccccagtagaatgcggccttggaaagaccccccaagcgacctgctgctcctgaagcagagtaactcctctaagatcctggttggaagatggcacttggcaagcgagaaaggatcttacgaaatcatacaggataccgatgaggatacggccgtcaataattggctgatatcaccacaaaacgctagccgagcatggggcgagagtacaccactcgccaataaacccggcaagcagtctgggcatcccaagtttcccagagtgcgtcataaaagcctccaggtgagacaggacggcgggaagagtcggttaaaaaagtcccagttcctgataaagacacgtaagaagaagaaggagaagcacacacatcatgcacccctctctcccaggacctttcatccactaagatcagaggcctacaacacctttagtgaaagacggctgaagcatagcctcgtgcttcataagtcaaatgaaacgtctctgcctacagacctgaatcagactctgcccagtatggattttggatggatcgcatcactgccagaccacaatcagaattcctcaaacgacacgggccaggcttcatgcccaccagggctttatcagacagttccgccggaggagcactatcagacttttccgatccaggacccagatcagatgcactccacgtccgaccccagtcaccgatcctcttctcccgagctgtccgaaatgctggaatacgaccgatcacataagtcctttccaacagacatctcacagatgtcacccagctcggaacatgaagtgtggcagacagtgatctcacccgatctttctcaggtgaccttgtccccagagcttagtcagacgaatctctctcccgacctctctcacacaacattgtcacctgaactgattcaaagaaatttgagccctgccctgggacagatgcctatatcgcctgatctgtcacacactaccttgagtcccgatctgagccacaccactttatctcttgacctttcgcagaccaacctgagccccgagctctcccagaccaacttgtctcccgcactgggacagatgcccctgtctcctgatctgagccacactacgctgtctttggacttctcccagacgaatttgtcacctgaactctcacacatgaccttgtctcctgaactcagtcagactaacctgagcccggccttaggccagatgccgatatctccagatctatcacatactacgctctcgctggattttagccagactaatctgtcacccgaactgtctcagactaacctctccccagctttgggacaaatgcctctcagccccgatccttctcataccacgctgagcctcgacctgagccagaccaacttgtcccctgaactgagccaaactaatctgtccccagacctttccgagatgcctctgtttgcggacttgtcccagatcccgttgaccccagatctggaccagatgactctgtctcctgatctgggagaaacagatctgtcacctaatttcgggcagatgagcctgtcccctgatttgtcgcaagtcaccctgtcccccgatatttcagatacgacactgctcccagatctttcacaaatcagcccgccccccgacttagaccagattttctacccttccgagtctagtcagagcttgctgctacaagaattcaacgaatccttcccataccctgacttggggcaaatgccctccccctcttcccctaccctgaacgacacctttctgtctaaagagttcaacccgctggtgatcgtagggctctccaaagacggaactgactacatcgagatcatacctaaggaggaagtgcaatctagtgaggacgattacgccgagatcgattacgtgccctacgatgacccgtacaaaacggacgtcaggacgaacatcaactccagcagggacccagacaatattgccgcatggtatctaagatctaataacggcaatcgaagaaactattacatagcagccgaggaaatttcctgggactactccgagtttgtccagcgtgaaacagatatcgaggacagcgacgatattccggaggacacaacctacaagaaagtggtatttagaaaatatctggattccacctttacaaagcgggatccccggggggagtacgaggaacacctgggcattcttggccctatcatcagggcagaggtggatgacgtcattcaggttagattcaaaaacctggcctctcgcccctatagtctccacgcccatggcctcagctacgaaaagtcctccgaagggaaaacatacgaagacgactccccagagtggttcaaggaggataatgctgtgcagcctaactctagctacacatatgtttggcacgccactgagcgatctggtccggagagccccggttcagcttgccgggcttgggcttactacagcgctgtgaaccccgaaaaggatatacatagcggtctcatcggacctcttcttatctgtcaaaagggcattttacataaagactccaacatgccaatggatatgcgggagttcgtgctattgttcatgactttcgacgagaaaaagagttggtattatgaaaagaagtcaagatcttcatggcggctgaccagttctgaaatgaagaagagtcacgagtttcacgcgatcaacggaatgatctattccctccccggcctgaagatgtatgagcaggagtgggtgcggcttcaccttctaaacatcgggggctcccaggacattcacgtcgtgcattttcacggacagaccctgcttgagaatggcaataagcaacatcagttgggtgtctggcccttactccctggatctttcaaaaccctcgagatgaaggctagcaagcctggctggtggctcctgaatactgaagtgggcgagaaccaacgggctggaatgcagacacccttcctcatcatggaccgcgactgccgcatgccgatgggcctgagcactggcatcatatctgatagccagattaaggcgtcggagttcctggggtattgggagccccggctcgcccggttgaacaacggcggatcatacaacgcctggagtgtagagaagctcgccgcagaatttgcaagtaagccctggattcaggttgatatgcagaaggaggtcataatcactgggatccagacccagggggctaaacactacctgaagtcgtgttataccaccgagttctatgtggcttacagtagcaaccagatcaattggcagatctttaagggaaattcaacgagaaacgttatgtacttcaacggcaattccgatgcaagtaccattaaggaaaatcagtttgatcctccaatcgttgcccggtacatacgaatcagcccgacccgggcctataatagacccacattacgcctcgaactacagggctgcgaggttaatgggtgttccaccccactgggcatggaaaatgggaaaatcgaaaacaaacagatcaccgccagttcatttaagaagagctggtggggagactactgggaacccttccgagcaaggctgaacgcacagggtcgagtgaacgcctggcaagcaaaagctaacaataataaacagtggctggaaattgatcttctaaagataaagaaaattaccgcgataattacccaaggctgcaaaagcctgtcaagtgagatgtacgtcaagtcctacaccatccattacagcgagcagggggtggagtggaagccgtaccggctcaagtcctctatggtagataaaatcttcgagggcaacacgaacactaagggacatgtgaagaattttttcaacccacctatcatttctcgctttataagagtcatcccaaagacttggaaccagagtattgcactcaggttggaactcttcgggtgcgatatctac

SEQ ID NO: 2238 - DNA, 6672 bp, Artificial Sequence
  derived and/or modified sequence
atgtttcctgggtgccccagactgtgggttctggtggtcctggggaccagctgggtcgggtggggctcgcagggaaccgaagcggcacaactgcgccaattctacgtggcggcccaaggcatctcctggtcctaccggcctgaaccgacgaacagctcgctgaaccttagcgtgacgagttttaagaagatcgtgtaccgcgaatacgagccttacttcaagaaggaaaagcctcagtccactatctccggcctgctgggaccgactctctacgcagaggtaggagacatcatcaaggttcactttaagaacaaggcagataagccgctgagcatccaccctcagggaatccgttactctaagctctccgaaggagcctcgtacctggatcatacttttcccgccgaaaagatggatgatgccgtggcccctggtagagaatacacctacgaatggagtatttcagaggattcgggaccaactcacgatgacccaccctgcctgacccacatctactactcgcacgaaaatctgattgaagatttcaactccggtctgatcgggccactgctgatctgcaagaagggcactctgactgaaggaggaactcagaaaactttcgataagcagatcgtgcttctgtttgccgtattcgacgaatcgaagtcgtggagccaaagcagctcgctgatgtacaccgtgaacggatacgttaatggcactatgccggacataaccgtgtgcgctcacgaccacatcagctggcacctcctggggatgtccagcggaccggaacttttttccatccactttaatggccaggtgctcgaacaaaatcaccacaaggtgtccgcaatcacccttgtgtcggctacctcaaccaccgcaaacatgactgtcggacctgaaggcaagtggatcatctcatctctgacgcccaagcatctccaagcagggatgcaggcgtacattgatatcaagaattgccccaagaaaactcgcaatctgaaaaagattactagagaacagagacgccatatgaaacggtgggagtacttcatcgccgctgaggaggtcatctgggactatgccccggtcattccggctaacatggacaagaagtaccgttcccagcatctggacaactttagtaaccaaatcggaaagcactacaagaaggtgatgtacacccagtacgaagatgagtcattcaccaagcacaccgtgaacccaaatatgaaagaggatggaatcttgggaccgattatccgcgcccaggtgagggacactttgaagatagtgttcaagaatatggctagccgcccttactcaatttacccacacggcgtgactttcagcccttacgaggatgaggtcaactcgagcttcaccagcgggcggaacaacaccatgatccgcgctgtgcaaccgggagagacttatacttacaaatggaacatcctcgagttcgacgagccgactgagaacgacgcacagtgcctgactagaccgtactactcggacgtggacatcatgcgggacatcgcctcaggcctgatcggactgcttctgatatgcaaatcgcgttcgctcgaccggcggggtatccagagagcagctgatatcgaacagcaagcagtgttcgccgtgtttgatgagaataagtcctggtacctggaggacaacatcaacaagttctgcgaaaatccggatgaagtcaagagagacgacccgaagttttacgaatcgaacatcatgtccaccatcaatggatacgtccctgagagcattactactctgggattctgcttcgacgacaccgtgcaatggcacttctgttcggtgggtactcaaaacgaaatcctcaccatccattttaccggacattcctttatctacggtaagcggcacgaggacaccctgaccctttttccaatgcgcggtgaaagcgtgaccgtgacgatggataacgtcggaacttggatgctcacctccatgaactcgtccccccgctcaaagaaactccgcctgaaattccgcgacgtgaaatgtatccccgacgacgatgaagatagctacgaaatcttcgaaccgccggaatccactgttatggccacgagaaaaatgcatgacagactggagccagaggacgaggaatccgatgcagactacgattaccaaaatcgcctcgctgctgccctgggaatcagatccttccgaaactccagcctcaaccaagaagaagaggaattcaatttgaccgcgctggccctggaaaacgggaccgaattcgtgagctcgaatactgatatcatcgtgggatcaaactactcctcaccttcaaatatcagcaagtttactgtgaacaatctggcggagccacagaaagcaccatcccaccagcaagctactaccgcaggatcacctctgcgccacctgatcggaaaaaactctgtcctgaacagctccacggcagagcactcctcgccgtatagcgaggacccgatcgaagatcctctgcagccggatgtcaccggcatccggttgctctcacttggcgccggggaattcaaatcgcaagagcatgcaaagcataagggaccgaaagtcgagcgcgaccaagcagccaagcaccggttttcgtggatgaagctgttggcccataaagtcggtcgccatctctcgcaagacaccggatccccgagcggcatgcggccatgggaggacctgccgtcgcaggataccggtagtccttctcggatgcgcccgtggaaggatccaccgtcagacctgttgcttttgaaacagagcaactcttccaaaattctggtcggaagatggcatctggcctccgagaaggggtcatacgagatcatccaggacaccgacgaagatactgccgtaaacaactggttgatatcacctcagaacgcctcaagagcctggggggagagcacgccgcttgcgaataagcctggaaagcaatcgggtcacccgaagttcccacgggtgaggcacaagtccctgcaggtgcgccaggacggaggcaaaagccgccttaagaagtcgcagttcctcataaagacgcggaagaaaaagaaagaaaaacacacccatcacgcgccgttgtcaccccgaacctttcatccgctccggtcggaagcctacaacaccttttctgaaagacgcttgaagcactcattggttctccataagtccaatgaaacctcactgccaaccgacctgaaccagactctgccatcgatggactttggatggatcgcttcgctgccagaccacaaccagaatagctcgaacgataccggccaggccagctgtcccccagggctctaccagacggtgcccccagaggaacactaccaaactttccccattcaagaccccgaccagatgcattcgactagcgatccgtcccatcgcagctcgtcaccggagctgtctgagatgctcgaatacgatcggtcccacaagtccttcccaactgatatctcccagatgtcaccgtcctccgagcacgaagtgtggcagaccgtcatctcccctgacctcagccaagtcaccctgtccccggaactctcgcaaactaatctgtcccctgacctgtcgcacaccactttgtcgccagagctgatccagagaaacctgtcaccggctctcggtcaaatgccgatatcacccgacctcagccacacgacgctgtcaccggatcttagccacacgactctgagcctggatctgtcccagacgaacctcagcccggaactgagccaaacgaacctttccccggcacttggacaaatgcctttgagcccagacctttcccacactacgttgtcgctggacttcagccaaactaatttgagtccagaactgtcgcatatgaccctgtcgccagaactgtctcaaacgaatctctcaccagccctgggacagatgcctatctcgccagatctgtcacacacgaccctgtcccttgacttttcacaaaccaacctgtcacctgaactgtcgcagaccaatctgtcgcctgcacttggtcaaatgccactgagcccggaccctagccataccaccctttccttggacctctcccagaccaacctttcacctgagctgtctcaaactaacttgagcccggatctgagcgaaatgcccctgttcgcggatctctcacaaattcccctgacgccagatctcgaccagatgaccctctccccggatctgggcgagacggacttgtcacctaatttcggccagatgtccctctcaccagacttgagtcaggtgaccctctcgccggacatttcagacactactcttctgcctgacttgtcccagatcagccctcccccagacctcgatcaaatcttttacccgtcagagtcatcccagtccctcctgctgcaggagttcaacgagtcattcccctaccccgacctcggccagatgccgtccccgagctcgccgaccttgaatgacactttcttgtcgaaagagtttaatccactggtgatcgtcggtctgtccaaggatgggaccgactacatcgagatcatcccaaaggaggaggtgcagtcgagcgaggacgactacgccgaaatcgactacgtcccgtacgatgacccgtataagactgatgtgcgcactaatatcaactcctctcgcgacccggacaatattgcagcctggtacctgcgctccaacaatggaaaccggcggaattactacatcgccgcagaggagatttcctgggattactcggaattcgtgcagcgggaaaccgacatcgaggactccgatgacatcccggaagataccacgtataagaaagtcgtgtttaggaaatacctcgacagcactttcactaagcgtgaccctagaggtgaatacgaagaacacctgggaattcttggaccgatcatccgcgcggaggtggacgacgtgattcaggtgcgcttcaagaacttggccagcagaccttacagcctccacgcacatggactctcgtatgagaagtcgagcgaaggaaagacgtacgaggacgactccccggaatggtttaaggaagataacgcagtgcagccgaactcatcgtatacttacgtgtggcatgcgactgaacggtcgggaccggagtcaccagggtcggcgtgtagggcttgggcctactactccgctgtcaacccagaaaaagacattcactccggactcatcggacctttgctgatctgccagaaggggatccttcataaggattctaatatgccaatggacatgcgcgaattcgtcttgctctttatgaccttcgacgaaaagaaatcgtggtactacgaaaagaagtccaggtcgtcatggcggctcacttcatcagaaatgaagaagtcgcacgagttccatgcgatcaatgggatgatctacagcctgccagggctcaagatgtatgagcaagaatgggtcagactccatctgctcaacatcggaggaagccaagatatccacgtcgtgcatttccacggtcagactctgttggagaacggcaataagcagcatcaactcggagtgtggccgctgctcccaggatccttcaaaactctcgagatgaaggcgtccaaacccggatggtggctcctgaacactgaagtcggagaaaatcagagagccggtatgcagactcccttcttgatcatggaccgcgactgccggatgccgatgggactgagcaccggaatcatcagcgattcccaaatcaaggcgtcagaatttctgggatactgggaacctaggctggcccggttgaataacgggggttcctacaacgcctggagcgtggaaaaactcgccgcggagttcgcctcaaagccgtggattcaggtggacatgcagaaagaagtgatcatcaccggaatccagacccagggcgctaagcactatctcaagagttgttacaccactgagttttacgtggcgtattcgtccaaccagatcaattggcagattttcaagggaaattcgactcgcaatgtgatgtacttcaacggcaactcggatgcgtcgaccataaaggagaaccagtttgatcctcctatcgtggctaggtacattcggatctcaccgactcgggcctacaaccgcccgactctgagactggagctgcagggctgcgaagtcaacggatgctcgactccgctgggaatggagaatgggaaaatcgaaaacaagcaaattactgcctcgtcattcaaaaagtcttggtggggagactactgggagcccttccgagcgcgtctgaacgcccagggacgggtgaatgcatggcaagcgaaagccaacaataacaagcagtggcttgagattgacctgttgaagatcaagaagatcacggcaattatcacccagggttgcaaatccctttcatccgaaatgtatgtgaaatcgtacactatccactactcggaacagggtgtcgaatggaaaccgtacaggcttaagagcagcatggttgataagatcttcgaaggaaacaccaacactaaagggcacgtcaaaaactttttcaatccaccgatcatctccaggttcatccgcgtgatccctaagacttggaatcaatcaattgcactgcgcctggaactcttcggatgtgatatctac

SEQ ID NO: 2239 - DNA, 6672 bp, Artificial Sequence
  derived and/or modified sequence
atgttcccaggatgtcctaggttgtgggtccttgtggtgctgggcacctcgtgggtgggatggggcagccaagggactgaagccgcccagctccgacagttttatgtcgcagcacagggtataagctggagctaccgcccagaacctaccaactcctcgcttaacctttcggtcacctccttcaagaagattgtgtatagggaatacgaaccctactttaagaaagaaaagcctcaaagcaccatttccggtctgctgggaccaaccctgtacgcggaagtgggcgacataatcaaagtccatttcaagaataaggcagacaagccactttcgattcatcctcagggtattaggtactccaagctgtcagagggagcgtcctacctcgatcacaccttccccgcagaaaagatggatgatgcggtggcccctgggcgggaatacacctatgagtggagcattagcgaggactccggacctacccacgacgatcctccatgtctgactcacatctattactcccatgagaatcttatagaagatttcaacagcgggctgataggtcctcttctcatctgcaagaaaggaacccttacggagggtggaacccaaaagacctttgataaacaaatcgtgctcctctttgccgtctttgatgagtcgaaatcgtggtcacaatcgagctcgctcatgtacaccgttaatggatatgttaacggcaccatgcctgacatcaccgtgtgtgcacacgatcatatctcatggcatcttcttggaatgtcctccggccccgagcttttttcgatccatttcaatggacaggtgcttgaacaaaaccatcataaggtgtccgcaattaccctggtgagcgcaacctccactaccgcgaatatgacggtggggccagagggaaagtggataatcagctccctgacgccgaaacaccttcaagccggcatgcaagcctacatcgatatcaaaaactgcccaaagaaaacccgcaatctgaagaagatcactagggagcagcgtagacatatgaaaaggtgggagtacttcatcgccgcagaagaagtcatctgggattacgcacctgtgatcccagccaacatggataagaagtatagatcgcagcacctggacaactttagcaatcaaataggcaagcattacaaaaaagtcatgtacacccagtacgaagatgaatcgtttactaagcataccgtcaacccaaatatgaaggaagatgggatcctgggtccaattatcagagcacaagtgcgcgacactttgaagatagtgttcaaaaacatggcgtcgcgtccatactcgatttacccgcacggcgtgaccttcagcccatacgaagatgaggtaaattcctcttttacttcaggaaggaataacactatgatccgtgcggtgcaacctggtgaaacctacacttacaaatggaacatacttgagtttgacgaaccaactgagaacgatgcacaatgcctgacgcggccttactattccgacgtggacattatgagagacattgcatcgggactgataggactcctcctgatctgtaaatcgcggtcactggacagacgtggtattcaaagagctgcagacatagaacagcaggccgtgtttgcagtctttgatgaaaacaaatcttggtacttggaggacaatatcaacaagttttgtgagaaccctgatgaggtgaaaagggacgatccaaagttttacgaaagcaatatcatgtcgactattaacggttacgtccccgaatccatcaccactctgggattttgttttgacgatacggtgcaatggcatttttgttcagtcggaacgcagaacgaaattctgaccatacacttcactggacatagctttatctatgggaaacgccatgaagataccctgaccctgttcccaatgagaggagaatcggtgaccgtgactatggataatgtcggtacttggatgcttacctccatgaactcatcgccccgctccaaaaaactccgacttaagttcagggatgtcaagtgcattcccgacgatgatgaggattcatacgagatttttgagccaccggaatcgaccgtgatggctacgaggaagatgcatgaccgactggagcctgaagatgaagagtcggatgcggattacgattaccagaacagactggcagcagcattgggtatcaggtcatttagaaactcgagcttgaaccaggaggaagaagagtttaacctgacggcattggcactcgaaaatggtaccgagtttgtgtcatcgaacactgatatcatcgtgggaagcaattacagctcgccttcgaacatttcgaaattcactgtcaacaacctggccgagccccagaaggcgcctagccatcaacaggcaaccaccgcaggctcgcctttgcggcatctcatcggcaagaattccgtgctgaattcgtccaccgcagaacatagctcgccctactcggaagatcctattgaagatcctctccaacctgacgtgaccgggattagacttctctcacttggtgcaggagagtttaagtcgcaggaacatgccaagcacaaaggccccaaagtggagcgggatcaagcagccaaacatagattttcttggatgaagctcctcgcacacaaagtgggaaggcacctttcacaagatacgggctcacccagcggtatgcgaccttgggaggacctgccatcgcaggataccgggtcaccttctcgaatgcggccttggaaggatcctcccagcgaccttctccttcttaagcagtccaactcgagcaagattcttgtcggccgttggcatctcgcttcggagaagggaagctacgagatcattcaagataccgatgaggacaccgcggtgaacaactggctgatctcaccacaaaacgcatcaagagcttggggcgaatccacccctctggcaaacaagcctggcaagcagtcaggtcatccaaagttcccccgcgtgaggcataagtcccttcaagtgagacaagatggcggtaaatcgagactgaagaagtctcagtttctcattaagaccaggaagaaaaagaaggaaaagcatacccatcacgcgcctctttcaccacgcactttccaccctctgcggagcgaagcctacaatactttttccgaacgaagattgaagcattctctggtgctgcataagtcaaatgaaacctccttgcctactgatctgaaccaaactctgccatccatggattttggctggatagcctcccttcctgaccacaaccaaaattcgtccaacgataccggtcaggcctcgtgccctccaggactctaccagaccgtgcccccggaagagcattaccaaaccttccctattcaggatccggatcagatgcatagcacctccgacccatcgcatcgctcgtccagcccagaactttcggaaatgcttgagtatgatcggtcacacaagtcctttcccactgacatttcacaaatgtccccttcgtcggaacatgaggtgtggcaaactgtgatcagccccgatctgtcccaagtcacgctctcacctgagcttagtcagaccaacctttcaccagacctcagtcacacgaccctttccccagaacttattcagcggaatctgtcgcctgcactggggcaaatgcctatctcgccggatttgtctcacacgactctttccccagacctgtcacataccaccctgagcctggatctgagccagaccaacctgtccccagaactgagccagactaatttgtcgcccgccctcgggcagatgcccctctcgccagatctttcccacaccaccctgtcgctggattttagccaaactaatctgtcgccagaacttagccacatgactttgtcacccgaactctcgcagactaacctttcgccagcactgggccaaatgccaatttcgccggatcttagccacacgacgcttagcttggatttcagccagacgaacctctcacccgaactttctcaaaccaacctgtcacctgctcttggacaaatgcctttgtcgcctgaccctagccatactacgctttctcttgatctttcccagaccaatctctccccggagctctcacaaacgaaccttagcccggatctttccgagatgcctctttttgccgacttgtcgcaaatccccctcacgccagatcttgatcagatgaccctgtcgccagaccttggagagactgacctctccccaaatttcgggcagatgtcactttcacctgatctgtcacaggtgactctcagccctgatatttcggatactactctgcttccagatttgtctcagatcagcccacctccggacctggatcagatattctaccccagcgaaagctcccagtcactgctcctccaggaattcaacgaaagttttccataccctgatttgggccagatgccatctccttcgagcccaaccctgaatgatacttttctgtccaaggagtttaacccgctggttatcgtgggacttagcaaggatgggactgactacattgagatcatccctaaggaagaagtccagtcgtcagaggacgattacgccgagattgactatgtgccttacgatgatccttataagactgatgtgcgaacgaacatcaactcctccagggatccggataacattgcagcgtggtacctgcgatcgaacaatggtaatcgtagaaattactacattgcagcagaagaaatttcgtgggactactcggaattcgtccagcgggaaaccgatattgaggactcggatgacattccggaagatacgacgtacaagaaggttgtgtttagaaagtacttggacagcacgttcactaagagagatccaaggggagagtacgaggagcacctcggaatcctcggtccaatcattcgcgcagaagtcgatgacgtgatccaagttcgcttcaagaacctggcgagccgcccctactcccttcatgcacacggacttagctacgagaagtcgtctgaaggaaagacgtacgaggatgatagcccagagtggttcaaggaagataacgcagtccagccaaactcgtcgtacacctacgtctggcacgcaactgaacggtccggtcctgaatcccccggatcggcgtgcagagcctgggcatactacagcgcggtgaatccagagaaggacatacattccggactgattggtcccctcctcatatgtcagaagggaatactgcataaagatagcaatatgccaatggatatgagggaattcgtgctgctgtttatgacttttgatgagaaaaagtcatggtattacgaaaagaagtcccgttccagctggcggcttacttcatcggaaatgaaaaagtcccacgaatttcatgcgattaatggaatgatttactcgctgcctggactgaagatgtacgaacaggagtgggtgcgcctgcaccttctgaacataggaggaagtcaggatattcatgtggtgcactttcatggacagacgcttctggagaacggtaacaaacagcaccaacttggagtgtggccactcctccctggatcgtttaagactctggaaatgaaagcatcgaagcccggctggtggcttctcaataccgaagtcggggagaaccagcgcgcaggaatgcagactcccttccttatcatggaccgtgattgtcggatgcctatgggattgtcgacgggaataatcagcgactcccagataaaggcatcagagttcctggggtattgggaacctagacttgcccgacttaacaacggtggttcatacaatgcgtggtccgtggaaaagttggctgccgagtttgcatccaagccgtggattcaggttgatatgcagaaggaagtgatcattaccggcattcagactcaaggagccaagcattacctgaaatcatgctacactaccgagttttacgttgcatacagctcgaatcaaatcaattggcagatctttaaaggaaattcgactcgaaacgtgatgtacttcaacggcaactctgacgcatcgaccatcaaggagaaccaatttgacccgccaattgtggctcgctacataagaatttcaccaaccagagcgtacaacaggcctaccctgcgccttgaactccagggttgtgaagtcaacggatgttccaccccgctggggatggaaaacggtaagatcgaaaacaagcagataactgcctcatcgtttaagaagtcgtggtggggcgattactgggagccgtttagggcacgtctcaatgcacaaggaagagtcaacgcgtggcaagcaaaggcgaacaataacaagcaatggttggaaattgacctgctgaaaatcaagaagattactgcgatcattactcagggttgtaagtccctgtcctccgaaatgtacgtcaagtcgtacaccatccattacagcgagcagggagtcgagtggaaaccttacagactcaagagctccatggtggataagatttttgaaggcaataccaacactaagggacatgtcaaaaactttttcaacccacccatcattagtcgctttatccgtgtgatccctaagacttggaaccagtccatcgcactccgactcgaattgttcggatgcgacatctac

SEQ ID NO: 2240 - DNA, 6672 bp, Artificial Sequence
  derived and/or modified sequence
atgtttccgggttgtccccgtttgtgggtgttggtggtgttggggacctcctgggtcggttggggttcgcaaggaaccgaagccgctcagcttcgccagttctacgttgcagctcagggtatttcgtggtcctaccgccccgaacctaccaactcgtccctgaatctgagcgtgacttcctttaagaagatagtctacagagagtacgaaccttacttcaagaaggaaaaacctcagtcaactattagcggccttcttggccctaccctttacgcagaagtgggcgatatcattaaagtgcatttcaagaacaaggcagacaaacccctttcgatccatccacaaggaataagatacagcaagctcagcgaaggagcctcctacctggatcacaccttcccagcggagaagatggatgatgctgtggctcctggtcgagaatacacctacgagtggtccatcagcgaggactcaggacccactcatgatgatcccccttgtctgacccacatttactactcacatgaaaacctgattgaggactttaacagcggcctgattgggccactgctgatttgtaagaaggggactctcacggaaggaggtacgcaaaagacttttgataaacaaatagtgcttctctttgccgtctttgacgaatccaagtcctggtcacaatcctcaagcctgatgtacactgttaatggatacgtgaatggaacgatgcctgatataactgtgtgtgcacatgatcatattagctggcacctccttgggatgtcgtcaggacccgaactgttttccatccatttcaatggacaggtcctggaacaaaatcaccataaggtgagcgcaattacccttgtgtcggccacttctactaccgctaatatgactgtcgggccggaagggaaatggataatcagcagccttaccccaaagcatctccaagcaggtatgcaagcatacattgatatcaaaaactgcccgaagaaaaccaggaatcttaagaagattactcgagaacagagacggcacatgaagagatgggaatacttcatcgcggcagaagaggtgatttgggattacgcccctgtgataccagccaatatggacaaaaagtaccggtcacaacatcttgataacttctcgaatcaaataggtaaacattacaaaaaggttatgtacactcaatacgaggacgagagcttcaccaagcataccgtgaatcctaatatgaaggaagatggaatcctcggccctatcattcgggctcaagtccgagatactctcaaaatcgtgtttaagaatatggcatcacggccttactcaatctacccacacggtgtgacctttagcccatacgaagatgaagtcaactcgtcattcactagcggaagaaacaataccatgatacgagccgtgcagccaggagaaacctatacctacaagtggaatatactggagtttgatgagccaactgaaaacgacgcacagtgtttgactagaccatactactccgacgtggatatcatgagggatattgcgtcaggccttatcgggctcctgctgatatgtaagtccaggtcactggatagacgcggcattcagcgggcagccgacattgagcagcaggccgtctttgcagtctttgatgagaacaagtcatggtacttggaggataacattaacaagttttgcgagaaccctgatgaagtgaagcgagatgacccaaagttctacgaaagcaacattatgagcactattaacggatatgttcccgaaagcattaccaccctcggcttttgtttcgatgacactgtgcagtggcatttttgtagcgtggggacccagaatgagattctgactattcacttcaccggtcactcgttcatctacggaaagcggcacgaagatacccttaccctgtttcccatgagaggtgaatcggtgactgtgacgatggataacgtcggtacttggatgctgacgtccatgaactcatcgcctagaagcaagaagctgcgactgaagtttcgcgacgtcaaatgtattcctgatgacgatgaggattcctacgagatttttgagccaccagaatcaacggttatggcaaccaggaagatgcatgaccggcttgagccggaggatgaagaatcagatgcagattacgattaccagaatagactggccgcggccctgggcattagatcgttccggaattcctccctgaatcaagaagaagaggaattcaacctgactgcacttgcacttgagaatgggactgagtttgtgtcgtccaacactgatatcattgtgggttcgaactattcttccccatctaacatttcgaagtttaccgtgaacaacctcgcagaaccccaaaaggcaccttcacaccagcaagcaactaccgcaggatcgccgcttagacaccttattgggaaaaactcagtgcttaactcatccaccgcagaacattcgagcccctacagcgaggaccctattgaagatccgctccagcccgatgtcactggcatcagacttctgagccttggtgcgggagaattcaaatcacaagagcatgcgaaacataaagggcctaaggtcgagagggaccaagcagccaagcacagattttcgtggatgaagttgctcgctcacaaagtgggacgccacctgtcccaggacactggctccccttccggtatgcgcccttgggaggatctgccatcccaggataccggatcaccatcaagaatgcgtccttggaaagatcccccttctgatctgttgctgctgaaacaatctaactcgtccaagattctcgtggggcgatggcacttggcttcagaaaaaggatcttatgaaatcatacaggatacggatgaggacaccgcagtgaacaattggctgatctcccctcaaaacgcatccagggcatggggggaaagcactccccttgccaacaagccgggaaagcagtccggtcatcctaagtttccgagagtgcgtcacaagtcgctgcaggtccggcaagatggaggaaagtcacggctcaaaaagtcgcagtttctcattaagactaggaaaaagaagaaagaaaagcatactcatcacgcgccccttagcccacggactttccaccctctgaggtcggaggcctacaacactttctccgagcggagactgaagcacagccttgtgctccataaatcgaacgaaacctcgctccctactgacctgaatcaaacccttccatctatggactttggctggattgcctccctgcctgatcataaccaaaattccagcaacgacaccggacaagcatcgtgcccgccaggtctgtaccaaactgtgccgccagaggagcactaccaaacctttccaatacaagatccagatcaaatgcattcgaccagcgacccttcccatcgctcatcgtcgccagagctgtcggagatgttggaatacgaccggagccataaatcttttcctactgatattagccagatgtccccttcaagcgagcatgaagtctggcagaccgtgatttcgccggacctttcacaagtgaccctgtcaccagagctgtcacaaaccaatttgtcaccagacctttcccataccaccctgagccccgaactgatccaaaggaacctctcgccagccctggggcagatgccaatatcgcctgacctctctcacactacgctgtccccagatctgtctcatactacgctctctctcgacctttcccagaccaacctgagcccagaactgtcacagaccaacttgtcacccgctctgggccagatgcctctgtcgccggatctctcccatactacgctgtcgttggacttctcccagactaatctttcacccgagctgtcgcacatgactctgtcccctgaacttagccaaaccaacctttcgccagcgcttggccaaatgcccatttcacccgacctgtctcacaccactctttccctcgatttttcgcaaactaacttgtcgcccgaactctcgcagacgaacctgtcgcctgcgctcggacaaatgcctctctcgcctgacccctcgcatactaccctgagcctcgacctgtcacagactaacctttctcctgaactgtctcaaaccaatctgtcaccggacctcagcgagatgcctctcttcgcggatcttagccaaatccctctcactcctgacctggaccaaatgacgctctcgccagatcttggtgaaaccgatctgagcccgaattttggccaaatgtcgctgtcacctgacctttcccaagtgaccctttcccctgacatttcggacaccactctgctgccggatctgtcccaaatctccccgccaccagatctcgatcagatcttttacccatcagaaagcagccaaagcctccttctccaagaattcaacgaatcgtttccttaccctgacttgggacagatgccgagcccctcttcgcctacccttaatgatactttcctctcgaaagagttcaaccctctcgtgattgtggggctcagcaaggacggaaccgactatattgagataatacctaaggaagaagttcagagctcggaagatgattacgcagaaatcgattacgtgccatacgacgacccttacaaaaccgatgtgcgaactaacatcaattcgtcgcgtgatccagacaatatcgctgcatggtacttgcggtcaaacaacggtaaccgcagaaactactacatagcggccgaagagatctcgtgggattactcggagtttgtgcagcgggaaacggatatagaggatagcgatgatattccagaggataccacctacaagaaggtcgtgtttcggaaataccttgattcgacctttactaagcgcgatccccgcggcgaatatgaagaacatttgggcatacttggtccgatcataagagcggaagtggatgatgtcattcaagtccgctttaagaaccttgcgtcccgcccgtactccctccatgcacatggacttagctacgagaaatcctcggagggaaagacttatgaagatgattcccccgagtggtttaaggaggacaacgccgtccaaccaaattcatcgtacacttatgtgtggcatgcaaccgaacgctcaggtcctgaatcccctggatccgcatgtagagcatgggcctattactcagctgtgaatccggaaaaggatatacattcgggtcttattggacctcttttgatctgccaaaagggtatcttgcataaggattccaatatgccaatggacatgcgagagtttgtccttctctttatgacctttgacgaaaagaagtcgtggtactacgagaagaaaagccgctcctcctggcgtcttacctcatccgagatgaagaagtctcacgagtttcatgccataaatggtatgatttacagccttcctggacttaagatgtacgaacaggaatgggtcagactgcatcttttgaatattggcggatcccaggacatacatgtcgttcactttcatggtcagacgctgctggaaaatggcaacaaacagcaccagcttggagtgtggccacttctgccaggatcattcaaaactctggagatgaaggcgtcaaagcctggatggtggttgcttaacaccgaagtgggagaaaaccaaagggcggggatgcaaaccccatttctgatcatggaccgggattgtaggatgccaatgggactttccactggaattatctcggactcccagattaaggcatctgaattccttggttactgggaaccacggcttgcacggctcaataatggcggatcatataacgcatggagcgtggaaaagctggcagcagaatttgcatcgaagccctggatccaagtcgacatgcagaaggaagtgatcataacgggcattcaaacgcaaggtgcaaaacattatctgaagagctgttacaccacggagttttacgtggcctactcgtctaatcagattaactggcaaatcttcaagggtaatagcactcgtaacgttatgtactttaacgggaattcggacgcctcgactatcaaggagaatcaattcgatccaccaatcgtcgctaggtacattagaatttcacctacgcgggcctacaaccgacctacccttcgtctggaactccaaggatgcgaagtgaacggttgctccactcctcttgggatggaaaacggcaagatcgagaataagcagatcaccgcatcgtcgtttaagaaatcgtggtggggggattattgggaacctttccgtgcaagactcaacgcacagggtcgtgtcaacgcctggcaagcaaaggcaaacaataacaaacaatggcttgaaattgacctgctcaaaatcaagaagattaccgcaattatcacccagggttgtaaatcgctgtcgtcagaaatgtacgtgaaatcttacaccatccattactcggaacaaggggttgagtggaaaccgtatcgcctcaagtcgagcatggtggataagatttttgagggaaatacgaacacgaagggacatgtgaagaacttctttaacccgcccattatcagccgtttcatcagagttatcccaaaaacctggaaccagtcgattgccctcagactggaactctttggatgcgacatctac

SEQ ID NO: 2241 - DNA, 6672 bp, Artificial Sequence
  derived and/or modified sequence
atgttcccgggatgcccgcggctctgggttctggtggtcttggggacttcgtgggtggggtgggggtcccaaggaaccgaagcggcacaactgcggcagttctatgtcgccgcccagggcatctcctggtcctacaggccggaaccgactaattcgtcgctcaacctctccgtcacctcgtttaagaagattgtgtaccgcgagtacgaaccgtatttcaagaaggaaaaaccgcaaagcaccatttccggcctgctcggtccgaccctgtacgcagaggtgggggacataatcaaggtgcacttcaagaacaaggccgacaagccgctctcgatccacccccaggggatcagatactcaaagctctcggagggagccagctacctggaccacaccttccctgcggagaaaatggacgatgcggtggccccaggacgtgagtatacctacgagtggagcatttcggaagattccggtcctactcacgacgacccgccgtgcctgacccacatctactacagccacgaaaatctgatcgaagatttcaattccgggctgatcggacctttgctgatctgcaagaagggaacccttactgaaggcggtacccaaaaaactttcgacaagcagattgtgctgcttttcgcggtctttgatgaatccaaatcttggtcccaatcgtcctccctcatgtatactgtcaatggatacgtgaacggaactatgccagacatcactgtctgcgcccatgatcatatctcatggcatctgttggggatgtcctcgggcccggaactcttctcgatccactttaacggacaggtgctggaacagaatcatcacaaggtcagtgccatcacccttgtgagcgccacttcaaccaccgctaacatgaccgtcgggcctgaaggaaagtggataatcagttctctgaccccaaagcatctgcaggcaggaatgcaggcgtacatcgatatcaagaactgcccgaagaaaactcggaatctcaagaagatcacgagagaacagcgtagacatatgaagcgctgggaatacttcatcgctgcagaggaagtgatctgggactatgcgccagttatccctgccaacatggacaaaaagtatcgctcgcagcacctggacaatttcagcaaccaaataggcaagcactacaagaaggtgatgtacacccaatacgaggacgagtccttcacgaagcacactgtgaatccgaacatgaaagaggatggtatcctgggccctatcatcagagcccaagtgagagatactctgaagatcgtctttaagaatatggcctcaagaccctactccatctacccgcatggcgtgacgttttcgccctatgaggacgaagtgaacagctcgtttacctccggtcgcaacaacaccatgatcagagctgtccagccaggtgaaacttacacctacaagtggaacatcctcgaatttgatgagccaaccgagaacgacgcgcagtgtctgacccggccttactattcggacgtggacattatgagggacatcgcgtccggcttgatcggactgctgctgatctgtaagtcgagatcacttgacagacgcggcatccagagagcggctgacatcgaacagcaagctgtttttgcagtgttcgacgaaaacaagagctggtacctcgaggacaacatcaataagttttgcgagaacccggatgaggtgaaacgcgacgatcctaagttctacgaatccaatatcatgtccacgattaacgggtacgtcccggagagcatcaccaccctcggcttttgcttcgacgataccgtgcaatggcacttttgttccgtcgggacccaaaacgaaatcctgacgattcactttacgggccacagcttcatctacggtaagcgacatgaagatacgctcactcttttccctatgcgcggagaatctgtgactgtgacgatggacaacgtgggcacgtggatgcttacgtccatgaattcgtcgccgcggtcaaagaaacttcggctcaaatttcgggacgtgaagtgtatcccggacgatgacgaggattcctacgagatctttgagcctcccgagtccacggttatggctaccaggaaaatgcatgaccggctggaaccggaagatgaggaatccgacgcggactacgattaccagaatagactcgcagcagcattgggaatccggtcgttccggaactcaagcctcaaccaggaggaggaggagttcaatctgacggccctggccctggaaaacgggaccgagttcgtgtcatccaacaccgacatcattgtcggatccaattactcgtcgccgtcaaacattagcaagttcaccgtgaataacctggcagaaccacagaaggcgccgagccaccagcaggcaactaccgcaggaagcccgctgcgccatctcatcggaaaaaactcggttctgaactccagcactgctgagcactcgtctccttactcagaggacccgatcgaggatccgctgcaaccagacgtgaccgggatccggctgctgtccctcggcgctggggagttcaagtcacaggaacacgccaaacataaagggcccaaggtcgagagggaccaggcagcaaagcatagattttcctggatgaaactcctggcgcacaaagtcggacggcacctgagccaagataccggatcaccgtctggcatgcggccttgggaggatcttccaagccaggatactggttctccgagcagaatgcgcccgtggaaagacccaccatcggacttgctcctgctgaaacaatcgaacagctcgaagatccttgtggggcgctggcacctggcctcggaaaaaggttcgtacgaaatcatccaggatacggacgaggataccgccgtgaataactggttgatctccccgcagaacgcgagcagggcttggggtgaaagcactccactggccaacaagccaggcaagcagtcgggccatcctaagtttcctcgagtgcgccataagtcattgcaggtgcgccaagatggaggcaaatcacgactcaagaagagccagttcctgatcaagactaggaaaaagaaaaaggagaagcacactcaccacgctcccctctcaccgaggaccttccaccctctgcggagcgaggcctacaatactttttccgaacgacggctgaaacactcactcgtgctgcacaagtcgaacgaaacctctttgccaactgacctcaatcagactctcccatcgatggacttcggatggatcgcatcgctcccggatcacaatcaaaactcgagcaatgacactggccaagccagctgcccgccaggactgtaccagaccgtgccgcctgaagaacattaccagacctttccaatccaagatccagaccagatgcattccacttcggatccatcgcaccgctcttcgtcacctgaactctcagagatgctggaatacgatagatcccataagtctttcccaactgatattagccagatgtccccctcgtcggagcacgaagtgtggcagactgtgatctcgccagacctcagccaagtgaccctgtcccctgagctgtcgcaaaccaatctttcgcccgatctgagccatactaccctgagccccgaactgattcagcggaacctgtcgccggctctcggacagatgccgatctcccccgacctctcgcacaccactttgtcccccgacttgagtcacaccaccctgtcgctggatctgtcccagactaatctgagcccggagttgagccagacgaatttgtcacccgccctgggtcagatgcctctctcgccggatctttctcatactactctcagcctcgatttcagccagactaacttgtcgcctgaactgtcgcacatgactttgtcgccagaactgtcgcagactaatctttcccctgccctgggacagatgcccatctcccctgacctctcacacactaccttgtcgctcgacttcagccaaaccaacttgtcgccagagctgtcccagaccaacttgagcccagcgctcggacaaatgccactgagccctgatccttcccatacgaccctctccctggatctttcacaaaccaacctgagtccggagctcagtcaaacgaacctttcaccggatcttagcgaaatgccgctgttcgcggacctgtctcaaatcccgcttaccccggacctcgaccaaatgactctctcaccggatctgggagaaaccgacctctcccccaatttcggacagatgtcactctctccggacctgtcgcaggtcaccctctcgccggacatctctgatactactctgctcccggacctgagccaaatctctcctccaccggatttggaccagatcttctacccgtcggaaagctcgcaatctctgctgcttcaggaattcaatgagtcattcccataccctgacctgggtcaaatgccgagcccatcttccccaactctgaacgacacgttcctgtccaaagaattcaaccccctggtgattgtcggactgagtaaagacggcaccgattacatcgaaatcatccctaaggaggaagtgcagtcctccgaggatgactacgctgaaatcgattacgtgccctacgatgacccgtacaaaaccgacgtgcgcaccaacatcaactcgagtcgcgatccggacaacatcgccgcctggtaccttcgatcgaacaacggaaatcggcgcaactactacatcgcagcggaggagatctcgtgggattactccgaatttgtgcaacgcgaaactgacatcgaggattcagacgatattccagaagatactacctacaaaaaggtcgtgttcagaaagtacctggactcaaccttcaccaaaagagatccgcgaggcgaatacgaggagcacttgggcatcctgggaccgattattcgggcggaagtcgacgacgtgatccaagtacggttcaagaacctcgcgtcgaggccatacagcctccatgcgcacggccttagctacgagaagtcgtccgaaggaaagacttacgaagatgacagtccggaatggttcaaagaggacaacgccgtgcagccgaattcgtcatacacctacgtctggcacgctactgagaggtccggaccggaatccccaggctccgcgtgccgggcatgggcgtactactcagccgtgaacccagaaaaagacatccattcaggactgatcggacccctgctcatctgccagaagggaattctccacaaggactctaacatgccaatggatatgcgcgaatttgtgctgttgttcatgaccttcgacgagaagaaaagctggtactacgaaaagaagagccgctcgtcttggcggctgacttccagcgaaatgaaaaagtctcacgagttccatgcaatcaacggaatgatctactccttgccgggactgaaaatgtacgagcaagaatgggtgcgcctgcaccttctcaatattgggggaagtcaagacattcatgtcgtccatttccacggacaaaccctgcttgagaatggcaataagcaacatcagttgggtgtctggccgctgctcccggggagcttcaaaactctggagatgaaggcctcaaagccaggttggtggctccttaacacggaagtgggagaaaatcagagggccggtatgcaaaccccattcctgatcatggaccgcgattgtcgcatgcctatgggactttccactggcatcatatcggactctcagattaaagcatccgagtttctgggatactgggaaccacgcctggcccggctgaacaatgggggatcgtacaacgcttggtccgtcgagaagctcgccgccgagttcgcctcaaagccttggattcaggtggatatgcaaaaggaagtgatcatcaccggaatccagacgcagggcgcaaagcattacctgaagagctgttacactactgagttttacgtcgcctacagcagcaatcagatcaactggcagatcttcaaaggaaactccaccagaaacgtgatgtacttcaatggcaattcagacgccagcaccatcaaggaaaatcagttcgatccgccgatcgttgccagatacattcggatctctccgacgagagcgtataatcggccgactctccggctcgagctccagggatgcgaagtgaacggatgctcgactcctctgggtatggaaaatggaaagatagaaaacaagcaaatcactgccagctcattcaaaaagtcgtggtggggagactattgggaacctttccgggctcgcctgaacgcacagggacgcgtgaatgcgtggcaggccaaggccaacaataacaagcagtggctcgagatcgacctgctgaagatcaagaagattaccgctatcatcacgcagggttgcaagtcactcagctcggaaatgtacgtcaagtcgtacaccatccactattctgaacagggagttgagtggaagccttacaggctgaaatcatcgatggtggacaagatcttcgaaggaaacactaacaccaaaggccatgtgaaaaacttcttcaacccacccatcatctcacggttcataagagtcatcccgaaaacttggaatcagtccatagccctcaggctggaattgttcgggtgcgacatctac

SEQ ID NO: 2242 - DNA, 6672 bp, Artificial Sequence
  derived and/or modified sequence
atgtttcctggctgcccacgtctttgggtcctggtggtgctcggtacctcctgggtgggctggggatcgcaaggaaccgaagcagcacagctgagacaattctacgtcgcagctcaaggtatatcgtggtcatacaggcctgaaccaaccaattcctcgctgaatctgtcggtcacgtcgtttaagaagatagtgtaccgggagtacgagccatactttaagaaagaaaaaccccagtcgaccatttcgggtctgctgggacctacgctttacgcagaggtgggggacatcattaaggtgcacttcaaaaacaaggcagataagccactgtcaattcatccacagggaatccggtacagcaagctctcagagggtgcatcctacctggatcatacctttccagcagaaaagatggatgatgcagtggcccctggacgagaatacacttacgaatggtcaatttccgaagattccggaccaacgcacgatgatcctccttgtctgacccatatctactactcgcacgaaaacctcattgaggatttcaattcgggtcttattggacctctccttatttgtaagaagggaaccctgactgaaggtggaacccaaaagaccttcgataagcagattgtcctgctgttcgctgtgtttgatgaatcgaagtcctggagccaatcttcgtctcttatgtacaccgtgaatgggtacgtcaacggaactatgccggatatcactgtgtgcgcacatgatcatatatcctggcatctcctcggcatgagcagcgggccagaactgttttctattcactttaacggtcaggtcttggaacaaaaccaccacaaagtgtcggccattactctcgtgagtgccacctcaactaccgcaaacatgactgtgggacctgaagggaagtggattatctccagccttactccaaaacatctccaagccggaatgcaggcgtacatcgacattaagaactgccctaaaaagacccgcaacctcaagaagattactagagaacagcggcggcatatgaaacgctgggagtacttcattgcagcagaagaagttatttgggattacgcaccagtgattccagccaacatggacaagaagtaccgctcgcagcatcttgacaacttctctaatcagatcggaaaacattacaagaaggtgatgtacactcaatacgaggacgagtcgttcaccaaacataccgtgaacccgaacatgaaggaggacggcattcttggccccattatcagagcgcaggtccgcgacactcttaagattgtctttaagaacatggcgtccagaccttattcaatttaccctcatggagtgactttctccccttatgaagatgaggtgaatagctcattcactagcggaagaaacaatactatgatacgtgctgtgcagcctggtgaaacttatacctacaaatggaacattctcgaattcgacgagccgactgaaaacgatgcccagtgtcttacccggccatattactcagacgtggatatcatgagggatatagcctccggattgattggattgttgctgatctgtaagtcccggtcactggatcggagagggattcaacgcgcggcagatattgaacaacaggcggtgttcgcagtgtttgacgaaaacaaatcgtggtatcttgaagataacatcaacaaattctgcgagaaccccgacgaagtgaagagagatgatccaaagttttacgagtcgaacattatgtcaactatcaatggttacgtccccgaatccattactactctggggttttgttttgacgatactgttcaatggcatttttgttccgtggggacgcaaaacgagatccttactatacattttactggacattcattcatatacggtaagcgtcatgaagatacccttaccttgtttcctatgagaggagaatccgtgaccgtgaccatggataacgtgggtacctggatgttgacctcaatgaattcgtcacctcggagcaagaaattgcgccttaagtttcgtgacgtgaaatgtatcccagacgacgacgaagattcgtacgagatttttgaaccacctgaatcgactgtcatggcaactcgcaagatgcatgatcgactcgagcctgaggacgaagaaagcgatgctgactacgattaccaaaatcggcttgcagcagccctcggaattagatcgtttaggaacagctcgcttaatcaagaggaggaagagtttaacctcaccgcgctggccctcgaaaatggtacggagttcgtgtcgtccaacactgatatcattgtgggaagcaactactcctcgccaagcaacatatccaagtttacggtgaacaaccttgcagagcctcaaaaggcccctagccatcaacaggccaccaccgcgggatcacctttgagacatcttatcggaaaaaactcggtgttgaacagcagcaccgctgaacattctagcccttactctgaagatccaatagaagatcccttgcagcccgacgtgactggtattagacttctttctttgggggcaggcgaattcaaatcccaggaacatgcaaaacataagggaccaaaggtggagagagatcaagcagccaagcatagattttcatggatgaaactgctggcgcacaaggtgggacgccatctgtcccaggacaccggatcgccctcgggtatgaggccttgggaggacctgccctcgcaagataccggttcgcctagccgcatgcgcccttggaaggatcctccctccgatctgctgctcctcaagcaaagcaactcgagcaagatcctggtcggaagatggcacctggcatcggaaaagggatcctacgagatcatacaagatactgacgaggacaccgcagtcaataactggctgatttccccacaaaatgcttcgagagcatggggagaatcaactccgcttgcaaacaaacctggaaaacaatcagggcacccaaagttccccagggttcgccacaagagccttcaagtgagacaagatggagggaagtcgagactgaagaagagccaatttctgattaagacccgcaaaaagaaaaaggaaaagcatacgcatcacgcaccactttcccctcgtaccttccatcctctccggtcggaagcatacaataccttttcggaaagacgtctgaagcattcgctggtgcttcataagtcaaatgagacttcgcttcccaccgacctgaaccaaacccttccatcaatggattttggttggattgcatccctgcctgatcataaccagaattcatccaacgataccggtcaggcgtcgtgtcctcccggactttaccaaaccgtgccaccggaagaacattaccaaacctttcctattcaagaccctgatcagatgcacagcacttctgacccttcacacagaagctcgtcccccgagctgtcggaaatgctggagtacgatcggtcgcacaagtcctttccaactgatatttcacagatgagcccttcctcagaacacgaagtttggcagacggtgatttcgccagacctttcacaagtgacgctttccccagaactgtctcagaccaaccttagtccagatctcagccatacgactctgtcaccagagcttatacagcgtaatctgtcaccagcactcgggcaaatgccgatctccccagatttgtcacacactactctgagccccgacctgtcgcatactaccctctcactggacttgagccagactaacttgtcaccagaacttagccaaaccaatttgtctccagctttgggccagatgccactgtcgcctgatctgtcccacacgacgctgtccttggactttagccaaactaacttgtccccggagctgagccatatgaccctgtcgcccgagctgagccaaactaatctctcgcctgccctggggcaaatgcctataagcccagacctgtcacacaccactctgtcactggatttttcacagactaatctgtcgccagaactctcacagactaacctttcaccagcccttggacaaatgcctctttcaccagatccttcacacaccacccttagcctcgatctgtcccagactaacctcagccctgagctttcccaaacgaacttgtcacccgatctttccgagatgcctctgtttgccgacctcagccaaatccctctgactcctgaccttgatcagatgaccctgtcacctgatcttggcgagacggacctgtcaccgaactttggacaaatgtcgcttagccctgatctgtcacaggtgaccctctccccagacatttcagacaccactcttctcccggatcttagccaaatcagcccccctcctgatcttgaccaaatcttttacccttccgaatcgagccagagcttgcttctccaagagttcaatgaatcttttccgtaccccgatctcggtcaaatgccgtcaccatcgtcccctactttgaatgatacttttctgagtaaggaattcaacccccttgtgattgtgggtctgtcgaaagatgggacggactatattgaaatcatcccaaaggaagaagtgcagagcagtgaggatgactacgctgaaattgactacgtgccgtacgacgatccatacaaaactgatgtgagaactaacatcaattcctcgagagatcccgataacattgcagcctggtatctgcgctcgaataacggcaacaggcggaactactacatagccgccgaagaaatctcgtgggattacagcgagtttgtccaacgggaaactgatatcgaagatagcgacgacatcccagaggataccacgtacaaaaaagtggtctttagaaagtacctcgattccacctttaccaaacgggatcccagaggagagtacgaagaacatctgggaatcctcgggccaattatcagagcagaagtggatgatgttatccaggtacgcttcaagaatcttgcatcccgcccatatagcctccatgcacatggactctcctacgagaagagctcagaaggaaagacctacgaagatgactcccctgagtggtttaaggaggacaacgccgtccaacctaactcttcatacacttacgtgtggcacgcaactgagagatccgggcccgaatcgcctggctccgcatgccgagcgtgggcatactactccgcagtcaatcctgaaaaagatatacattcggggcttattggtccgcttctgatatgtcagaagggaatccttcacaaagattccaatatgcccatggatatgcgtgagtttgtcctcttgtttatgactttcgacgagaagaaatcgtggtactacgaaaagaagagcagatcatcatggcgccttacttccagcgaaatgaaaaagtcccacgagtttcatgcgatcaatggtatgatatacagtctcccaggcctgaagatgtacgagcaggagtgggtcaggctccatctgttgaacattggagggtcccaagacattcacgtggtgcattttcacggccaaactcttctggaaaatggaaacaaacaacaccaactgggggtgtggccgcttctgccaggctccttcaaaactctggagatgaaggcatcaaaaccaggttggtggctgcttaacacggaagtgggagaaaaccaaagagcgggaatgcaaacgcctttccttatcatggatagagactgccgaatgcctatggggctcagcactggaattatctccgactcccagattaaagcaagtgagtttctgggatactgggaaccaaggctggctaggctgaataatgggggatcgtacaacgcctggtccgtggaaaaactcgcggcagaatttgcgtcgaaaccttggatccaggtcgacatgcagaaggaagtgatcatcactggtatccagacccagggggccaagcactacttgaaatcgtgttacaccaccgagttttacgtcgcttactcgagcaatcagattaactggcaaatctttaaggggaattccaccagaaatgtcatgtacttcaatggtaactcggatgcaagcaccattaaagagaaccaatttgatccccctatcgttgccagatacattcgcatttcaccaaccagagcttacaaccgtccaacccttcgactggagctccaaggatgtgaagtcaacgggtgtagcactcctctgggtatggaaaatggcaagattgaaaacaaacagataaccgcatcgagcttcaagaagtcgtggtggggagactactgggaaccgttcagggcacgccttaatgcgcagggtagagtcaacgcttggcaggcaaaagccaacaacaacaaacaatggcttgaaattgacctgttgaagatcaagaaaatcactgcgatcatcacccaaggatgtaagtccctgtcatcagaaatgtacgtcaagtcatacaccatacactacagcgaacaaggagtggagtggaagccctacagactgaaatcatccatggtcgataagatattcgaagggaacaccaatactaagggacacgtcaagaatttctttaaccctcctatcatctcccggttcattcgtgtgatcccaaagacttggaaccaatcgattgcactgcgcctggaactgtttggttgtgacatttac

SEQ ID NO: 2243 - DNA, 6672 bp, Artificial Sequence
  derived and/or modified sequence
atgtttcctggctgccctaggctgtgggtgctcgtggtccttggtacctcatgggtcggatggggatcccagggcaccgaagcggcccaactgaggcagttctacgtcgccgcacagggaatcagttggtcttaccgccctgaaccgacgaacagctcattgaacctgtccgtgaccagctttaagaagatagtttaccgtgaatacgagccatactttaagaaggaaaagcctcaaagcactatttcgggtttgcttggtccaaccttgtacgcggaagtgggcgatatcattaaggtgcatttcaagaataaggcagataaaccgctgtcaatccatccccaaggtattcgttacagcaagctctctgaaggcgcgagctacctggaccacacttttccagcggaaaagatggatgacgctgttgctccgggccgggaatacacttacgaatggtccatatccgaggatagcgggcctacgcatgacgatcctccttgtcttactcacatatactactcgcacgagaatcttattgaagatttcaactcaggattgataggtcctctccttatttgtaagaagggaactcttactgaaggagggacgcaaaaaacctttgacaaacaaatcgtgctgctgtttgccgtctttgatgaatcgaaatcctggtcacaatcatcgagcctgatgtacacggtgaacgggtacgttaatggcaccatgccagacattaccgtctgtgcccatgatcatatttcctggcatctccttggaatgtcgtcgggacccgagctgttcagcatccatttcaacggtcaagtgctggagcaaaaccatcataaagtgtctgcaattaccttggtcagcgccacttccaccactgcaaatatgaccgtggggccggaaggtaaatggattatctcgtcactgactccaaagcacctgcaggcaggcatgcaggcatacattgacattaagaactgtccaaaaaagactcggaacctgaagaagattacccgcgaacagcgccgacacatgaaaagatgggagtacttcatcgcagcggaagaagtgatatgggactacgctcctgtcattcccgcaaacatggacaagaagtatagaagccagcaccttgataacttcagcaaccaaattggaaagcactacaagaaagtaatgtatacccagtacgaagatgagtcattcacgaaacacactgttaatccaaatatgaaggaagatggtatacttggaccaattatcagggcccaggtcagagacaccctgaaaattgtgtttaagaacatggcaagccgtccttactcgatctaccctcacggagtgactttttccccatacgaggacgaagtcaactcctcattcacctccggcagaaacaacaccatgataagggcagtgcagcctggagagacttacacctacaagtggaatatactcgaatttgatgaacccacggaaaacgatgctcaatgccttactagaccttactacagcgacgtcgacatcatgagagacatcgcttcaggactgattggactcctgcttatctgtaagtcccgcagtttggaccgccgggggattcaacgggccgccgatatcgaacaacaagctgtgttcgcagtgtttgacgaaaacaagagctggtacctggaagataacattaacaagttttgtgaaaaccctgatgaggtcaagagggatgatccgaagttttacgagtcgaacataatgtcgaccatcaatggttacgtccctgagtccatcactaccctgggattttgttttgatgataccgtccagtggcatttctgttcagtgggaactcagaacgagatcctcaccattcattttacgggtcactccttcatctacggcaaaagacatgaagataccctgactctttttcctatgaggggagagtcggtaactgtgaccatggataacgtgggtacctggatgcttacttcaatgaactcatcaccgagatccaaaaagctgagactgaaatttcgtgatgtaaaatgtattcctgatgatgatgaagattcatatgagatttttgaaccccctgaaagcaccgtgatggcaaccagaaaaatgcatgaccgccttgaaccagaggatgaagaaagcgatgcagactacgactaccaaaaccggcttgctgccgcgcttggaattagatccttccgcaattcctcactcaatcaagaagaagaggaattcaacctgaccgcgctcgcacttgagaatggaactgagtttgtctcttccaacaccgacattatcgtcggatcaaactactcaagcccttcaaacatttcgaagttcacggtgaacaacttggcagagccccagaaggcccccagccaccagcaagccactaccgcaggatcaccactccgacatctgattggtaaaaactcggtgcttaactcgagcactgcagaacatagcagcccatactcagaggaccccatcgaagatccacttcaacctgacgtgaccggtatacgcctgctgagcctcggggcaggcgagtttaagtcgcaggaacatgccaagcataaggggcctaaggttgaacgagatcaggcagcgaagcatagattttcctggatgaagctcttggcccacaaggtgggacggcatctgagccaagacaccgggtcgcccagcggaatgcggccgtgggaagatttgcccagccaggatacgggctccccctcaagaatgcgtccatggaaagacccgccctcagatctcctccttcttaagcagagcaactcgtccaaaattctcgttggacggtggcatctcgcctcggaaaagggttcgtatgagatcatccaggatactgatgaagatactgccgtgaataactggctgatctcgccacaaaatgcatcgagagcatggggcgaatcaaccccattggcaaataagccaggaaagcagagcggccacccgaaatttcctagagtgcgccataagtcgctgcaagtgcggcaggacgggggaaagtcgcggttgaagaagtcccagtttctcattaagacccggaagaagaaaaaggaaaagcatacccatcacgcaccactgtcgccacgaaccttccatcctctccgtagcgaggcgtacaatactttttcagaacggcgacttaagcattccctcgtcttgcataagagcaacgaaacgagccttccaacggatttgaaccaaaccctgccttccatggattttggctggatcgcctcccttcctgatcataaccaaaactcatctaacgacaccgggcaagccagctgtcctccgggcctttaccaaaccgtccctccggaagagcactaccaaaccttcccaattcaagatccggatcaaatgcactctactagcgatccctcacataggtcctcttcacccgaactttccgaaatgctggaatacgacagatcccataaatcgtttcccactgatatctcgcaaatgagcccatcctccgaacatgaggtgtggcagaccgtgatttcgccagatctttctcaagtcactctgagtcccgaactgtcacaaactaacctttcccctgacttgtctcacaccaccctcagtcccgaacttatccagcgcaacctttcgccagctctgggtcagatgccaatctcgcctgacctgagccacaccaccctttcgcctgaccttagccatactactctgtcacttgacttgtcgcagactaatctgtctcccgagctgtcccagacgaacctctcccccgcactcggacaaatgccactttcgccggacctgtctcataccaccctgtccctggatttttcgcaaactaacctgtcgccagagctttcccatatgacgctgtcgccagaactctcgcaaactaatcttagcccagcactgggacagatgcccattagtcctgacctgtcgcataccactctgtcattggacttcagccagaccaacttgtcccctgagctctcccagactaaccttagccccgcacttggccaaatgcctttgtcgccagacccttcccataccaccctctcgctcgacctgtcccaaactaatctctcccctgaacttagtcaaacgaatcttagtccagacctgtccgagatgcctctttttgccgatctgtcgcagatacccttgaccccagacctggatcaaatgacgcttagccctgacctgggtgaaaccgacctgtccccaaatttcggtcaaatgtcgctgtcaccagacctctcgcaggtgaccctttcgccagacatatcagatactactctgcttccggatctttcccaaatatcccctccgcctgatctggatcaaatcttttacccgtcggagtcctcgcagtccctcctgctgcaggaattcaacgaaagttttccatatcctgatctcggccaaatgccaagcccttcctcccctacgctcaatgatacctttctgtcgaaagagttcaacccgcttgttattgtcggactctcgaaagatgggactgattacattgagattattccgaaagaggaagtgcagagcagcgaggatgattacgcagaaattgattatgtgccctatgatgacccttacaaaaccgacgtgcgtactaacattaacagctcgcgggatcctgataacattgccgcatggtaccttagaagcaacaatggtaatcgaagaaattactacatcgcagctgaagagatctcgtgggattacagcgaattcgtccaacgtgaaaccgacatcgaggacagcgacgatattccagaggatactacttacaagaaggtcgtttttcgcaagtaccttgattccacctttacgaagcgggatcctagaggggaatatgaggaacaccttggtattctgggacccattatccgcgcagaagtggacgacgtcatccaagtgcggttcaagaatcttgcatcacggccttactcgcttcacgcgcacggtctttcctacgagaagtcctcggagggaaagacttacgaagatgattcacctgaatggtttaaggaagataatgcggtccagcctaactcctcgtatacctacgtgtggcatgcaactgaaagatcgggtccagaatcgccaggctccgcatgccgggcatgggcctactactccgcagtgaaccccgaaaaggatattcactcaggcttgatcggtccgcttctcatctgtcaaaagggaattctgcacaaagattcgaatatgccaatggatatgcgtgagtttgtcctgctgtttatgactttcgacgagaagaaatcatggtactacgagaaaaagagtagatcttcgtggcgactgacttcatctgaaatgaaaaagtcgcacgaatttcatgccattaatggtatgatttactccctgccgggtctgaagatgtatgaacaagaatgggtgaggcttcacctcttgaatatcggcggatcccaagacattcatgtggtgcattttcatgggcaaactctgcttgagaatggcaataagcaacatcaacttggagtgtggcctctgttgccaggatcattcaaaactctggagatgaaggcatcaaaacccggttggtggctcctgaacacggaagtgggagagaatcaacgcgctggtatgcagacgccttttctcattatggatagagattgtcgcatgcctatggggctttctaccggaatcatctccgattcgcagataaaagcaagtgaatttctcgggtactgggaaccacgacttgccagactcaataatggaggttcctacaatgcgtggagcgtcgagaagctggcggcagaattcgcatcgaagccttggattcaagttgatatgcaaaaggaggtgattatcactgggatccaaactcagggtgcaaagcattacctgaagagttgctacaccaccgagttttacgtggcgtactcctcgaatcagattaactggcagattttcaaaggaaacagcacccggaatgtgatgtacttcaacggaaactccgatgcttccactattaaggagaaccagttcgaccctcccattgtggcaaggtacatcaggattagcccaacccgagcatacaacaggcctactctgcgactcgaactgcagggctgcgaggtgaacggctgcagcaccccactgggaatggagaacgggaagattgaaaacaagcagattaccgcatcgtcatttaagaagtcctggtggggtgactactgggagccttttcgagcaagactcaatgcacagggaagagtcaacgcctggcaagcgaaggccaacaacaataagcaatggctggaaatagatctcctgaaaatcaagaaaatcaccgccatcattacccagggatgtaagtcgttgtcgagcgaaatgtacgtgaaatcctacaccattcactactcggaacaaggagtagaatggaaaccctacagactgaaatcctcaatggtcgataagatatttgaagggaatactaatacgaagggtcacgtgaagaatttctttaacccacccattatctccagatttatccgtgtgattcccaagacctggaaccagtcgatcgcattgaggttggaactctttggttgcgacatatat

SEQ ID NO: 2244 - DNA, 6672 bp, Artificial Sequence
  derived and/or modified sequence
atgttccctggctgtccccgcctttgggtgctcgtggtgttgggtacatcttgggtgggctggggctcacaagggaccgaagctgcccagttgcgtcagttctacgtagcggcccagggcatttcctggtcctacagaccagaaccgaccaactcgtcattgaatctatctgtcacctcgtttaagaaaattgtttatcgagagtacgaaccctatttcaaaaaggaaaaaccccagagtaccatttccggcctgctcggcccaacattgtatgccgaagtcggcgatattataaaggtacacttcaaaaataaggctgataagccccttagcatccatccccaaggaatcaggtactcgaaactgtcagagggcgcttcctacctggaccatactttccctgccgaaaaaatggacgacgccgtcgctcctggtagagaatatacttacgagtggtcaatctcggaggatagcgggcccacccatgacgatccaccttgtttgacccacatttattactcacacgaaaacctgatagaggactttaattctggtctgatcgggccacttctcatctgtaagaaggggactctgacagaaggaggcacccagaagacgttcgacaagcaaatcgtgttgctttttgcggtgttcgatgagagtaagagttggtctcagtcctcatcgctcatgtatactgtcaatggctacgtgaacgggacaatgccggatattacagtctgcgcccacgatcatatttcttggcatctactcgggatgtcttcaggcccggaattgtttagcattcattttaatggccaggtcctcgaacaaaatcaccacaaagtttccgccatcaccctggtgtccgcaacatctaccactgcaaacatgacggtgggcccagagggtaaatggattattagcagtctcacaccgaaacatctgcaagctggcatgcaagcctacatcgacatcaagaattgtccaaagaaaaccagaaatctcaagaagattacaagagagcaacgtcgacacatgaaacgatgggagtactttattgcagcagaagaagtgatctgggactatgccccagtgataccagcgaatatggataagaaatacaggtcccagcacttggacaattttagtaatcaaataggtaaacactataaaaaagtgatgtacacacagtacgaggacgaaagcttcacaaagcacaccgttaacccaaacatgaaggaggacggcattctcggacctatcattcgagcacaggtgcgagatacactgaagatagttttcaaaaatatggctagtagaccctattctatttatcctcatggggtgactttctcgccctacgaggatgaggtaaatagctctttcacctccggaaggaataacaccatgatccgagccgtgcagcctggagagacctatacttacaagtggaacatcttggagtttgatgaacccacagaaaatgatgcacagtgtttaactcgaccgtattatagcgatgtcgacataatgcgagatatagcctccggactgattggtcttttactgatctgtaagagtcgatccctcgatcgaagaggcatccagcgcgccgccgacatcgagcaacaggccgtcttcgcagtgttcgatgaaaacaagagctggtacctcgaagacaatattaacaaattttgtgaaaatcctgacgaagttaagcgggacgaccctaaattctatgaatctaatataatgagcactataaatgggtatgtgcctgagagcatcactacactggggttttgcttcgacgatactgtgcaatggcacttctgttccgttggaacccagaatgagatccttaccatccacttcactgggcactccttcatctacgggaagcgacacgaagacacattaaccctcttcccaatgagaggtgaatctgtgactgtaaccatggataacgtaggcacgtggatgctgacttctatgaactcttccccacgatcgaagaaactccgactaaaattccgagatgtcaaatgtattcctgacgacgacgaagactcctatgaaatcttcgagccccctgaaagcacagtgatggccactcgcaaaatgcacgacagactcgagcccgaggacgaggaaagtgacgccgactatgactatcagaatagactagccgccgctctgggcatcaggtcttttcgaaattcatcactgaatcaggaagaggaagagttcaacctcaccgccctcgcgttagagaatggtacggagttcgtctcttctaatactgatatcattgtggggagtaactacagttctcctagcaatatctccaaatttaccgtcaataacctggcagaacctcagaaggcgccatctcatcaacaagccactactgcaggcagccctctaaggcacctcatcggaaagaactccgtgcttaactcgagtacagcagaacactcaagcccttatagtgaagacccaattgaggacccattgcagcccgatgtaacaggtattcgactgctgtctctgggcgcaggcgaatttaaatctcaagagcacgcgaagcacaagggtcccaaggtggagcgggatcaggcagctaagcatagatttagctggatgaaactcctggcccacaaggtcggtaggcacctcagtcaagacacgggtagtccttctgggatgaggccttgggaagacctcccttcccaggacactgggtcacccagccgaatgagaccttggaaagatccacccagcgacctgttgctgctcaaacagagtaacagctctaagatcttggttgggcgatggcacctcgccagcgagaaaggcagctacgaaatcattcaggatactgatgaggatacagccgtgaataattggctcatttctccacagaatgcgtccagagcatggggggagagtacccctttggccaacaaacccgggaaacagtctggccaccccaaattcccgagagtgcgacataaaagcttacaggtgaggcaggatggcggcaagtcacgactgaaaaagtctcagttcctcatcaaaaccaggaaaaaaaaaaaggagaaacatactcaccatgccccactctcccccagaaccttccatcccctgaggagcgaggcttacaacaccttctcagagagacgattgaaacatagcttggtgctccataaatctaacgaaaccagccttcctacagacctgaaccaaacacttccaagtatggacttcggctggatcgctagcttgcctgatcacaaccagaattctagtaacgacaccgggcaggcatcatgccctcctggtctctaccagaccgtcccgccggaggaacattaccagacattcccaattcaagatcccgaccagatgcattccacttcagatccaagccaccgatcatcgtctcccgagttgtcagaaatgctggaatacgatcgttcccacaaatctttccccacggatatatctcagatgtcaccatcatctgagcacgaagtatggcagacagtgatttctcctgatctaagccaggtgacgctttcccctgaactctctcagacaaatctcagtccagatctgtctcatacaaccttgagccctgaactcatccaacgaaatttgtcaccagctcttgggcagatgccaatatccccagacctgtcccacacaacactgagccccgatctatctcatacaacattgtctctggacttgagccagacaaacttgtctcctgagctgtcccaaacaaatttgagcccagccctgggccagatgccactgtcccccgatttaagtcacacaacactctcgctggacttctcccagactaatctttcaccagagctcagccatatgaccctctccccagagctgtctcaaactaacctgtccccggccctaggacagatgcccatcagcccggatctctcacacactactctgtctctcgattttagccagaccaacctgagtcctgagctgtctcagactaacctgagtcctgccctgggccagatgcccttatcacccgatccctcccacaccactctgtcactggacctctctcagacaaacctttcccctgaactgagtcagactaacttaagtccagatctttctgaaatgcccctgtttgcggacctgtcccagataccgctcactcccgatctggaccagatgaccctgtctccagacctgggggaaaccgatctgagccccaacttcgggcagatgagtttatccccagatttgagtcaggtgacgctgagcccagacatctctgacaccaccttgctcccagacctctctcagatcagcccaccccccgacctagatcaaatcttttacccaagtgagtcttcccagtcactgttgctccaggagttcaatgagagcttcccatatccagacctcggccagatgccatcaccgtcctctcccacactaaacgacactttcttaagtaaagaattcaaccctctggtgattgtgggtttgagtaaagatggcacagactacatcgagattatcccgaaagaagaagtgcaaagctccgaggatgattacgcagagatcgactatgtcccctatgatgacccgtataaaactgatgtgaggaccaacattaactccagcagggatcccgataacattgcagcttggtacctgaggagcaacaatgggaaccgaagaaactattatatcgcagccgaagagatcagctgggactattcagaatttgttcagagggagactgacatcgaagatagtgatgatatccccgaggacactacctataagaaggtggtgtttagaaagtacttggattctacgtttactaagagagatccacgaggtgaatatgaggaacacctgggcatcctgggccccataatacgtgcggaggtagacgacgtgatccaagtgcgatttaagaacttggccagcagaccctattccctacatgcacatggcctctcttatgagaaatcttccgaagggaaaacctatgaggatgatagccctgagtggttcaaggaggataatgctgtacagcctaatagtagttacacctatgtctggcacgccactgaaaggtccggccccgagagccccggcagtgcatgcagagcctgggcctactattcagcagtgaatcccgaaaaggatattcattcgggtctgattgggcctctactgatatgtcagaaggggatactccacaaagattccaatatgcccatggacatgagagagtttgtgctgctctttatgaccttcgatgaaaagaagagctggtattacgagaaaaaaagtcgatcttcctggaggttgacgtcgtccgagatgaaaaagtctcacgagtttcacgccataaatggcatgatctactccttgccgggtctgaaaatgtatgaacaggaatgggtaaggctacacctgctgaatatcggaggcagtcaggatatccacgttgtgcacttccacggacagactctgctggaaaacggaaacaagcagcaccagcttggcgtgtggccccttttgccagggtcttttaaaaccttagaaatgaaggcatcaaagcctggatggtggctcctcaacacagaggttggcgagaaccagcgagcaggcatgcaaaccccttttctcataatggaccgagactgccgaatgccaatgggattgtcaaccggcatcatcagcgactcccaaatcaaagcctcagagttccttgggtattgggaaccaagacttgccaggttgaataacggcggttcttacaacgcatggtcagtggagaagctcgctgcagagttcgcaagcaaaccctggatccaggtggatatgcagaaggaagttattatcaccggaattcagacccagggtgcgaagcactacttaaagtcttgctataccactgaattttatgtggcctacagctctaaccagatcaactggcaaatcttcaagggaaatagcaccaggaatgtgatgtactttaatggtaactctgacgcctctaccattaaggaaaaccagtttgacccaccaatcgtcgcccgctacatcaggatctcccccacaagggcctataaccgaccgaccctcagactcgagttacaaggttgtgaagtgaatggatgctcaacccccctcggtatggaaaacggtaaaattgaaaataagcagatcactgcctcctcatttaagaagtcgtggtggggggactattgggagcctttcagggctaggttgaatgcgcaaggccgagtgaacgcctggcaagctaaggctaataacaacaagcaatggttagagatcgatctcctgaagattaaaaagattaccgcaataattactcagggttgtaaaagcctcagttccgagatgtacgtcaagtcctacactatccattactcagaacagggagtcgagtggaagccatacaggctgaagagctcaatggtggacaaaatcttcgaggggaacaccaacaccaagggccacgtaaaaaacttcttcaaccctccaatcatctctagatttattcgagtgatccctaagacttggaaccagtctatcgctttgagactggagctgtttggatgtgatatctac

SEQ ID NO: 2245 - DNA, 6672 bp, Artificial Sequence
  derived and/or modified sequence
atgttcccaggctgtcctcggctttgggtgttagtggtgctgggaacatcctgggtaggctggggatcccagggaaccgaggcagctcagctgaggcagttctacgtggccgcccagggcatatcttggtcttatcgtccagaaccaaccaacagttcactgaatctgtctgtcacctcctttaagaaaatagtatacagggagtacgaaccttactttaagaaagaaaagcctcagtctaccataagtgggttattagggcctacactgtacgctgaggtaggcgatatcatcaaagtgcacttcaagaacaaggctgataagcccctgagcatccatccacagggcattagatacagcaagttgtccgaaggagcatcctacctggatcataccttcccagccgagaagatggacgacgccgtcgctcctggccgggagtatacttatgagtggtccatcagcgaggatagcggccctactcacgacgaccccccttgcctcacccacatatactatagtcatgagaacctaatcgaggatttcaacagtgggctaataggcccccttctgatctgcaagaaggggacattaacagagggcggaacacagaaaacctttgacaagcaaattgtgctgctgttcgcagtttttgatgagtccaagtcttggtctcagagctcctcacttatgtacacagttaacggctacgtcaatggcacaatgcctgacattaccgtgtgtgctcacgatcatatcagttggcacctgctcggtatgtcatccgggcccgaactgtttagtatccattttaatggccaggtgctagaacaaaatcaccacaaggtgtcagctatcactcttgtgtcagctacatctacaactgctaatatgaccgtgggccccgagggcaagtggataatctcttccctaacccctaagcacctccaggccgggatgcaggcttacatagacattaagaactgtcctaaaaagactcggaatctgaaaaagatcaccagggaacagaggcgccacatgaagcggtgggagtattttatcgccgctgaggaggtgatatgggattatgctcccgttattccagcaaacatggacaagaaatacagatcacaacacctggataactttagtaaccagatcggcaaacattacaagaaggtgatgtacacccagtatgaagacgaatccttcacaaagcatactgttaaccccaacatgaaagaagacggtatcctcgggccaattattcgcgcccaagtcagggataccttaaagatagttttcaagaatatggcctctagaccttacagtatctacccacatggcgtgaccttcagcccatatgaggatgaagtgaattcttctttcactagcggccggaataatactatgattcgggccgtgcagcccggggagacctatacatataagtggaacatactcgagttcgacgagcccactgagaacgacgcacagtgtctgactcgcccttactattccgacgtcgatataatgagggatatagcctccggcctgattgggttgctgctcatctgtaaaagccgcagcttagaccgtagaggcatacaacgtgccgcagacatagaacagcaggccgtgttcgccgtgtttgacgaaaataaaagctggtatctggaagacaacatcaacaaattttgtgaaaatcctgacgaggtcaagcgcgacgatcctaaattttatgagtccaatatcatgagtaccattaatgggtacgttcctgagtccataaccactctgggcttctgtttcgacgatactgtgcaatggcacttctgcagcgtgggaacccagaatgagatcctgactatacactttactggacactcttttatttatggaaagcggcacgaagacacattgacactctttcctatgcggggtgaaagtgtgaccgtcaccatggataacgttggcacctggatgctcacatctatgaatagctccccacgtagcaaaaagctgcgcttaaaattccgggacgtgaagtgtattcccgacgatgatgaggacagttacgaaatcttcgaaccacctgaatctaccgtgatggccacccgcaaaatgcacgacaggttagagcctgaggatgaggaatccgatgccgattatgattaccaaaataggctggccgctgccttaggaattagatccttcagaaacagttctctcaatcaggaggaagaagagttcaacctaaccgctctagcactggagaacggaacagagtttgtcagcagcaacaccgatattatagttggttccaactactctagtcccagcaacatctctaagtttacagtgaataacttagcagagcctcagaaggctccctcacaccaacaggccactaccgcaggcagcccactgaggcacttaatcgggaaaaactccgttcttaactccagtaccgctgaacattctagtccttattcagaagaccctattgaagaccccctccaacctgacgtgacaggcataaggctcctgtcactgggtgccggcgaattcaagtcccaggaacacgcaaagcacaagggtcccaaggtcgaaagggaccaggccgccaaacaccggttctcctggatgaaactcctcgcccacaaagtcggccgccacctaagccaagataccggttctccaagtggaatgaggccatgggaagacctgccatctcaggatacaggctctccctcccggatgcgaccttggaaagaccctcctagcgacctcctgctactgaaacaatctaattcttccaagatccttgtggggcgctggcatctggctagcgaaaaaggctcatacgagatcatccaggataccgacgaagacactgccgtgaacaactggttaataagccctcaaaatgcctcccgcgcatggggtgaatctacccctttagccaacaaaccaggcaagcaaagtggccatcccaagttccccagggttaggcacaagtccctgcaggtcagacaggacggaggcaagagtcgactcaagaagagtcagttcctgattaagactcggaagaagaaaaaagagaaacatacccatcacgccccactatcaccacggaccttccatcctctgcgatccgaggcctacaataccttttccgagagaagattaaagcacagtctggtactacataagagcaatgaaacttccttaccaaccgatctcaatcagaccttaccctccatggacttcggctggatagcttccctgccagaccacaaccagaacagtagcaatgatacaggccaagcttcctgtccaccaggcctgtatcagactgtccccccagaagagcactatcagaccttccccattcaggatcctgatcaaatgcatagtacatctgatccttcccaccgctctagctcccccgaactgtcagagatgctagagtacgatagatcccacaagtcctttccaacagatataagccagatgtcaccaagttctgagcacgaggtgtggcaaaccgtgatcagtcctgatctaagtcaggtcaccctctctcctgaactgtcacaaactaatttgagtcctgacctgagccataccacattatctcctgagctgattcaacgcaacctctctcccgcccttggacagatgcccatcagcccagacttgtcccatactacactgagtccagatctgagccacaccactctgtcactagacctgtcccaaactaatctgtccccagaattgagccagaccaacctcagtccagccttgggtcaaatgccactctcccccgatctgagtcacaccacactttcccttgattttagccaaacaaacttatcccctgagctgtcccacatgaccctgagcccagaactctcccagaccaatctgtctcctgccctggggcaaatgcctatctctcctgacttgtctcacactacactgagcctcgacttttcccagaccaatctgagccctgaactcagccaaaccaatctgagtccagccctgggccagatgcctctgagtcccgatccctctcataccaccctgagtttagacttgtcccaaacaaacctgagtcctgagctgtctcagaccaacttaagccccgatcttagcgaaatgcccctgttcgctgacctgtctcagatcccactaacccccgatctggaccagatgactttaagtcctgatcttggcgagacagatcttagccccaattttggccagatgtcactgtcccctgatctaagtcaggtgaccctgtctcccgacattagcgatacaaccctcctgcccgacctgtctcagatatccccaccacccgatttggaccagattttctatcctagtgaaagctcccagagcttactcctgcaggagtttaatgagtctttcccatatccagacctgggacaaatgcccagcccaagtagccctactctgaatgatacattcctgtctaaagaatttaaccccttagttattgttggcctgtcaaaggatggcacagactatatcgagattatcccaaaggaggaagttcagtcaagtgaggacgactatgctgagatcgattacgtgccctacgacgacccatataagactgacgtccggaccaacatcaattcttccagggaccctgacaatatcgctgcctggtacctgcgatccaataacggcaacaggcgcaattactacatcgccgccgaagaaatttcctgggactactccgaatttgttcaacgcgagaccgatatcgaggatagcgatgacattcccgaagatacaacctataaaaaggtcgtgtttcggaagtatctggactccaccttcacaaagcgtgacccacggggggagtatgaagagcacctaggcatactggggccaatcattcgggcagaggtggacgacgttatccaggtcaggttcaagaatcttgcttctcggccctacagcctgcacgcccatggcctgagctacgagaaaagttctgagggcaaaacatacgaagacgattccccagaatggtttaaagaagataacgccgtgcagcccaactcaagttacacctatgtgtggcatgctaccgaacgaagtggccctgaaagtccaggcagtgcatgccgggcttgggcctactacagtgccgttaacccagaaaaagatattcattccggactgattggtcctctgctgatttgtcagaagggcatcctgcataaagatagcaatatgccaatggatatgagagagttcgtgctactgttcatgacctttgacgagaaaaagtcctggtactacgagaaaaagagccggtcctcatggcgactgacatcctctgagatgaaaaagtcccacgagttccatgcaataaacggcatgatatactcattgcctggcctgaaaatgtacgagcaagagtgggtgcgtctgcatctcctgaatatagggggctctcaggatattcatgtggttcacttccacggtcagactttgctcgagaatggaaataagcagcaccaactaggggtttggccactcctccctggaagctttaagaccctcgagatgaaagcctctaagcctgggtggtggctactgaatacagaggtgggtgaaaaccaacgcgccggcatgcaaaccccttttttaataatggaccgggattgcagaatgcctatggggctatctaccggaatcatcagtgacagtcaaattaaagctagtgagttcctaggatactgggaacctcgtctggccaggctaaacaatggcgggagttacaatgcttggtccgtggagaaactcgccgccgaatttgcatctaagccttggatacaagtggatatgcagaaggaagttatcataaccggcatacagacccagggcgctaaacactatctaaagagttgctacaccacagagttttatgtggcttactcttctaaccagattaattggcaaatctttaaagggaattctaccagaaatgtgatgtattttaacggcaactcagatgcatccaccataaaagagaaccagttcgacccacctatcgttgccaggtatatacgcattagtcccaccagagcctataacagaccaactctgcgcttggagctgcaaggctgtgaggtgaacggctgctctactccactgggcatggagaatggcaagatagaaaacaaacagatcactgcttcttctttcaagaaatcatggtggggggactattgggaacctttccgggctcgcttaaatgctcaaggccgcgtgaatgcttggcaggctaaggccaataataataaacagtggctagaaattgatctgctgaaaataaagaagattaccgccattattacccagggctgcaaatccctatcaagtgagatgtatgtcaagagttacaccatacactatagcgagcaaggtgtagagtggaaaccctaccggctgaagagcagtatggtggacaagatattcgagggaaataccaatactaaaggacacgtcaagaacttcttcaatccaccaattatatctcgctttatacgggttatccccaaaacttggaatcaaagtatcgcactgagactggagctgtttggatgcgacatttat

SEQ ID NO: 2246 - DNA, 6672 bp, Artificial Sequence
  derived and/or modified sequence
atgttcccaggctgtccgcgactttgggtgcttgtcgtgttgggtacctcttgggtaggctgggggagtcaaggcaccgaggcggctcaactccgccagttttacgttgctgcgcaaggaatatcgtggtcctacagacccgaaccgactaactcttcactgaatttaagcgtgactagcttcaagaagatcgtgtacagggaatacgagccttacttcaaaaaagaaaagcctcagtcaacgatttccggcctgttgggcccaactctttatgccgaggtcggagacatcatcaaggtgcatttcaagaacaaagctgacaaaccgttgtcaatccacccccaagggatccgctatagcaaattgagcgaaggggcaagctatctggatcacaccttcccagccgagaaaatggacgatgctgttgctcctgggagagagtacacctacgagtggtccatctcagaggacagcggccctacccacgatgatccaccatgccttacccacatatactatagtcatgaaaacttgatcgaagactttaactccggactgattggtcctctgctgatttgcaagaagggcacccttaccgagggcggaacccagaagaccttcgataaacaaattgtcttgctgtttgcagtttttgatgagtccaagagttggagtcaaagcagttctcttatgtacactgtcaatggctacgtcaacggcactatgcccgacatcactgtctgcgcccatgatcacatcagttggcatctgctcggaatgagttcaggacccgaactgttcagtatccacttcaatgggcaggtgctggagcagaaccatcataaagtttctgctattacactcgtgagcgccaccagcacgaccgcgaacatgacagtgggccctgagggaaaatggatcataagcagcctgacacctaaacaccttcaagccggaatgcaggcatacatcgatatcaagaactgccctaagaaaacacgcaatctcaagaaaatcaccagggagcaacgccgtcacatgaagcgctgggagtactttatcgctgctgaagaggtgatatgggattacgcgcctgtcatcccagccaacatggacaaaaagtatcgtagccagcacctggacaacttctctaaccagatcgggaaacactataagaaagttatgtacacgcagtatgaggacgaatctttcactaaacacaccgtgaatcctaacatgaaagaagatggcattctgggaccgattatcagagctcaggtcagggatactttgaagatagtcttcaaaaacatggcatccaggccctatagcatctacccccacggagtgacattcagcccctatgaagacgaggtaaactcatcctttaccagcggcaggaataacaccatgattcgggctgtacaacctggcgaaacctacacatataagtggaatattctggaattcgacgaacctacagagaacgatgcacagtgtctgaccagaccctattactctgacgtcgatatcatgagggatatcgctagcggtctgattgggctgcttctgatctgcaagagccgttcgctggataggagaggcatccagagggcagccgatatcgagcaacaggccgtatttgctgtctttgacgagaacaaatcctggtatcttgaagataatatcaacaaattctgcgagaaccccgatgaggtcaaaagggacgatcccaaattttacgagtctaacatcatgtccacaattaatggatatgtgcctgagagcatcactacgttaggcttctgctttgacgacacagtgcaatggcacttctgttcggtcggaacacagaacgagatcttgaccattcattttaccggacacagctttatatatggcaagcgtcatgaagacacgctcacactgtttccaatgcgaggagagtcagtgactgtcacaatggataacgtcggcacctggatgttgacctccatgaacagctcaccacgcagcaagaagctgaggctgaagtttagagacgttaagtgtatcccggatgatgatgaagactcatatgaaatctttgagccacctgagtccaccgtcatggcaacgaggaaaatgcatgacaggctcgagcccgaagatgaagagtctgacgcagattatgattaccaaaaccgccttgccgccgccctgggaatcagaagctttagaaactcatctcttaaccaggaggaggaagagttcaacttgacagccctggctttggaaaacggcaccgagtttgtgtctagtaacaccgatataatcgtgggaagcaactacagctctccctccaacatttctaagttcacagtgaacaatctggccgaaccgcagaaagcaccatcgcaccaacaagcaactacagccggcagcccgctcaggcaccttatcggaaagaacagtgtactgaatagtagcacagctgagcactctagcccctattccgaggatccaatcgaggacccattacagcccgatgttactggcatccgacttctgagcctgggcgctggggagttcaagagccaggagcacgcaaagcataagggtcccaaagtcgaacgggatcaggccgcaaagcatagattcagctggatgaagctccttgcacataaagtgggcaggcacctttcacaggacacagggagccctagtggtatgaggccatgggaagaccttcccagccaagacactggaagccctagcaggatgcgtccttggaaggacccaccctcggatttgttgcttctcaagcagagcaatagttcaaaaattctggtgggccgctggcacctggccagcgagaagggatcatatgagatcatacaggataccgatgaagatacagctgtgaacaactggctcatctctccacagaacgcgtccagggcctggggagaatcaaccccccttgcaaacaaacctggcaaacagtcaggacatcccaagttccctagagtgagacacaagagcctgcaagttagacaagacggcgggaaaagccgcttgaaaaagtctcaatttcttattaaaacgaggaaaaaaaaaaaagaaaaacatacgcaccacgcaccactgagcccgagaactttccacccgctccgtagtgaggcttataacacattctctgagcgccgactgaaacatagtttggtgcttcataagagcaacgagaccagtctgccgaccgacttgaaccagactctgccaagcatggattttggatggattgccagcctcccagatcacaaccaaaattctagcaacgatactggacaggcaagttgtcccccaggactgtaccagaccgtgcccccggaggaacattaccaaacattccccatacaagatcctgatcagatgcattccacatctgatcccagccataggagttcatcccctgaactgtcggagatgttagagtatgataggagccacaaaagctttccaacagacatctcccagatgtctcctagttctgagcacgaggtctggcagactgtcatcagtcctgatctctctcaagtgacactaagccccgaattgagtcagaccaacttgtcaccagatttgtctcacacaacgttgagtcctgagctgattcagcgcaatttgagcccggctctcggacagatgcccatctctcccgacctgtctcatacaaccttgtctccggatctgtctcacaccactctcagtttggacttaagccaaactaatctgagtcctgagctcagccaaactaacctgagccctgcccttggtcaaatgcccctttccccagacctgtcacacacgactctgagcctcgacttctcacagactaaccttagcccagaactgtcccacatgactctcagtccggaactgtctcagaccaacctgtctcctgcattagggcaaatgccaatttctcccgatctgagccacacgacactgagcctcgatttcagccaaaccaatctgtctcccgaactgagccaaaccaacttgagtcccgccctgggacagatgcctctgtcacccgacccctcacataccaccttgagcctcgatctgtctcaaactaacctcagtccagagttaagtcaaactaatctctctccagatctgtctgaaatgccgctgtttgctgatcttagccagatcccactgacgcccgatcttgatcagatgaccttatcgcctgacctgggagaaaccgacctttctcctaattttgggcaaatgagcctctcgcccgatctgagccaagtgaccctgagcccagatattagtgacaccaccctgttgccagacctgagtcaaatcagcccccctcctgacctggaccaaatcttctacccatcggagagctcccagtctctgctgctgcaggagttcaatgaatcatttccatacccggatttgggccaaatgccttcaccttccagtccaaccctgaacgacacatttcttagcaaggaatttaaccctctcgtgatcgtcggcttgtcgaaggatgggacagactacatcgagatcatcccgaaagaggaagtgcagtcttctgaggatgattatgcagagatcgactacgttccctacgatgatccctacaaaaccgatgtgcggaccaacattaactcgtccagggaccctgataacatcgcggcctggtacctcagaagcaataatggcaatcgccgcaactattacattgcggctgaggaaatttcttgggactacagcgagtttgtccagagagagaccgatatcgaagattccgatgatatccccgaggatactacatacaaaaaggttgtgtttaggaaatatctggattcaacctttacaaagcgggaccccagaggcgaatacgaggagcacctgggaatccttgggccgattatacgggctgaggtagatgacgttatccaagtcaggttcaaaaacttggcaagcaggccctattctctccacgcacacggactttcttacgagaaatccagcgaggggaagacttacgaagatgatagccctgagtggttcaaagaagacaacgccgtccaaccaaactcgagctacacatacgtgtggcatgctacagaaaggtcaggccctgagagcccgggaagtgcttgtagggcatgggcttactatagcgctgtcaatccagaaaaggatatacacagtgggcttattgggccgttgttaatttgccagaagggcatccttcacaaagatagcaatatgcccatggatatgagagaatttgtgctgctgttcatgacatttgatgagaaaaagagctggtattacgagaagaagagccgcagttcatggaggttgacctcaagcgaaatgaagaagagtcatgaattccacgcgatcaacggcatgatctattccttgcccggcctgaaaatgtatgagcaagagtgggtgcgcctgcacctgctgaacattggtggcagccaagatatccatgttgtccatttccatggtcagacgctacttgagaatggtaacaaacaacatcaactcggggtatggcccctgctgcccggcagctttaaaacgctggaaatgaaagcaagtaagcctgggtggtggctgttaaacactgaagttggcgagaaccagcgggccggcatgcagacgcccttcctgatcatggatcgcgactgtaggatgccaatgggactctccacagggatcattagtgattcccagattaaggcctcagagtttctgggctactgggagcctcgactggcccgtcttaacaacgggggaagttacaacgcctggagcgtggagaagttagccgcagaattcgcaagtaagccctggatacaggttgacatgcaaaaagaagtgatcatcacaggcatccaaacacagggtgccaagcattatctcaagtcatgttacaccactgagttctatgtggcttatagtagcaatcagattaattggcagattttcaaaggcaactccaccaggaacgtgatgtactttaatgggaattccgatgcctcaaccattaaagaaaatcagtttgaccctccaatcgtcgcgcggtacatcagaatcagtccaaccagggcctacaaccggcccaccctccgccttgaactgcagggatgtgaagtgaacggttgttccactccactgggaatggagaacggcaagattgaaaataaacagataacagcaagttctttcaaaaagagctggtggggcgattactgggaaccttttagagctcggctgaacgcccagggaagggtgaacgcgtggcaggccaaggctaataataacaagcagtggcttgagattgatctgctgaagatcaagaaaattaccgcaatcattacccagggctgtaagagtctctcatcagagatgtacgttaagagctacactatacactacagcgagcagggcgtagaatggaaaccatacagactcaaatctagtatggtggacaaaatctttgaaggcaacaccaatactaagggccatgtgaaaaatttctttaaccctcctatcatctctcgctttatccgggtgatacctaagacatggaaccaatctatagctttgagactggagctgttcggatgcgacatctat

SEQ ID NO: 2247 - DNA, 6672 bp, Artificial Sequence
  derived and/or modified sequence
atgtttcccgggtgccctagactgtgggtgctggtggtgcttggcacgtcttgggtgggctggggatctcaaggcactgaagccgctcaactccgccagttctatgtggccgcccagggaatcagctggagttataggccagaacctactaactcctctctcaacttgagcgtaacctccttcaaaaaaattgtgtaccgcgagtacgagccctatttcaagaaagaaaagcctcagtccaccatcagtggacttctcggccctaccctgtatgctgaagtcggcgacattatcaaggtgcacttcaagaataaagcagataagcctctcagcattcatccacaaggcataaggtactccaaactcagcgagggggcaagttatcttgaccatacgttccctgctgaaaagatggatgacgcagtcgcgccagggcgcgagtacacctacgagtggtccatttcagaggacagcggaccaacccatgacgaccctccatgtctcacacatatatactattcccacgagaacctgattgaggacttcaactccggcctgattggacccctgctcatttgtaagaaaggcactctgacggaggggggcacccagaagacctttgacaaacagatcgtcttgctgttcgccgtgtttgatgagtcaaagtcatggagccagtccagttccttgatgtatacggtgaacggatatgtgaacggaacgatgcctgacatcacagtgtgtgcacacgaccatatatcatggcaccttctggggatgagcagcggtcccgaactcttttctattcacttcaacggccaggtgttggagcaaaaccaccacaaggtgtctgcgattaccctcgtgtccgccacatccactacagctaatatgactgtcgggccagaaggtaaatggatcattagttcacttactcccaagcatctgcaggcaggcatgcaggcatacatcgacatcaaaaattgtccaaaaaaaacgaggaacctcaagaagatcactcgagaacagagaagacacatgaaacgatgggagtatttcatcgcagcagaagaggtgatttgggactacgcaccagtaatacccgccaatatggacaaaaagtaccgaagtcaacacctcgataatttctcaaatcagatcggcaaacactataagaaggtgatgtatacacagtatgaagatgagagttttacaaaacataccgtgaaccccaatatgaaggaagacggtatcttgggtcccattattagggctcaagtgagagacactctgaaaattgtgttcaagaacatggcttccaggccttactctatctatcctcatggggttactttctcaccatacgaggacgaggtgaattcatcttttacgtccggtagaaacaatactatgatccgagccgtgcagcccggtgaaacatacacatataaatggaatatcctggaattcgatgagcccactgaaaacgacgcccagtgcctgacaaggccatattatagcgacgttgatattatgcgcgatattgcgtccgggctgatcgggctcctgctgatttgcaagagcaggagtctcgacagaagaggaatccagagagcggcagacattgagcagcaggcagtcttcgcagtatttgacgagaacaagagctggtatttggaggacaacatcaacaaattttgcgagaaccctgacgaggtaaaacgcgacgatcccaagttctacgagtctaatatcatgagcaccatcaacggctacgtaccagagagcattactaccctgggattctgtttcgatgacactgtgcagtggcacttttgcagtgtgggaactcagaacgaaatcctgaccatacattttaccggccattcttttatctacggcaaacgacatgaggataccctgaccttgttccccatgcgcggagagtctgtcactgtcacaatggacaatgtaggtacctggatgctgaccagcatgaatagtagtcctaggagtaagaaattgcgcctgaagttcagggacgtaaagtgtattcccgacgatgacgaagatagttatgagatctttgaacccccagaaagtacagtgatggcaacacgcaagatgcatgacagactggagcctgaggatgaggaaagcgatgctgattacgattatcaaaaccgcctcgccgctgcactgggtatcagaagtttccggaacagcagcctgaaccaggaggaggaagaatttaacctgaccgcgcttgccctggaaaacggtaccgagttcgtgtcaagcaacacagacatcatagtgggctccaactacagctccccttctaacattagtaagtttacggtgaacaacctggctgagccgcagaaggccccttcccatcagcaggcgacgaccgccgggagtcctctccggcaccttattggaaagaactccgttcttaattctagtactgcggagcattcaagcccttattcagaagacccaatcgaagacccactccaaccggacgtgactggcatcaggctgctcagtttgggcgctggtgaattcaaatcccaggagcatgccaagcacaaggggcccaaggttgagcgggaccaagccgctaaacataggttctcttggatgaaattgctggcacataaagtgggaaggcatctgtcacaggacacaggatcccctagtggcatgaggccctgggaagatcttccgagtcaagacactggctcccccagcaggatgcgaccctggaaggaccctccaagtgatctgctcctgctgaagcagagtaactcttcaaagatcctggtcggccgatggcatctggcgagcgaaaagggttcttacgagatcatacaagacacagatgaagatacggctgtgaataactggctgatttccccacaaaatgcttccagggcatggggagagtccacaccactcgcaaacaaacctggaaagcagtccgggcaccctaaatttccacgggtgcggcacaagagcctgcaggtgaggcaggacggcggaaagtctcggctgaaaaagtcacagtttctgatcaagacaaggaagaagaagaaagaaaagcatacccaccacgctccgctgagccctaggacgttccatccactgcgatcagaggcatataataccttttcagaaagacgactgaagcactccttggtgctccataagtcaaatgagaccagcctgccgaccgacctcaaccagaccctccctagcatggacttcggctggatagcctctcttcctgatcacaatcagaattccagcaacgacacggggcaggccagttgccctcccggactgtatcaaaccgtgcccccagaggagcactatcagacattccccatccaggaccctgaccagatgcattctacaagtgatccctcccacaggtcctcttctcctgagctttccgagatgctcgagtacgaccgcagtcacaaaagctttccgacggacatatcacaaatgtcccccagcagcgagcacgaggtgtggcagacggtgatcagccccgacctctctcaagtgactctgagccccgaattgagtcaaaccaacctctcccccgacctcagccacactacgctgtcacccgaactgattcagcgaaacctctctccggcgctcggccagatgcccatctctccagatctgagccacaccacgctgtcacctgatctgtctcacacaacactcagtctggatttgagccagacgaatctgtcacccgagctgtctcaaacaaatctttctcccgccctggggcagatgcctctgtcacctgacctgtcccacaccaccctgtctctggactttagccagaccaacctgagccctgaactttctcatatgaccctgagccccgagctgagtcagactaatctcagcccggctctggggcagatgcctattagccccgacctgagtcacactactctgtcacttgatttctctcagaccaatctgagccccgaactgagccagaccaacctgagcccggctctgggtcaaatgcccctgtcacctgatccaagccacacaactctgtccctggatctgtctcagacaaatctgtccccggagctgtcccaaacaaacctctcaccagatctgtctgaaatgcccctcttcgcagacctgtcacagatccccttgactccagatctggatcagatgacactctcccctgaccttggtgagaccgacctctcaccgaactttggtcagatgtccctctctcctgatctctcccaggttaccctgtccccggatatttccgacactactcttctccccgacttgagtcaaatatcccctccaccagatttggaccagatcttctatccgtctgagtccagtcagtccttgctccttcaggagttcaacgagtcctttccgtaccctgatctgggacagatgccttccccctctagcccgacactcaacgacacttttctctcaaaggaatttaatcccttggttattgtggggctgtccaaggacgggacagactacattgaaatcatccccaaagaggaggtgcaatcttccgaagacgactacgccgaaattgactatgtcccctacgacgatccatacaagactgacgtgaggaccaacatcaattcttccagggaccctgataacatcgccgcctggtatctgcgcagtaacaacggcaatcggcgaaactactatatagccgccgaggagatatcctgggactacagtgagttcgtacagagagaaacagatatagaggatagtgacgatattccagaagacacgacgtacaaaaaggtggtctttaggaagtacctcgattccacattcactaagagagaccccagaggggagtacgaagagcacctgggtatactgggtccaattattagggccgaggtcgacgacgttatccaggttcgctttaaaaacttggcaagtagaccttacagtcttcatgcgcacggactcagttacgagaagagctctgaggggaagacgtatgaggacgactcacccgaatggtttaaggaagataatgcggtccagccaaattcttcttatacatatgtttggcacgccacagaacgctctggccctgaatcccccggcagtgcgtgtagagcatgggcttactattcagccgtcaaccctgagaaagatattcacagcgggctgatcgggccgttgctgatttgccagaaagggatattgcataaagacagtaacatgcctatggatatgagagaattcgtacttctgttcatgaccttcgacgagaaaaagagctggtactacgagaagaagagccgcagctcctggcggctgacctccagcgaaatgaaaaaaagtcatgaatttcacgccataaatggcatgatctatagtcttcccggcctgaagatgtacgagcaggagtgggtgcgcctgcacctgctgaacatcggaggatcccaggatatccacgtcgtgcacttccatggccaaacactcctggagaatggaaacaaacaacaccagctgggggtttggccactgctgcccggttcctttaaaacattggagatgaaggccagcaagcccgggtggtggctcctgaacaccgaagtcggtgaaaatcagcgagccggaatgcaaacccccttcttgatcatggacagggactgtcgcatgcctatgggtctgagtaccggtatcatatcagatagtcaaatcaaagccagcgagttcttgggatactgggagcctagactggctaggctgaacaatggcggctcctacaatgcctggtccgtggagaagctggctgcagagtttgcgagcaaaccatggattcaagttgatatgcagaaggaagtgatcattaccggaatccagacccagggcgccaaacattaccttaaaagctgctataccacagagttctacgttgcgtatagctcaaaccagattaattggcagatcttcaaaggtaatagtactcgcaacgtaatgtactttaacggcaactccgatgccagcaccatcaaagagaatcagtttgatcccccaatcgtggctcggtatatcaggattagtcccacaagggcctataacagacctactctgcgccttgagctgcaagggtgcgaagtgaatggttgctctacccccctggggatggaaaacggaaagatcgagaataagcaaataaccgctagctcatttaagaagagctggtggggcgactactgggagccgttcagagcccggttgaatgcgcagggccgggttaatgcttggcaagcgaaggcgaacaataataaacaatggcttgaaatcgatcttctcaaaatcaagaagataacagcgatcattacccaaggatgtaaatctctgtccagcgaaatgtacgttaaaagctacacaatccactattccgaacagggtgtcgaatggaaaccttatcgactcaaaagttctatggtcgacaaaatctttgaaggcaacaccaacacaaagggtcatgtgaagaattttttcaacccgcctattatcagccgcttcattcgcgtcatccctaaaacttggaaccagtctatcgcgctgaggctcgagctgttcggttgcgacatctac

SEQ ID NO: 2248 - DNA, 6672 bp, Artificial Sequence
  derived and/or modified sequence
atgttccccggatgcccacgcctgtgggtattggtagttctgggcacctcctgggtgggatggggttcccaaggaaccgaagccgcacagctccggcaattttacgtggctgcccagggaatttcctggtcataccgacccgagccgaccaactcatccttgaatttgtctgtgacttctttcaaaaaaattgtgtatagggagtatgaaccttactttaaaaaggagaagccccagagtacaatttccgggctcctgggaccaactctgtatgccgaggtgggagatatcattaaagtacatttcaaaaacaaggccgataaacctttgtccatccatccccaaggcatacgatacagtaagctttccgaaggggcctcatacctagatcatacctttcctgcggagaaaatggacgacgccgttgccccaggtcgagagtatacctacgagtggtccatttccgaggattcaggccctacacatgatgatcctccttgcctcacccatatctactactcccacgaaaatctcattgaggacttcaatagcggcctcatcggacctcttttgatttgtaagaaaggcactttgacggaggggggaactcagaagacttttgataagcagatcgtgctcctgttcgcagtcttcgacgaatctaaatcttggtcccagtcttcatcactcatgtataccgtgaatggatatgtcaacggtactatgcccgacattactgtgtgcgcgcatgaccacatctcatggcacttactaggcatgagctccggccctgagctattcagtatccactttaacggacaggtgctggaacagaaccaccataaggtctctgcaatcaccctggtgtccgcaactagcaccacagctaatatgacagtgggtcccgaaggaaaatggattattagcagtctgaccccgaaacatttgcaagcgggcatgcaggcctatatcgacatcaaaaactgtccaaaaaagactcggaatctcaagaagatcacgcgtgaacaaagaagacatatgaagaggtgggaatacttcatcgccgcggaggaagtgatatgggattatgcacctgtgatcccggccaacatggataagaagtacagaagtcagcatctggataatttttctaaccagataggtaaacattataagaaagtaatgtatacacaatacgaagacgaatcattcacaaagcacaccgtaaacccgaacatgaaagaggacggtatcctcggtcctatcatacgggcccaagtgagagatacattgaagatagtgttcaaaaacatggcctcaagaccatattcaatctacccacatggggtgactttttccccatatgaggacgaagtgaacagctcctttacgagtggaagaaataatactatgattcgcgctgtccaacctggtgaaacgtatacttacaagtggaacatcctggagttcgatgagccaacagagaacgacgctcaatgtctgaccaggccctattactctgacgtggacatcatgagagatattgccagtggcttaattggactgctcctgatttgcaagtctcggtccctggaccgaagggggattcagcgagctgcagatatcgaacaacaagccgtgtttgcggtgtttgatgagaacaaatcctggtacctagaggataacattaataagttctgtgagaacccagatgaggtgaaacgtgacgaccccaagttctatgagtctaatatcatgagcaccatcaatgggtacgtacctgagtccatcacaactctcggattctgtttcgacgacaccgtccaatggcatttctgctccgtggggactcagaacgagatcctcaccatacacttcaccgggcacagctttatttacgggaagcgccacgaggatacattgacactgtttccgatgagaggggaatccgttacggttactatggacaatgttggtacttggatgctgacctctatgaactccagtccacggagcaaaaaactacgactcaaattccgggatgttaagtgtatcccagacgatgacgaggatagctacgaaatcttcgaaccaccggaaagcacggtgatggctacaaggaaaatgcatgaccgcttggaacctgaagacgaggaatctgatgcagactatgattaccagaaccggctggcagccgccctgggtattagatctttccgtaattcttccctgaaccaagaggaagaagagttcaatctaaccgccttggccctggagaatggcactgagtttgtgtcctcgaacaccgatattattgtgggatcaaactattcttccccttccaatatttcaaaattcacagtgaataacctggctgaacctcagaaggccccttcacatcaacaggcaaccaccgcgggctccccgttaaggcacctcattggcaagaatagtgtgctgaacagttccaccgctgagcactcgtcaccctactctgaggatccgatcgaagatccactgcaaccagatgtcaccgggattaggctgctgagtctcggagcgggggaattcaagagtcaggagcacgccaagcataaaggaccaaaagtggagcgtgatcaagcagcgaaacacagattttcctggatgaagctgctggcacacaaggtgggccggcacctgagccaggatacgggctcaccgtccggaatgcgtccatgggaagacttaccttcccaggacaccggctcgccgagcagaatgcggccctggaaagacccacctagcgatttgctactgcttaaacagtcaaactcctccaaaattctcgtcggcaggtggcacttggcttccgaaaaggggagttacgagattatacaggatactgatgaggacacagctgtaaacaactggctcatcagccctcagaacgcctctcgcgcctggggggagagtacacccttggccaacaaaccaggcaagcagtccggtcacccgaagtttccccgggtcagacacaagagccttcaggtgaggcaggatgggggcaaaagcagactgaaaaagagccagtttctcattaagacccggaagaaaaagaaagagaagcacacgcaccatgcccccttgagtccacggaccttccaccctctgcggtcggaagcctacaacacgttttccgaaaggaggcttaaacactccctcgtgctgcataagtctaatgagacttctctgcccacagaccttaatcaaacgctcccatctatggattttgggtggattgcctcactacccgaccacaaccaaaatagcagtaacgacacgggacaggcttcctgcccgcctgggctctaccagacggtgcctcccgaggaacactatcagacttttccaatccaagatcctgaccaaatgcactctacatcggatccatcgcacaggtcaagcagccctgagctctcagaaatgttagagtatgataggagtcacaagagctttccaaccgacatctcacagatgagtccatcttcagaacatgaagtgtggcaaacggtcatctccccagatctaagccaggtcacattgagccccgagctgagtcaaactaacctgtcccctgatctttcccataccaccctcagcccagagctcattcagcgaaacttgtcccccgcgttgggccagatgcctatctctcccgatctgtctcacaccaccctatcccctgacctctcacatacaacactgagtctggatctaagccagaccaacctgtcccccgagctgtcccagaccaaccttagcccagcccttggccagatgccgttgagtccagacctcagccacacaacgttgtccctcgatttctcacagaccaacctgagccctgaactgtcacatatgacactgagccctgaactgtcccagacaaatctttctcccgccctggggcagatgcctatctccccagacctgagtcacacaacgctcagcttagacttcagccagacaaacctttctcctgagctttcccaaaccaatctctctccggcgctgggccagatgcccctttcaccggacccaagccacactaccctgtcgttggacctgtctcagaccaacctctcccctgagctctcccagacaaatctgtcacctgatctttctgagatgccgctgtttgccgacctgagccagattccactgaccccggatctggaccaaatgactttatcacctgacctaggcgaaactgacctgtctcctaactttgggcagatgtcactatcgcctgacctctcccaggtgacactctcgcctgacatctcagatactacactcttaccagacctatctcagataagtcctcccccagacctcgatcagatcttttaccctagcgagagtagtcagagtctgctccttcaagaatttaatgagagcttcccttatccggatcttgggcagatgccctctccctcctctcctaccctcaacgataccttccttagcaaggagttcaatccccttgtcattgtggggttgtccaaggatggcacagattatatagaaatcatcccgaaggaagaggtgcagagcagcgaggatgattacgccgaaatcgactacgtgccctatgatgacccctacaaaacagatgttcgtactaacattaactcaagcagggatccagacaatatagccgcctggtatcttcggtcaaacaatggtaacaggaggaactattacatagccgcagaagaaatctcctgggactatagtgagtttgttcagcgagaaacagacatcgaagattcagacgatattccggaggataccacctataaaaaggtagtgtttcgaaaatacctcgattccaccttcacaaagcgtgatccccgcggcgagtacgaagagcatctgggtatcttgggacccattattcgggccgaagtcgacgatgttatccaggttaggttcaagaatctggccagccggccatacagcttgcatgcccacggcttgagttacgaaaaatcaagtgaaggcaagacctacgaggacgacagccccgagtggttcaaagaagacaacgcggtacaacccaacagctcttacacttacgtgtggcacgccaccgaacggagtggccccgaaagccccggctcagcctgccgggcttgggcctattacagtgctgtgaatcccgagaaagatatccattcaggcctcattggtccccttctgatctgccaaaagggcatcctgcacaaggattccaacatgcccatggatatgagggaattcgtgttgctctttatgacatttgatgaaaaaaagagctggtactacgaaaaaaagagcagatccagctggagactaacatcatccgaaatgaagaagagccacgaatttcacgccattaacggtatgatttacagcctgccaggcctgaaaatgtacgagcaggaatgggtgaggctgcatctgttgaacattgggggctcccaggacatccacgtggtccactttcatggacagactttactcgaaaatggaaacaagcagcaccagctgggagtctggccccttttacccggttcattcaagacccttgagatgaaggcatcaaagccgggctggtggctgttgaataccgaggtgggtgagaatcagcgggctgggatgcagacgccgttcctgataatggatagggattgccgcatgcccatgggacttagcacaggcatcatatcagacagccaaataaaggctagcgagttcctgggctactgggaaccgcgcctcgctcggctcaataacggcgggtcctacaatgcatggagtgtggaaaagttggccgctgagtttgccagcaaaccatggattcaggtggatatgcagaaggaagtgattataaccggtatccagacacagggagctaagcattacttaaaaagctgttacaccacagaattttatgttgcctatagctccaaccagattaattggcagatcttcaagggtaactcaacccgaaacgtaatgtactttaatggcaacagcgatgcgagcactattaaggaaaaccagtttgacccaccaatcgtcgctcgttatatccgcatcagtccgaccagggcatacaacaggcctacacttcgcctagagctccaggggtgtgaagtcaacggttgtagtaccccactgggtatggagaacggaaaaatagagaataaacaaataactgccagcagtttcaagaagtcatggtggggcgactactgggagccatttagagcgaggctcaatgcccagggaagagtaaatgcctggcaggctaaggcgaataataacaaacaatggctggagattgacctcctcaagatcaaaaaaattaccgccattattactcagggctgtaagtccctgtcatctgagatgtacgtgaaaagctacacaattcactactctgaacagggagtggagtggaaaccgtaccggcttaagtcctctatggttgacaaaatttttgagggaaatacgaataccaaagggcatgtcaagaactttttcaaccccccaatcattagcagatttatcagagtgatacctaagacttggaatcaatctatcgccttgaggctcgaactattcggctgcgatatttat

SEQ ID NO: 2249 - DNA, 6672 bp, Artificial Sequence
  derived and/or modified sequence
atgtttcctggatgccccaggttgtgggtgctcgtcgtccttgggacctcttgggtgggttgggggagccagggtaccgaagccgcacagcttcgacagttctacgtggcggcgcagggtatctcgtggagctacagaccggagccgactaactcatcgctgaacctctcagtcactagcttcaagaaaatcgtctatagagaatacgaaccctactttaagaaagaaaaaccgcagtcgaccatctctggcctgcttggaccgaccctgtacgccgaggtgggagatatcattaaggtgcactttaagaacaaagcagacaaaccgttgtcgatccacccgcagggaattcgctactcaaagctgtcggagggagcctcgtacctggaccataccttccctgccgagaagatggacgatgcggtagcgccaggacgcgaatacacgtacgaatggtcgatttccgaggattctgggccaacccatgatgatcctccctgcctcactcacatctactactcacacgagaatcttattgaggacttcaactcgggacttatcgggcctctcctgatatgtaagaagggtactctcaccgagggaggcacccagaaaaccttcgacaaacaaattgtcctgctgttcgcagtatttgacgaaagcaagagctggagccagagctcgtcactgatgtataccgtgaatggatacgtcaatggcactatgccggatattaccgtctgcgcgcacgaccatatctcctggcatcttctcggaatgtcctcgggacctgaactcttctcaatccacttcaatggccaagtcctggaacaaaatcaccacaaagtcagcgcaatcactctggtatccgccacttccaccaccgccaacatgactgtgggaccggaaggcaagtggatcatctcctcgctcactcctaagcacctccaggcgggcatgcaggcgtacattgacatcaaaaactgccctaagaaaactcgaaacctgaagaaaatcacccgcgagcaacggagacatatgaaaagatgggaatacttcattgccgctgaagaagtcatttgggattacgccccggttattcccgcaaatatggataagaaataccggtcccagcacctggacaacttttcgaaccaaatcggaaaacattacaagaaggtcatgtacacccagtacgaggacgagagcttcaccaagcatactgtcaatccaaatatgaaggaggacgggattctgggaccaatcatcagagctcaagtgagggacaccctgaaaatcgttttcaagaacatggcttcgcgcccttactcaatctaccctcacggagtgaccttctcgccgtacgaggatgaagtcaactcatcattcacttccggcagaaacaatactatgatcagggccgtgcagccaggggagacttacacttacaagtggaatattctggagttcgacgaacccaccgaaaacgacgcccagtgcctgaccaggccgtactactctgacgtggacatcatgcgggatatcgcctccgggctgatcggcttgctgttgatctgcaaatcgcggagcctggaccgccgcgggatccaacgcgccgctgacatagaacaacaagccgtgttcgctgtgtttgatgagaacaagagctggtacctggaggataacatcaataagttctgcgagaatccagacgaggtgaagcgggacgatccgaagttttacgaatcaaacatcatgagtaccatcaacggctacgtgccagagtccattaccactctcggtttttgttttgacgataccgtgcaatggcacttctgcagcgtgggaacgcagaacgagatccttacgatccactttacgggacactcatttatctatggtaagagacacgaggacactctgaccctgttcccgatgcggggagagagcgtgaccgtcacgatggacaatgtcggaacctggatgctcaccagcatgaatagctcgcctcggtccaagaaactgaggctgaaattccgggatgtgaaatgcatcccggacgatgacgaggactcctatgagatattcgagccgccggagtccactgtcatggcgacccgcaagatgcatgataggttggaaccggaggacgaagagagcgatgccgactacgactaccagaaccgcctggcagcggcactgggcattcgtagcttccggaattcatctctgaatcaagaggaagaagaattcaacctcactgcattggcccttgagaacgggactgaattcgtcagcagcaatactgacatcatcgtgggttcaaactactcatctccgtctaatatcagcaagttcaccgtgaacaacctcgcggagccacaaaaggcaccgtcccaccagcaggccaccactgcggggtcacccctccgacatctcatcggcaagaactcggtgctgaacagctcgaccgcagagcattcgtccccatactcggaggatcctattgaggatccgctccagccagacgtgaccggcatccgcctgctttccctgggcgctggagaattcaaaagccaggagcacgcaaagcataaaggacctaaggtggaacgggatcaggccgcaaaacaccggttctcgtggatgaagctgctggctcacaaagtgggcagacatctcagccaggataccggaagcccctcgggaatgcggccgtgggaagatctgccatcgcaggacactggctccccgagcagaatgcgtccgtggaaggatccaccatccgatctgctcctgttgaaacaatcgaatagttcaaaaatcctggtcggtcgctggcacctggcatcagagaagggctcatatgagatcatccaagataccgatgaagatacggctgtgaacaactggctgatctcaccgcaaaatgcttcgcgcgcatggggtgaatcgactccgctcgctaacaagccgggaaaacagtctggacacccgaagttcccacgcgtgagacataagtctctgcaggtgaggcaagacggtggaaagtcgaggctgaagaaatctcaatttctgatcaagaccagaaagaaaaagaaggagaaacatactcatcatgccccgctgtcgccacggacctttcacccactgaggtcagaagcatacaacaccttctcggaacggaggctcaagcattccttggtgctgcacaagtcgaacgaaacgtcacttccgaccgacctcaaccagaccctgccctcaatggattttggatggatcgcgtccttgccggaccacaaccagaattcgtccaacgataccggacaagcctcgtgcccgccaggactgtatcagacggtgcctcctgaagaacactaccagaccttccccatccaggaccccgaccagatgcactcgacctccgaccccagccatcgctcgtcctcgccggaactgtcggaaatgctcgaatacgatcggagtcacaagtccttcccgactgacatctcccagatgagcccttcctcagaacatgaggtgtggcagacggtgatctcgcctgatctgtcccaggtcaccctgtccccggagctctcccagaccaatcttagccccgacctttcccacactactctttctccggaactcatccagcgaaacctgagtccggctcttggtcaaatgccgatctcaccagatctgagccatactactctgtcgccagatttgtcccataccactctgtccctggacctgtcgcaaacgaacctttcgccagagttgagccagactaatctgtcgccagctctgggacagatgcctctgtccccggacctgagccacacgacgctctcgctcgatttcagccagactaacctttcccctgaattgtcgcacatgactctctcaccagaactcagtcagactaacttgagtcccgcgttgggccaaatgcctatcagccctgacctgagtcatacgaccctgagcctggactttagtcagacgaacctgtcccctgaactctcgcagacgaacttgtcgccggcactgggacaaatgccactgtctccggacccatcgcacaccaccctgagcctcgacctgtcgcagacgaatctttccccagaattgtcacagactaacctgtcgcctgacctgagcgaaatgccgctgtttgcggacctcagccagatcccgctcactcccgacctggatcaaatgaccctgtcccccgacctcggggaaactgatctgtcgccaaacttcgggcagatgtccctgtcaccggatctcagccaagtgacgctgtccccagatatcagcgacactactctgctccccgacctgtcacagatctccccgccgccggatttggaccaaatcttttacccgtcggagtcgagccagtctttgctgctgcaggaattcaatgaatccttcccataccctgacctcgggcagatgccgtccccttcctcccccactctgaacgacacttttctctccaaggagttcaacccattggtcatcgtgggactctcaaaggatggaaccgactacatcgaaatcatcccgaaagaagaagtgcaatcgtccgaagatgactacgctgaaatcgactatgttccgtacgacgacccatacaaaaccgacgttcgcactaatatcaactccagccgggatccggacaacatcgccgcgtggtacctgcggtccaacaacggcaacagacgaaactactacatcgccgcggaggaaatctcttgggactactccgagttcgtgcagcgcgagacggacatcgaggactcagatgacatccctgaagatactacctacaagaaggtggtgttcagaaagtacctggattcaactttcaccaagagggaccctcgcggagagtatgaggaacaccttggaatcctgggtcccatcatccgcgcagaggtggacgatgtgatccaagttcggttcaagaacctcgcctcccgcccatactccctgcatgcacacggattgagttacgaaaaatcctcagaaggaaagacctacgaagatgattccccggagtggtttaaggaggacaatgctgtccaacctaactcatcatacacctacgtgtggcatgcaaccgaaagatcaggtccggaatcgccgggctccgcgtgtcgcgcctgggcctactactccgccgtcaaccctgaaaaggacatccactcagggctgatcgggccgctcctcatatgccagaagggaatcctgcataaagattcgaacatgccaatggacatgcgcgagtttgtgctcctcttcatgactttcgatgaaaagaagtcctggtactacgagaagaagagccgctcgtcttggcgcctgacctcgtcggagatgaagaaatcgcacgaattccacgccatcaatggaatgatttacagcctgccaggactcaagatgtacgaacaggaatgggtccgcttgcacttgctgaatatcggaggaagccaggacatccacgtcgttcatttccacggacagactctgcttgaaaacggcaataagcaacatcaactcggagtgtggcccctgttgccgggttcattcaaaactctggagatgaaggcttcaaagccgggctggtggctgctgaacaccgaagtcggagagaaccagagggctggcatgcaaaccccgtttctgattatggatcgggattgtcggatgcctatgggactctccactgggatcattagcgactcccagatcaaggcttcagagttccttggatactgggaacctcgccttgcccggctgaacaacggtggatcatacaacgcatggtctgtcgagaagttggccgcagaattcgcttcgaagccgtggattcaagtggacatgcagaaagaagtgatcatcaccggaatccagactcagggcgcgaaacactacttgaagagctgctacaccactgaattctatgtggcgtattcatccaaccaaatcaattggcaaatcttcaaaggaaacagcactcgcaacgtgatgtacttcaatggcaattccgacgccagcaccatcaaggaaaatcaatttgacccgccaatcgtggccaggtacatccgcataagtccaacccgggcgtacaatagaccaactctgcgcctggaactccagggatgtgaggttaatggttgctcaacccctctcggaatggagaacggcaaaatcgagaacaagcagattactgctagctccttcaagaagtcgtggtggggcgactactgggagccattccgcgcgcggctcaacgcccaaggaagagtgaatgcttggcaagcaaaggccaataacaacaagcagtggctggaaatcgaccttcttaagatcaaaaagatcactgcgatcattacccagggctgcaagtcgctgtcctctgaaatgtacgtgaagagctacactatccactacagtgaacaaggggtggaatggaagccataccggctcaagtcaagcatggtggataagatcttcgagggtaataccaataccaagggacatgtgaagaacttcttcaacccaccgatcatatcgcggtttattcgcgtgattccaaaaacgtggaatcagagcatcgccctccggctcgaactcttcggttgtgacatttac

SEQ ID NO: 2250 - DNA, 6672 bp, Artificial Sequence
  derived and/or modified sequence
atgtttccgggatgtcctcggctttgggtgctggttgtgcttggaacctcatgggtcggctgggggtcccagggtactgaagcagcccagctcagacaattctacgtggcggcacaaggtatatcgtggtcgtaccgccctgaaccgaccaattcctcgcttaatctctcagtgacgagctttaagaaaattgtgtaccgagagtacgagccatactttaagaaagagaagccgcaatccactatttccgggctgcttggtccaactctttacgccgaagtgggagatatcattaaagtccactttaagaataaggctgacaagccactttccatacatcctcaaggtattcgttactcaaagctgtccgaaggggcgtcgtacctcgatcatacttttcctgccgaaaagatggacgatgcagtggctccaggtcgagagtacacctacgaatggtccattagcgaggactcgggacctacccatgatgacccaccttgcctcacccatatctattactcgcacgagaacctcatcgaggacttcaattccggactgatcggaccgcttctcatttgtaagaaaggcaccctgacggagggtggaacccaaaaaactttcgataagcagatcgtccttctttttgccgtctttgatgaatccaagtcatggtcccaatcgagctcccttatgtacactgtgaacggctacgtgaacggaactatgccggatatcactgtgtgtgctcacgatcacattagctggcacctcctgggcatgtcatcgggccctgaactgttttccattcactttaatggtcaggtgctcgaacaaaatcaccataaggtgtcggcaattacgctggtcagcgcaacctcaacgacggccaatatgactgtgggtccagaaggaaaatggattatctcgtcactgacccccaagcatctgcaagcgggcatgcaagcctatattgacattaagaattgtcctaagaaaactaggaatctgaagaaaatcaccagagaacaacggcgacacatgaagagatgggaatacttcattgccgccgaggaagtgatttgggattacgcacccgtgattccagcaaacatggataagaagtaccgcagccaacatctggacaacttctcaaaccagatcggtaagcattacaaaaaggtgatgtacactcagtacgaggacgagtcatttaccaagcacaccgtgaacccgaacatgaaggaggacgggatcctcggacctatcatccgcgcacaagtgagggacaccctgaagattgtgtttaagaacatggccagcagaccatatagcatatatccacatggagttaccttttccccttacgaagatgaggtcaattcatcatttacttccgggaggaacaataccatgataagagcggtgcaacctggtgaaacttacacttacaagtggaacattctggaatttgacgaaccaactgaaaatgatgcccaatgtctcactaggccatattactccgacgtcgacataatgcgcgacatcgcatcaggcctcattggacttttgctcatctgtaaatcgcgttccctggaccgaagagggattcagagagcagcagatatcgagcaacaagccgtctttgcagtctttgatgagaataagtcatggtacctggaagataacattaacaagttttgtgaaaaccctgacgaggtcaaacgtgatgatccaaagttttacgagagcaacattatgtccaccatcaacggatacgtgccagaatcgatcaccaccctggggttttgtttcgacgacacggtgcagtggcatttttgctcagtgggaacccaaaatgaaattcttactattcattttaccggacactcgtttatctatggaaagcgccatgaggacactcttacgcttttcccaatgcggggagaatccgtgaccgtcacgatggataacgtcggaacttggatgctgacttctatgaactcatcgcctcggtcgaagaaactgagactgaagtttcgggatgtgaagtgtattcccgatgacgatgaagatagctacgaaatcttcgaacctcctgaatcgactgtcatggcaactcgaaaaatgcacgaccgtctggagccagaggacgaagaatccgacgccgattacgattaccagaatcgactcgcagctgcacttggcatcagatcctttcggaactcatcgcttaatcaagaagaagaggagttcaatctgacggcactggcgcttgagaatggaaccgaattcgtgtcctcaaataccgacattattgtgggaagcaattactcttccccgagcaacataagcaagtttaccgtgaacaatcttgccgaacctcaaaaagctccatcgcatcagcaagcgactacggcaggttctcctttgcggcatcttatcggcaagaattcggtgctgaacagcagcaccgcagaacacagcagcccgtactcggaggatcctatcgaggaccccttgcagcctgatgtgactggaattagactgctgtcactcggagcaggcgaattcaagtcccaggaacatgctaaacataaaggccctaaggtcgaaagagatcaggcggcgaaacatcggttctcttggatgaagctgcttgcccataaggtgggccgccatttgtcccaagacactggatcgccctcgggaatgcgtccatgggaggacctgccttcgcaagataccggatccccctcgagaatgcgtccttggaaagatcccccttcggatcttcttctgcttaaacagtccaactcctcgaagatcctcgtcggacggtggcatctggcgtccgagaagggatcttatgaaatcatacaagataccgatgaggatactgcagtgaacaactggctcatttcgccacagaacgcatcgcgagcatggggtgaatcgacgcctttggccaacaaacctggaaaacaatccggtcatcctaagtttccgagagtccggcataagtcgttgcaggtgagacaggacggtggcaagtcgaggcttaagaagtcccagtttctgataaagactcgaaaaaagaaaaaggaaaaacatactcatcacgcaccacttagcccacgaaccttccatccactgaggtccgaagcgtacaacactttttccgagagacggcttaagcactcgcttgtgcttcataagagcaatgaaacttcacttcctaccgatctgaaccaaactctcccatctatggattttggttggatcgcctcgttgcccgatcataaccaaaactccagcaacgatacgggtcaggcatcgtgtccaccaggactttaccaaactgtgccccctgaagaacattaccagactttccctatacaagatcctgaccagatgcacagcacctcggacccaagccataggtcatctagccctgagctgtccgaaatgctcgaatacgacagatcccataagtcattcccaaccgacatatctcaaatgtcgccttcgtcggaacatgaagtttggcaaactgtgatctcccctgacctgtcgcaagtgactctttcgccagaactctcacagactaacctttcccctgatctgtctcatactacgctgtcacctgagcttatccaaagaaacttgagtccagctcttggccagatgcccatttccccggacctttcccacaccacgctttcaccggatctctcgcacaccactctttcgctcgatctttcccagactaatctctcacccgaattgtcacagacgaatctgtcgcccgcacttggtcagatgcctctgtcgccggatctttcgcatactactctctcactcgattttagccaaaccaacttgtcgcccgagctgtcgcatatgaccctttcaccggagctttcgcagaccaacctgtctcctgcgctgggtcaaatgcccatctcaccggatttgtcccacactactctgtccctggatttctcacaaacgaacctttccccagagctttcgcaaaccaatctttcgccagcacttggtcaaatgcctctgtccccggatccctcgcataccactctgagccttgatctgtcgcagacgaacttgagccctgagttgtcccagacgaatcttagtcccgatctttcagagatgcctctcttcgcagatttgtcccagattcccctgactccagatctcgatcagatgaccctcagccccgatttgggtgaaactgatctctcccctaactttggccagatgtcactctcacctgatctgtcacaggtgactctgtcccccgatatttcggacactactcttctgccagaccttagtcaaatttcgccgcctccagaccttgaccagatcttctaccccagcgagtcatcccaatcgctcctgctccaggaattcaacgagtcgtttccttacccagacctggggcagatgccaagcccatcgtctcccacgctcaacgacactttcctgtccaaagaattcaaccctctggtgatagtgggtctttcgaaggatggtactgattacatcgagattatccccaaggaagaagttcagagttccgaggatgattacgcggagattgattacgtgccttacgatgatccctataagaccgacgtgaggaccaatatcaattcgtcacgtgatccagacaacatagcggcctggtaccttcgcagcaataacggtaaccgtagaaactactacatagccgcggaagaaatctcatgggactactcggagtttgtccagcgggaaactgacatcgaggactcggacgatattccagaagataccacttacaagaaggtggtgtttcgcaaatacctcgattctacctttactaagagagatccccgcggagaatacgaggaacaccttggcattctgggtcccattatcagagcggaagtggatgatgtgattcaggtcagatttaagaacctggcaagcagaccttactctctgcacgcgcatggcctgtcctacgaaaaatcttccgaagggaaaacctacgaagatgacagcccggaatggttcaaggaagataatgcagtccagccgaacagctcatatacctatgtctggcacgccaccgagcggtccggacccgaatcccctgggtccgcctgtagggcatgggcctactactcggcggtcaatcccgaaaaggacatccacagcggtcttattggacctctgctgatttgtcagaagggaattcttcataaggacagcaacatgccaatggatatgcgcgaattcgtcctgctgtttatgaccttcgacgagaaaaagtcgtggtactacgagaagaagtccagaagctcatggaggctcacttcgtccgaaatgaagaaaagccacgaatttcatgccattaacgggatgatctactcgcttccagggctgaaaatgtatgaacaggaatgggtgcggctccatcttctgaacatcggcggatcgcaggatattcatgtcgtccactttcatgggcagaccctcttggaaaacggtaacaagcagcatcagcttggggtgtggcctctgcttcctggtagcttcaaaaccctggagatgaaggcatcgaagccaggctggtggctcctgaacaccgaggtgggcgagaaccaacgcgcaggtatgcaaaccccattccttatcatggatagagactgtaggatgccgatgggactctccaccgggattatcagtgattcccagatcaaagcatcggaattcctcggatactgggaaccccggctggcaagattgaacaatggaggatcatacaacgcctggagcgtggaaaagctcgctgcagaattcgcttcaaagccatggatccaagtggatatgcaaaaggaggtgatcataaccggtattcaaactcagggagctaagcattacctcaagtcgtgttacaccacggaattctatgtggcgtactcgtcgaaccagattaactggcagatctttaaagggaattccactcgaaacgtgatgtactttaacggtaattccgatgcctccactatcaaggaaaatcaatttgatcctccaatcgtggcaaggtacattcgcatctcgccaacgagggcatataacagacctactctgcgcctggaactgcaaggatgtgaagtcaacggttgttcgacgccactcgggatggaaaatgggaagatagaaaacaagcaaattacggcgtccagcttcaagaagtcatggtggggagattattgggaaccctttcgcgcccggcttaatgcgcagggtagagtcaatgcatggcaggcgaaggcgaacaacaataagcaatggctcgaaatcgatcttctgaaaatcaaaaagataaccgcaattatcactcagggttgcaagtcgctgtcctcagagatgtacgtgaagtcatacactatccactactcagaacagggcgtggaatggaaaccataccgcctgaagagctccatggtcgacaagatttttgaaggaaacaccaacaccaaggggcacgtgaagaactttttcaatccccccattatctcgcgctttattcgggtgatccctaaaacctggaatcaatctatcgcgttgcgtcttgaactcttcggatgtgatatctac

SEQ ID NO: 2251 - DNA, 6672 bp, Artificial Sequence
  derived and/or modified sequence
atgtttccaggatgcccacggctgtgggtgctggtggtgctcggaactagctgggtgggttggggctctcaaggcaccgaggccgcccaactgcgccagttttacgttgccgcgcagggcatctcctggagctatcgcccagaaccaaccaattcttcacttaacttgtcagtgacatcttttaagaaaatcgtctatagggagtacgaaccttacttcaaaaaagagaaacctcagtccacaattagtggcctgctcggacccactttgtatgctgaagtgggcgatatcatcaaggtgcattttaaaaataaggccgacaagcctctctcaattcacccccaggggatccggtacagtaagctgtctgagggcgccagctatctggatcacactttcccagccgaaaagatggacgacgctgtggcgcccgggcgggagtatacctatgaatggtctatcagcgaggatagcggccccactcatgatgatcctccctgcctaacacacatttactactcccatgagaatctcatagaagacttcaactccggactgatcgggccccttttgatttgtaagaagggtacactaacagaaggggggactcagaagacttttgataaacaaatagtgttgctgtttgcagtcttcgacgagagtaaatcatggtcccagtcttctagcttgatgtacacggttaacggctacgtgaacggcaccatgcccgatataacagtctgtgctcatgatcatattagctggcatctgttaggaatgtcaagtggaccagagttgttctctattcacttcaacggccaagtgttggagcagaaccaccacaaggtatctgccatcacccttgtctccgctactagcactaccgccaatatgactgttgggcccgaaggcaagtggatcatatcttcgttgacaccaaagcatctacaggcgggcatgcaggcgtatatagacataaagaattgccccaaaaagaccaggaatttgaagaagattactcgggaacagcggcgtcacatgaagcgttgggagtatttcattgccgccgaggaggtcatctgggattatgctcccgtcatcccagccaatatggacaaaaagtaccggtcccaacatctggacaatttcagcaaccagattggtaagcattataagaaggtgatgtacacacagtatgaggacgagagtttcacgaagcacaccgttaacccaaacatgaaggaagacgggatactggggccaatcatcagggcccaggtcagagacacgctgaaaatagtttttaaaaacatggccagcagaccctactcaatttacccccatggcgtgacttttagtccatatgaggacgaggtaaactcctctttcacatccgggcgtaataacacaatgattcgcgcagtgcagccaggagaaacctacacatataaatggaatatcctggaatttgacgaaccaacagagaacgatgctcagtgtctcacgcgcccttattacagcgatgtggatataatgcgagacatcgcaagcggtctgatcggacttttgcttatatgtaagtcgcgttcacttgatcgacgcggaattcagcgagccgctgacatcgagcagcaggcggtcttcgcagtgttcgatgagaacaagagctggtatctggaggacaatatcaataaattttgcgaaaaccccgatgaagtcaaacgggacgaccctaaattttatgaatcaaacattatgtcaaccatcaacggttatgtgccagaaagcatcacaacactgggattttgtttcgatgatacagtccaatggcacttttgttccgtgggtacacaaaacgaaatcctgactattcacttcaccgggcactctttcatctacggtaagagacatgaagatacccttactttgtttcctatgcggggagaatcggtcacggtgacgatggataatgtcggcacttggatgcttaccagtatgaatagttctccacggagtaagaagttaaggctaaaattcagggatgtaaagtgtatccctgatgacgacgaggactcatacgagatttttgaacctccagagtcgaccgtgatggctactagaaaaatgcacgatcgcttagagccagaggacgaggagtcagacgccgattatgactatcaaaatagacttgccgccgctcttggcattcgatcattccgcaattcaagtctcaatcaggaggaagaagagtttaatttaaccgcgttagcactagagaatggcacagagtttgtttcctccaacacagacataatcgtagggagcaattattcatcaccctctaatattagtaagtttacggtgaataatcttgctgagcctcagaaagcacccagtcaccaacaggctaccactgctggctccccccttcggcatctgatcggtaagaacagcgtgttgaatagcagcaccgctgaacactcttcgccctattctgaggaccccatcgaggacccattgcagcccgatgtaacaggcattcgtctgctgagtctgggtgcgggcgaatttaaaagccaggagcacgctaaacacaaaggtcctaaagtggagcgggaccaagcggccaaacaccgcttcagttggatgaaattgctggctcacaaagtgggacgccacctgtcacaggacacagggtcaccaagtgggatgcggccatgggaagatctccctagccaggataccggttcaccaagccgcatgagaccgtggaaggatcccccatctgaccttctcttgctgaagcagtctaactcctccaaaatcttagtgggaaggtggcacctggctagtgaaaagggaagttacgaaatcatccaggatacagatgaggacaccgccgtgaacaattggctgatttctcctcagaatgccagccgtgcctggggtgagtctacaccactggcaaacaagcccggaaagcagtccgggcaccctaaattcccccgagtacggcacaagtcactgcaagtgcgccaggacgggggtaaatctcgtctgaaaaagtcccagttcctaatcaaaacgaggaagaagaaaaaggaaaaacacacccaccacgcaccgttgtccccgagaacattccatcccttgagatccgaagcctataataccttctctgagcggcggctgaagcactcgctggtccttcataagtctaacgagacatcgctgcccacggatctgaaccagacattgccttctatggattttggttggattgcgtccctccctgatcataaccagaattcatctaacgatactgggcaggcttcttgtccccccggcctgtaccagactgttcctcccgaggagcactatcaaacattccctatacaggaccctgatcagatgcactccacctccgacccttcacatagaagttcgagcccggaactgtctgagatgttagaatacgatcggtctcataaatcattcccgacagacatttcccagatgagcccctcttctgaacacgaggtctggcaaacagtaatttcgccggacctttcacaggtgacactctcccccgagcttagccaaactaatctttctcctgacctgtctcataccaccctctcacccgagcttatccagagaaacctgagccccgccctcggtcagatgcccatctcccccgacctgtctcacacaacactttcacctgacctgtcccatacaaccttatccctggatttatcacaaacgaacctgagcccggaactatctcaaactaaccttagccccgccctcggccagatgccactgtcccctgatctcagtcatacgacgctttcccttgactttagtcagaccaatttgagccctgaattgtcacatatgaccctttctccggagttgagtcagaccaacctgtcccccgctctggggcagatgcctatatctcctgacctgagccacacaacactttctctcgatttttcccagaccaacctcagcccggaactgtcgcaaacgaatctctctcctgccctcgggcagatgcccctgtccccggatccaagccacaccaccctctcgttagatctcagccagactaatttatccccagagctgtctcaaacaaatctttcccctgacctgtctgaaatgccactgttcgctgatctgtctcagataccactgacccccgacctcgatcagatgacactcagccccgatctgggtgaaacggacttgtcccctaactttggccagatgtccctctccccagatctgtctcaggtcacattgtctcccgacatcagcgacaccaccttgctgcctgacctttcacagatctctcctcctccagacctggaccaaatattttacccatcggaaagctcgcagagcctgctcttgcaggagttcaatgaaagtttcccctatccagacttagggcagatgccctccccatcttcacccacattgaacgacacctttctgtcaaaagagttcaatccccttgtgatagtcggactgagtaaggacggaacagactatattgaaatcattccaaaagaggaagtgcagagtagcgaggacgattacgcagaaatcgactatgtcccctatgacgacccttataaaacggacgtgcgcacaaatattaattcaagccgagacccggacaatatcgcagcatggtatctgaggagtaataatggcaacagaaggaactattacattgcggcagaggaaatctcatgggattactcggaattcgtgcagagggagactgacattgaggactccgatgatattcctgaagataccacttataagaaggtagtgttcagaaaatacctggattcaacctttactaagcgggaccctcggggagagtatgaggaacacctagggatcctggggccaattatccgggcagaggtggatgacgttattcaggtcaggttcaagaatctggcctcacgaccctattctttacacgcacacggcctgtcatacgaaaagtcctccgaggggaagacctacgaagacgacagcccagagtggttcaaggaggacaatgctgtccagcctaactccagctacacatacgtgtggcatgccaccgagcgcagtgggcctgagagccctgggtcagcgtgtcgtgcctgggcctactactccgcggttaacccagagaaagacatacactctggcttaattgggccgctactgatttgtcagaaagggattctccacaaagacagcaacatgcctatggatatgagggaattcgttctcctctttatgacatttgatgaaaagaaatcatggtattatgaaaagaagagtcgatcatcttggcgactaacctcttccgagatgaaaaagtcacatgagtttcatgcgattaacggaatgatctatagtctgcctgggctgaagatgtacgagcaggaatgggtaagactgcacctcctgaatataggcgggtcgcaagacatccacgtggtccactttcatgggcagactctcctagaaaacggcaacaagcagcatcagctaggcgtatggccgctcctccccggctcttttaaaactttagaaatgaaggcgtccaagcccgggtggtggctgctgaacactgaagtaggggaaaatcagagggcggggatgcagactccgtttctcattatggatcgcgactgccgaatgccaatgggtttgagcactgggattataagtgattcacagatcaaggctagcgagttcctgggctactgggagccgcgtctggccagattaaataacggaggctcttacaacgcctggagtgtcgagaagctggccgcggagtttgctagcaagccatggatccaggttgatatgcagaaggaagttatcatcaccgggatccagacccaaggggcaaaacattatctcaaatcatgctatacgactgagttctatgtggcttatagcagcaaccagataaactggcagatctttaagggaaactctaccagaaacgtcatgtacttcaacggcaattctgatgcaagcacaattaaggagaaccagtttgacccaccgatcgtcgctaggtacattagaataagccctaccagagcctataatcgccctaccctccggttggaactccaggggtgtgaggtcaacggttgctccaccccattgggcatggagaatggaaagatcgaaaataaacaaatcacagcgtcaagttttaagaaatcctggtggggggattactgggagccatttagggctcgtttgaatgcccaagggagggtgaacgcgtggcaggctaaagctaacaacaacaagcaatggttagagatcgacctcttaaaaattaagaagatcaccgcaatcatcacgcagggttgtaaatccctctctagtgaaatgtatgtcaagagttacacaatccattattcagagcagggcgtggagtggaagccttaccggctcaaatcttcaatggtggataagatcttcgagggcaacacaaacacgaaagggcatgtgaaaaatttctttaatcccccaatcatatctaggtttatccgcgtgattcctaagacatggaatcagtccattgcattgcgccttgagctctttggatgtgatatctac

SEQ ID NO: 2252 - DNA, 6672 bp, Artificial Sequence
  derived and/or modified sequence
atgtttcccggctgtccccgattgtgggtgttagtagtcctgggcacatcctgggttgggtggggatcccagggaaccgaagctgcccagctgcgtcagttctatgtcgccgcccagggcatctcatggtcctatcgcccggaaccaactaattcgtctctgaacctttccgtgaccagctttaaaaaaatcgtttacagggagtacgaaccctactttaaaaaggagaaacctcagtctacgatcagtgggttactcgggccaactctctacgctgaagtcggcgacattataaaggtgcactttaagaataaggctgataaaccgctgtctatacatccacagggaatacggtatagcaaactgagcgaaggtgcgagttatctcgaccacacgtttcctgctgagaaaatggacgatgccgttgcccccggtcgagaatatacatacgaatggtcaatttctgaggattctggcccaactcatgacgaccccccatgcctgacgcacatatattactctcacgagaacctcattgaggactttaattctggcctgattgggcctctgcttatctgtaaaaagggaaccctcactgaggggggtacacagaagacatttgacaaacaaattgtgctgcttttcgcggtgtttgacgagtccaagtcttggagtcagagcagcagtctcatgtatacagtcaacggatatgtgaacggaacaatgcctgacatcacagtatgcgcccatgaccacatcagttggcacctattgggaatgtctagcggcccggaattgttttcgatccactttaacggccaggtcctggagcagaaccaccataaggtgagcgccatcacactagtgagtgccacatctacaaccgcaaacatgactgttgggcccgaaggcaagtggatcatctcctccctcactcccaaacacctgcaggcaggcatgcaagcgtatatagatataaagaattgtccaaaaaagacgcgtaatctgaaaaagattacccgcgaacagagacggcatatgaaacgctgggaatattttatcgctgcagaagaggtcatctgggattacgcccccgtgattccggcaaacatggacaagaagtaccggtctcaacacctggacaacttctcaaaccagatcggtaaacattacaagaaggtgatgtatacacagtacgaggacgaaagttttacaaagcacaccgtgaatcctaatatgaaggaagacgggatacttggacccatcatcagggcacaggttcgtgatacattgaagatcgtgtttaagaacatggcctcccggccatactccatctacccacacggggttacttttagcccgtacgaggatgaggtgaactcctcttttacttctggtcggaataataccatgattcgggccgtccagccgggggagacttacacctacaagtggaacattctggaattcgacgagcccacggaaaacgatgcgcagtgccttacgaggccatactactcggatgtcgacatcatgcgggatatcgcttccggtctgattggcctgttgcttatctgcaaatcccggtcactggaccgccggggcattcagagggccgctgatattgagcaacaggccgtctttgctgtgttcgatgaaaacaagagctggtacttggaggataatatcaataagttctgtgaaaatcccgatgaggttaaacgtgacgatcctaaattttatgaatctaacatcatgtcgacgataaatggttacgtccccgaatctataactactcttggcttctgcttcgatgacaccgtgcaatggcacttttgctctgttggcacccagaatgagattctgactattcatttcacagggcactccttcatttacggcaaaaggcacgaagacactcttactctattccccatgaggggcgaatccgtgaccgtgactatggataatgtggggacatggatgttgacatcgatgaacagctcacctcgtagcaaaaaactccgccttaagtttcgcgatgtcaaatgcatccccgacgacgatgaggatagttatgagatctttgagccacccgaatcaacagtcatggccacgcgaaaaatgcacgaccgactcgagcctgaggacgaggaaagtgatgccgactatgactaccagaataggctcgccgcagccctaggcattaggagcttcaggaactcctctcttaaccaggaggaggaggagttcaatctgaccgcattagctttggagaacgggacagaatttgtgagcagtaacaccgacattatcgtgggcagtaactacagtagcccctccaatatctcaaagttcacagtgaataacctcgccgagccccagaaagctccttcccaccaacaagccacaaccgcaggatccccacttcgccacctgatcggcaagaacagcgtactgaacagctccacggctgaacacagctccccttacagtgaggaccccattgaagaccccctccagcccgacgtcaccggcatcagactgctgtccttaggcgccggggaattcaaaagccaagagcacgcgaaacataaaggccccaaagtagagagagaccaggccgcgaaacatcgcttctcctggatgaagctgcttgctcataaggtcggacggcacctctcacaggatactgggtccccctcaggtatgaggccctgggaggacctcccttctcaggacaccggttccccttcgaggatgaggccttggaaagatcccccctcagatcttcttttattaaaacaatctaacagcagcaagatcctggtaggacgctggcatctagccagtgagaagggaagttatgagatcatacaggacacagacgaggacactgccgttaacaattggctaatcagcccccaaaatgcttcacgggcgtggggtgaaagtacccccttagctaacaagcccggcaagcagagtgggcatccgaagtttccaagagtgaggcataagagtctgcaggtccgacaggatggggggaagagcagattaaagaagtcccagtttctgattaagacgcgcaagaaaaagaaagagaagcacactcaccatgcccccctctcaccccgtaccttccaccccctacggtcagaggcttacaatactttctccgaacgcaggctgaaacacagcctcgttctccacaaatcaaatgaaacgtcactcccaacagatctgaatcagacactgcctagcatggacttcggatggatcgcaagtttacccgaccacaaccaaaatagtagtaacgataccggtcaggcatcatgtccaccagggctgtaccagaccgtgccaccagaagagcactaccaaaccttccccatccaggatcctgaccaaatgcattccacctccgatccttcccatcgatcaagttccccagaactctcagagatgctggagtacgatcggtcacacaagtcattcccaacggatatcagccaaatgtccccttcctccgagcacgaggtttggcagactgtgatctcccccgatctgtcacaagtcaccctttccccagagttgtcacaaaccaatttgtccccggaccttagccacaccacactatcacccgagctaatacagcgaaacctgagccccgccctgggccagatgccaattagccctgatctctctcacaccacactaagccccgatctctcgcatactactctcagtctggacctgtcacagaccaatctgtctccagagctctctcagaccaacctgagccccgcactggggcaaatgccactgagtcctgacctcagtcacacgacgctttcgctagacttctctcagactaacttgtccccggagctctctcatatgacgctctcgcccgagttatcccagactaatttatcccctgcgcttgggcagatgccaatctcacccgatctgtcccacacaaccctctccttggatttcagccagaccaatttgtcgcctgagctgagccagactaacctgtcccctgcccttggacagatgccactttcccctgacccttcccacaccaccctgagcctggatctctctcagacaaatttatccccggagctgtctcagacaaacctaagccctgatcttagtgagatgccattgtttgctgatctgtctcaaatccctctgacccccgacttggaccagatgacactgtccccagacctgggcgaaaccgacctttcaccgaactttggccagatgtctctctctccagatctttctcaggtaaccctcagcccagacattagtgacacaacactccttcccgacttatctcaaatttctccgcctcccgatttggaccagatcttctacccctctgagtccagccagagcctgctgctccaagaatttaatgaatcatttccctatcccgatttggggcagatgccatccccttcttctcctactttaaacgacaccttcctcagcaaagagtttaacccattggtgattgtcggcctctccaaggatgggaccgactatattgagataattcctaaagaggaggtgcagtcctctgaggatgattacgcagagattgattatgtgccctatgatgatccttacaagacagatgtcaggacgaacatcaatagcagcagggatcccgataatattgctgcctggtacctgcgatcaaacaatggtaacaggcgcaactactacattgctgccgaagaaatcagctgggactactccgaatttgtgcagcgggagacggacattgaggactctgacgacatccctgaagacacgacctacaaaaaagtcgtgttccgtaagtatctggacagcaccttcacgaaaagggacccccggggcgagtacgaggagcatctgggaattttgggccctatcattcgtgcggaggtggatgatgtcatccaggtgagattcaaaaacttggcatcccgtccatatagtctgcatgcccacggcctgtcctatgagaagagctctgagggaaaaacctacgaggatgactctcctgagtggtttaaagaggacaacgcagtgcagcccaattcctcttatacatacgtgtggcatgcaacagagcggagtggcccagagagtcccggatcggcctgccgcgcgtgggcctactacagcgctgtcaatcccgagaaggacattcacagcggcctcatagggcccttgctgatttgccagaaaggtattcttcacaaagactctaatatgcccatggacatgagagagtttgtgctgctgttcatgacctttgatgagaaaaagtcttggtattacgagaaaaaatcacggtccagttggcggctgacgagctctgagatgaaaaagtctcacgaattccatgccattaatgggatgatctactcactgccaggccttaagatgtacgagcaggagtgggtaagactccatctactgaacatcgggggctcacaagatattcacgtggtgcacttccatggccagacactccttgaaaacggaaacaagcagcaccagctgggcgtctggccactgctccccggatccttcaaaacattggagatgaaggcatctaagccaggctggtggctcctaaacacagaggtaggcgagaaccagcgtgccgggatgcagacacctttcctgataatggaccgcgactgcaggatgcccatgggactgagtacaggcattatttcggacagccagatcaaagcttcagagttcctgggatactgggaacccagacttgcccgcctgaacaatggaggcagttataacgcttggtccgtggagaaactggcagccgaattcgcgtcaaagccttggattcaggtggatatgcaaaaggaggtgatcatcaccggcatccagacacagggagctaagcattatctgaagtcttgctatactacggagttctacgtggcctactcctccaaccagattaactggcagatcttcaaaggtaatagtaccagaaatgtcatgtacttcaacggcaatagcgacgcttcaaccattaaggaaaaccaattcgatccacctatcgtagcacggtatatccgcataagtcctacaagagcctacaatcgtcctaccttaagacttgagttacagggctgcgaagtgaacggatgcagcactcctctgggcatggagaacgggaagattgaaaacaaacagattactgccagtagcttcaagaagtcctggtggggtgactactgggagcctttccgcgccagactaaacgcacaaggtcgagtcaacgcctggcaggcgaaggctaacaataataagcagtggcttgaaatcgacttgctgaaaataaagaaaatcactgcaattatcacccagggttgtaaaagcctgtcttcggagatgtacgtgaagagttacaccatacattattctgaacagggcgtggagtggaagccgtaccgccttaaatccagcatggtagataagatctttgaaggtaacactaacacgaaagggcacgtgaaaaatttcttcaacccacctatcatcagtaggtttattcgggtgattcctaaaacctggaatcagtccatcgcccttaggctcgagctgttcggttgcgacatctat

SEQ ID NO: 2253 - DNA, 6672 bp, Artificial Sequence
  derived and/or modified sequence
atgttccccggatgcccccgcttatgggtgctcgtggtcctgggaacaagttgggttgggtgggggtcccaaggcaccgaggccgcgcaactgcgtcagttttacgtggccgctcagggcattagttggagctatcgaccagagcctacaaatagctcattaaacctgtccgtgactagttttaaaaagatcgtgtaccgagagtacgagccatactttaagaaggaaaagccacagtctaccatcagtgggttgcttggtcccacactgtacgcggaagttggcgacatcattaaagttcacttcaagaataaggctgacaagccactaagtatccacccacaaggaataaggtactcgaaactgagtgagggcgcgtcttacctggatcatacattccccgctgagaagatggacgatgctgtggcacccggccgggagtatacctacgagtggagtatcagcgaagacagtggccccacccatgacgatcctccttgtttgacacatatttactactcccacgagaatctgatcgaggactttaactcgggactcattggtcctctcttaatctgtaaaaaaggcactctgaccgaaggtggtacgcagaaaaccttcgataaacagattgtgttgctgtttgccgtgttcgacgaatccaaatcctggagtcagtccagctctctgatgtacactgtgaatggctacgtgaacggtaccatgccggacattacagtgtgtgcccatgatcatatcagctggcatctcctcggaatgagcagcggcccagagctgttctctatacacttcaacggacaggtgctagaacaaaaccatcacaaggtgtcagcaatcacattagtgagcgcaactagcacaaccgcgaacatgacagtcggccctgagggaaaatggatcattagctctctgaccccaaaacacctgcaggcgggtatgcaggcatatatcgacattaagaactgtccgaaaaaaacacggaatctcaagaaaatcacccgagagcagagaaggcacatgaagcgctgggagtactttatcgcagctgaggaggtgatttgggactacgcccccgttatccctgctaatatggacaagaagtacaggtcgcagcatttggataacttcagcaatcaaattggcaagcattacaagaaggtcatgtatactcagtatgaagacgagtcttttacaaaacataccgtcaaccccaatatgaaagaagatggtatcctgggccctatcatccgtgctcaggtccgtgacaccctgaagatcgtctttaagaatatggcctcgagaccttatagcatatatccccatggagtaacgttttcaccgtacgaggacgaggtcaatagcagcttcacttcaggcagaaataatacgatgatacgcgctgtacagcctggcgaaacatatacctataagtggaacattctggagtttgacgagccgacagagaatgacgcccagtgtctgaccagaccatattactcggacgtggatattatgagagatattgcatccggcctcataggcctgcttttaatctgtaaatcaagatctctcgacagacggggcatccagagggccgccgacattgaacagcaggcagtgtttgccgtcttcgacgagaacaagtcgtggtatctggaagataatatcaataagttctgtgagaaccctgatgaagtgaaacgggatgaccctaaattttatgaaagtaacatcatgtccactataaacggatatgtgcccgaaagcattaccactttaggcttttgcttcgatgacacagttcagtggcacttctgtagcgtaggcacccaaaatgaaattctcactatccatttcaccgggcatagcttcatttacggcaagagacacgaagatactttgactctattccccatgcgcggagagagtgtgacagtgacaatggataatgtgggcacgtggatgctaacctctatgaattcttcgccacggagcaagaagcttaggctcaaatttagggatgtgaagtgcatccccgacgacgatgaagacagctacgaaatattcgagcctcccgagtccaccgtgatggccacccgtaaaatgcacgatagacttgaaccggaggatgaagaatctgatgccgactacgattatcagaatagactcgccgccgccttgggaatcaggtcattcaggaattcatccttaaatcaagaagaagaggagtttaatctcacagccctggcactggagaacggtaccgaattcgtctccagtaacaccgatattatcgtcgggtcaaactacagttctcctagcaacataagcaagtttaccgtgaacaatctggcggagccacagaaagcccccagtcatcaacaggcaacaactgccggaagtccactgcgacatctcatcggaaagaattccgtcctaaattcatcaacagcagaacactcatccccctattcggaagatcctatcgaggaccctttgcagcctgatgttaccggcatccggttattgagtttgggggctggcgaatttaaatcacaggagcacgcgaagcacaaggggccaaaagtggagcgagaccaggctgcaaaacacagattctcgtggatgaagcttttggcccacaaggtgggccgccacctttcgcaggacacaggtagtcccagtgggatgaggccttgggaagacctgccctctcaggacacggggagcccttcacgtatgcgtccatggaaggatccacccagtgacctgttgctactcaagcagagcaactcaagcaaaatcctggtgggaaggtggcatcttgccagcgagaaagggagctatgaaattattcaggatactgacgaggacactgcagtcaataattggctgatcagcccgcagaatgcgtctagagcgtggggtgaatcaactcctctggctaacaaacctgggaagcaaagcggacatcccaagtttccaagagtgcgccacaaaagcctgcaagtgcgccaggatggcggcaaaagccgacttaagaagtcccaattcctgatcaagacccggaaaaaaaagaaggagaagcacactcaccatgccccgctgtctccacggacctttcaccctcttcggagtgaagcgtataataccttcagtgagagacgcttgaaacacagtctcgtactgcacaagagcaacgaaacgagtctcccaaccgatctcaaccagacattgccgtcgatggatttcggttggattgcgtcgttaccagatcataaccagaacagctccaacgacacaggacaagcatcgtgccctcctggcctgtaccagactgttcctcccgaggagcattatcagacatttccaatacaagatccggatcaaatgcacagtacttcagatccgagccataggtcatcctccccagaattgtctgagatgctagaatacgatcgttcacacaaaagtttcccaaccgacatcagccaaatgtccccttcatctgaacatgaggtgtggcaaacagtcatctccccagacctcagccaagtgaccctgtccccagaactgtcacagacaaacctgagccccgacctcagccacaccaccctcagtccagagctcattcagaggaacttgtcgcccgccctcggtcagatgcccatcagtcccgacctgtctcacaccacactgagccccgatttgagtcacaccaccctctcactcgacctgagccagaccaatttgtcaccagagctgagccaaaccaatttgagtcctgccctgggccaaatgcctttgtctccagacctgtcccacactaccctatcgcttgacttctctcaaaccaatctgtcacctgagctcagccacatgacattaagccccgagctgtcccagacaaatctgtcgccagcactcggccaaatgcccatatcccccgatctctcccatacaacattgtcccttgacttttctcagacgaacctgtccccagagcttagtcagaccaacctctcacccgctctcgggcagatgcccctgagtccagatccgagccacacaacactttccttggatctctcccagacaaatctgtcccctgaactgtcacaaacgaatctgtcaccggatctgagcgagatgcccctgttcgccgacctgtcccagattcccctgacacccgacctggaccagatgacgctctctcctgacttgggtgaaacagatttgtccccaaattttgggcagatgtcgctgagcccagatctgtctcaggtcaccttatctcctgacatttcggataccacgttgttgccagatctctcccagatctcgcctccaccagatctggatcaaattttttacccatccgagtcctcccagtccctgctcctgcaggagttcaatgaatccttcccatacccagatctcggccaaatgccctcaccatcgtcacctaccctgaatgacacgtttttgtccaaagaatttaaccctctagtgatagtaggcctctctaaagatggaaccgattacatcgaaatcatcccaaaggaggaagtccaatctagcgaggacgattatgccgagatcgactatgtaccttacgacgatccatataagaccgacgtgagaacaaacataaatagctctcgggatccagataatatagctgcctggtatctgcgtagtaataatggaaatcggagaaattactacatagccgctgaggagatctcctgggactactccgaattcgttcaaagggagacggacattgaggatagcgatgatattcccgaggatactacatacaaaaaggtggtgtttaggaagtacctagactctactttcactaagcgcgatcccaggggggagtacgaggaacatcttggcatcctgggcccaatcatccgcgccgaggtcgacgacgtcatacaggtccgcttcaaaaacttagcgtcccggccctattcccttcacgcccacggtctgtcgtatgaaaaaagctccgaaggaaagacttatgaggacgactcccccgaatggttcaaagaagacaacgctgtgcagcccaactcctcctatacttacgtgtggcacgcaaccgagcggtcaggtcccgagtccccgggaagcgcctgtagagcctgggcttactattccgcagtgaacccagaaaaagacattcattccggactaatcggacctctgctgatctgtcagaaaggcattctgcataaagactccaatatgccgatggacatgagagagttcgttctgttgtttatgacatttgacgagaagaagtcctggtactacgaaaaaaagtctaggtcctcgtggagactgaccagctcggagatgaagaagtcccacgagtttcatgcgataaatggtatgatttacagtctccccggcctcaaaatgtatgagcaggaatgggtacggttgcacctgctgaatatcggaggaagtcaggatatacacgtggtgcactttcacggtcagactctgttggagaacgggaacaaacagcaccagctcggcgtttggccccttttaccagggagctttaagaccctggagatgaaggccagcaaaccaggctggtggctgttgaacacagaagttggggaaaaccagagggccggtatgcagaccccattcctgatcatggacagggactgccgcatgccaatgggcctgtctacgggcataatctccgatagtcagattaaggcctctgagtttctgggctattgggaaccccggctcgcgaggctgaacaacggaggatcttataacgcatggtccgttgagaaactcgcagcagaattcgccagcaaaccatggatccaggttgacatgcagaaagaagtgatcatcactggcatacaaactcagggcgcaaagcactatctcaagagctgttacaccacagagttttacgtggcttatagcagtaatcagatcaactggcaaatttttaaagggaattccacccgaaatgtgatgtactttaacgggaactcagatgcctctaccattaaggaaaaccaattcgatccacctatagtcgcccgttatattcgcatctctccaacccgggcttacaaccggcctacactcaggttagaactccagggctgtgaagtgaatggatgctccacgcccctcggcatggagaatggaaagatcgaaaacaagcagataaccgcttcctcatttaagaagtcatggtggggcgactattgggagccgttccgagctaggttgaatgcccaaggcagagttaatgcctggcaggcaaaggcgaataacaacaaacagtggttggagatagatctgctcaaaatcaagaagataacagcgattatcacccaaggctgcaagtcgctctcatcggagatgtacgtgaagagctataccatccattactctgagcaaggggtggagtggaagccatatcggttgaaatccagcatggtagacaagatcttcgaggggaacacaaacacgaaaggccacgtgaaaaacttttttaatccccccataatttcaagatttatcagggtgatccccaagacctggaatcaaagtatagcacttcggcttgagctctttgggtgcgatatttac

SEQ ID NO: 2254 - DNA, 6672 bp, Artificial Sequence
  derived and/or modified sequence
atgttccccgggtgccctcgactgtgggtcctagtggtgcttggcacctcatgggtaggctggggctcacaaggcacggaggcagctcagctccggcagttctatgtggccgcccaggggatttcatggagctacaggcccgaacctactaattcttctctaaacctcagtgtcaccagctttaaaaagatagtgtaccgggaatacgagccatattttaagaaagagaaaccacagtctaccatctctgggcttctcggaccaactctctatgccgaggtgggcgatattatcaaggtccatttcaaaaacaaagctgacaaacctctctcaattcacccacaagggatccgttactcaaaactctcagagggtgcctcttacctcgaccatacctttcccgctgaaaagatggatgacgccgtggcccccggccgcgaatatacatacgaatggtctatttctgaggattccggcccgactcacgacgaccctccctgcttgacgcacatctactattcccacgaaaacctgatcgaggactttaactccggccttatagggcctctgctaatttgtaagaaaggcacacttacggaggggggcacgcagaagacctttgacaaacagattgtgctgctgtttgccgttttcgacgaatcgaagagttggtcgcaatcaagctccttaatgtacacggtgaatggctatgtcaacggtacaatgccagacattacggtgtgcgcacacgaccatattagctggcaccttttaggaatgtcgagtgggcccgagctgttctctatccattttaacggacaggtgctggagcagaaccaccataaagtctccgcaattactttggtttctgcaaccagtacgactgcgaatatgacggtggggccggagggcaaatggataatatccagcctcacccctaagcatctccaggccggaatgcaagcgtatatcgatatcaagaactgtccaaagaagactcggaacctgaagaaaattactcgggaacagcgccgccacatgaagcggtgggagtacttcattgcagctgaggaagtaatttgggactacgcccccgttatccccgctaacatggataagaagtaccgatcccaacacctagacaacttctcaaaccagatcggaaaacattacaaaaaagtgatgtacacacagtatgaggacgagtcatttaccaaacacaccgtcaatccaaacatgaaggaagatggcatcctgggcccaattattagagctcaggtgcgggacactctcaaaatcgttttcaaaaatatggcatcacggccatacagcatatacccccatggagtgaccttctccccatacgaggatgaagtgaactcttcttttacatctggccggaacaatacaatgattcgagccgtacagccaggcgagacctacacctacaagtggaacatattggagtttgatgagccaactgaaaacgatgctcagtgtttgaccagaccatactattctgacgtggacattatgcgcgacatagctagcggactaattggactgctgctgatttgcaaatccagaagccttgaccggaggggcatacagcgggcggccgatatcgagcaacaagcagtgtttgccgtgttcgacgagaacaagagctggtacctagaagacaacatcaataagttttgcgagaatcctgacgaggtgaagagagacgacccgaaattttacgagagtaacatcatgtcaacaattaatggctatgtacccgagtcaatcacaaccctggggttctgtttcgacgacacagtgcagtggcatttctgttcagtcggcacacagaatgagattctcaccatccatttcacagggcatagcttcatttacggcaaacggcatgaagatacattgactctcttccccatgagaggtgagagcgttacagttaccatggataacgtgggaacctggatgctcacttctatgaattcttcccctcggtccaaaaaactacgactgaagtttagagatgtgaaatgcatccctgatgatgatgaggacagttatgagattttcgagcctccagagagcactgtcatggcaactagaaaaatgcacgatcgactggaacctgaggatgaagaatcggacgctgactacgactatcaaaatagactcgctgcagccttaggcattaggtcgtttcgaaatagttccctgaatcaggaagaggaggagttcaacctgaccgcccttgctttagaaaatggtaccgagtttgtgtcctccaatacagacattatagtcgggtctaactacagttcgccttcaaacatttctaagtttactgtgaacaatctggcagagcctcaaaaggctcctagtcaccagcaggctaccaccgccgggtctccactgcggcacctgatcggcaagaattctgtcctcaattctagcacagctgagcattccagcccatatagcgaggaccccatcgaagatccattgcagccagacgtaacaggtatccggctcttgagccttggcgctggggagtttaaatcccaggagcacgcaaaacacaaaggccctaaagtggaaagggaccaggccgctaagcacagattttcttggatgaagttgctggctcacaaggtggggagacatctgtctcaggacacaggcagcccgagcggtatgagaccctgggaggacctaccaagccaggacaccggcagcccctccagaatgcggccctggaaggatccaccttccgatctccttctcttgaaacagagcaacagtagtaaaatcctcgtggggagatggcatctggcatccgaaaagggctcttatgagattatacaggatacagacgaggataccgccgttaataactggttgatttctccccagaatgcgagtagggcctggggcgaatcgaccccactggctaacaagccggggaagcagtccggacaccccaaatttccaagggtgaggcacaaatctctccaggtgcggcaggacggtggcaaatccaggctgaaaaaatctcagttcctgataaaaacccggaaaaagaaaaaggagaaacacactcatcatgctccactgtcacctcgaactttccacccactgcggtcggaggcatataatactttctctgagaggcgccttaagcacagcctggttctgcataagagcaatgaaactagcctccccaccgatttgaatcagactctgccctcaatggattttggctggatagctagtcttcctgatcataatcagaattcaagtaacgacaccggccaggcctcatgccctcctggcctgtaccaaaccgtgccacccgaggaacactatcaaacattccccatacaagacccagatcagatgcacagcacaagtgacccgtcccaccgatcgtcatcccctgaactgtccgagatgctcgagtatgaccggtcccacaaatcctttccgacagacatcagtcagatgtccccttcaagcgagcacgaagtatggcagacagtaatttccccggatctgtcacaagtgaccctctccccagagttatctcagaccaatttgtctcctgacctttcccatacaaccctctctcccgaactgatccaacgcaacctgagcccagcgctcggccagatgcctatctctccggatctaagccatacgacactgtccccagacttgagccacactactctgtctctagacctctctcagaccaacctctctcctgaactcagccagaccaatctatcaccagctcttggccaaatgcctctgagcccggacttgtctcacacgaccttgtcactggattttagccagaccaacctctctccagaattatcacacatgactctgtctcccgagctgtcgcaaacgaacctgtcacctgccctcggccagatgccaatcagccctgatctgagtcatacgaccttgagtttggattttagccagaccaatctgtctcccgaactcagccagaccaatttgtctcctgctcttgggcagatgcctctgagccccgacccctcccacaccacactgtcacttgacctgtcccagactaacctgtctcccgaactgtcccaaactaatttgagcccagatttgtccgaaatgcctctgtttgccgatctaagtcagattccacttactccagatctggaccagatgaccttgagtcccgaccttggagagacagacctctctcctaatttcggccagatgagcctgtccccagatctgtcccaggtgactttgtctccagacatatccgacaccacccttctgccagatttatctcaaatcagtccacctcccgatctggaccaaattttctatccctcagagagctctcagagtcttctcctgcaagagttcaacgagtcttttccctaccccgaccttggtcaaatgcctagccccagcagccctacacttaacgataccttcctatccaaggaattcaatcccctggtcattgtgggactgtcaaaagatgggactgattatatcgagatcattcctaaagaagaggtccagtccagcgaggatgactacgcagaaattgactatgtgccatatgacgacccatacaagacagacgttcgcacaaacataaattccagcagagatccagacaacatcgccgcctggtacttgaggtcaaacaatggaaatcggagaaattattatatcgccgctgaggaaatctcttgggattacagcgagttcgtccaacgtgaaaccgacatagaggactccgatgatattcccgaggatactacatacaaaaaggtggtattccggaaatatctagattccaccttcaccaaaagggaccccagaggcgaatatgaggagcacctcggtatccttggacccattatcagggcggaagttgacgacgtcattcaggtccgttttaagaacttggcttctaggccctattccctgcacgcacacgggctgtcatatgaaaagagctccgaaggcaagacctatgaagatgattctcccgaatggtttaaagaagacaatgcagtgcagccaaattcctcctacacttatgtctggcatgccacagaaaggtctgggcccgaatccccagggtcagcctgcagggcttgggcttattattccgccgtgaatccagagaaagacatacacagcggactgattggaccgctgctcatctgtcaaaagggcatacttcataaggatagcaatatgccgatggatatgcgagagtttgttttgctgtttatgaccttcgacgagaaaaagtcttggtattatgagaagaagagcagatcatcttggcggctcacctcgagcgaaatgaagaaatctcatgagttccatgccattaacggtatgatatactcactaccagggctgaagatgtatgagcaggaatgggtaaggctgcatctcttgaatatcgggggttcgcaagacattcatgtcgtgcactttcatggtcagacactgctcgaaaacggcaataaacaacaccagctgggggtatggccgctcttacctggatccttcaagaccttggaaatgaaagcatctaaacccggctggtggttgttgaacaccgaggttggggagaaccagcgcgccggaatgcagaccccctttctcatcatggatagggactgtagaatgcccatgggtcttagtacgggaatcatttctgatagccaaatcaaagcctcggagtttttgggctactgggaacctagactggctaggttaaataatgggggttcatataatgcttggtcagtggaaaagttggctgccgagttcgcatccaagccatggatccaggtggatatgcaaaaggaagttattatcactggcatccagacccaaggtgctaagcattatctaaagtcctgttacacaacagaattctacgtagcttactccagcaaccagatcaattggcagatctttaagggaaactctacgcgcaatgtgatgtactttaacggtaacagtgatgcatccacaatcaaggagaaccagttcgatcctcccatcgtcgcacgctatattcgcatttcccccactcgtgcatataatcgccctaccttgcggctggagctccaggggtgcgaagtgaacggttgttctacccccctggggatggagaacggcaaaatagagaataagcagatcacagctagctcgttcaagaaatcctggtggggggactactgggaaccattcagagcccgtcttaatgcccaaggccgggtgaacgcctggcaggcaaaggccaacaacaacaagcagtggctcgagattgatctcttgaaaatcaaaaaaatcacagcaatcataacacagggatgcaaatccctcagcagtgagatgtatgtaaagagttataccattcattactccgaacagggggtggagtggaagccctatcggctgaaatcctccatggtggacaagatattcgaagggaataccaacacgaagggtcacgttaagaacttttttaaccctcccataattagccgattcattagggtcattccaaagacttggaaccaaagcatcgccctgagactcgagctgttcggatgtgacatttat

SEQ ID NO: 2255 - DNA, 6672 bp, Artificial Sequence
  derived and/or modified sequence
atgttcccaggttgtccaaggctgtgggttctggtagtgctgggaacctcttgggtgggttggggttcacagggcacggaggctgcccagctccgacagttttacgtcgccgcacagggcatcagctggtcctaccgaccagaaccaacgaatagcagcctgaatctttcggtgaccagtttcaagaagattgtgtaccgcgaatatgagccttacttcaagaaagagaagccgcaatccacaatttccggactactcggaccgacactatacgccgaggtaggagatatcataaaggtccactttaagaacaaggccgacaagcccctctcgattcacccacagggcatccgctattcgaagttgagtgagggtgccagttaccttgaccatacattcccagcagagaagatggatgatgcggttgctcccggacgagagtacacctacgaatggtcgatctcagaggattccggtccaacccatgatgatcccccctgtttgacccatatctattactcccatgagaacctgatagaagatttcaacagcggcctaatcggaccccttcttatatgtaagaagggcacgctgacggagggcggtactcagaagacgttcgataagcagatcgtacttttgttcgcagttttcgatgaatctaaatcctggtcccagtcgagctccctgatgtataccgtgaatggctacgtcaacggcaccatgcccgatatcacggtgtgtgctcatgatcacatttcgtggcacttgctgggtatgtcgagtggccccgagttgttctcgatccacttcaacggacaggtccttgagcagaatcaccacaaagtgtctgctataaccctcgtgagcgctacaagcaccacggcgaatatgacggttggccctgagggaaagtggatcatatcctccctgacgccgaagcatcttcaggccggaatgcaggcgtacatagacatcaagaactgtcccaagaagacccgcaatctgaagaagattacgcgcgagcaacgccgtcacatgaaacgctgggaatatttcatagccgcggaagaagtgatctgggattacgccccagtgattccggccaatatggataagaagtaccgctcccagcacttagataacttcagcaatcagatcgggaagcattataagaaggttatgtatacccagtacgaagatgagtcgttcacgaagcacaccgtgaatccgaacatgaaggaggatggtatcctaggaccaattatcagggcccaggtgcgcgatacgcttaagatcgtattcaagaacatggcttctcgcccatattccatctacccccacggcgttactttctcaccatacgaggacgaggtgaattcaagtttcacgtcgggccggaataacaccatgatcagggccgttcaaccaggagagacctacacctataagtggaacatattggaattcgatgaaccaacggagaacgacgcccagtgtctgacccgaccctattacagcgacgtggatatcatgagagacattgcgagtggccttattggccttctgttaatctgtaagtcacggtctctcgaccgccgaggaatccagcgagctgctgatatcgagcaacaggccgtgttcgcggtattcgacgaaaataagagctggtatctggaggataacatcaacaaattttgcgagaacccggacgaagttaagcgcgatgatcccaagttctacgagtcaaatatcatgtccacaatcaatggctacgtgccagagagtattaccaccttgggtttctgcttcgacgacacagtgcagtggcacttctgcagcgtgggcacccagaacgagattttgaccattcactttactggccatagctttatttatggcaagcgccacgaggatacgttgacgctgttcccaatgaggggcgagtcagttacagtcacaatggacaacgtcggtacatggatgctaacttccatgaactcttccccacgctcaaaaaagctgcgcttgaagtttagggacgttaagtgcatcccagacgacgacgaggactcgtacgaaatatttgagccaccagagtccactgtcatggccacgaggaagatgcacgatcgtctggagcccgaggacgaagaatcggatgctgattacgattaccagaacaggctggcagccgcacttggcatcagatccttccgtaactcctcgttgaaccaggaagaggaagaattcaacctgacagccctggcactggaaaacggtacagaatttgtttcctcgaacaccgacataattgtgggctccaactactcttcaccatcaaatatttcgaagtttaccgtgaataacctggccgagccacagaaggcaccatcccaccagcaggccactaccgcaggatcccccctgcgtcatttgataggcaaaaatagtgtattgaactccagcaccgctgagcacagctccccgtatagcgaagacccaatcgaggaccccttacaacccgatgttactggcatccggcttctctccctgggcgccggcgaattcaaaagtcaggagcacgccaaacataagggaccgaaggtggagagggatcaagcggccaaacatcgcttcagttggatgaagttgctggcccataaggtcggccggcacctgtcccaggacacaggctcgccctcgggcatgcgtccttgggaagatctgccctctcaggatacagggtcaccgtcacgcatgcgtccgtggaaggacccaccgagcgatcttctactcctaaagcagagtaactccagcaagatcctagtgggtcgctggcaccttgcctccgagaaaggatcgtacgagataatccaggacactgacgaggacacagccgttaataattggctaatttcaccgcagaacgcctccagggcttggggtgagtccactccactcgctaataagccaggcaagcagagcggacatccaaagtttccgcgtgttaggcacaagtctttgcaggtgcgacaggacggtggtaagtctcgcttgaagaagtctcagttcctgataaagacacgaaagaagaaaaaggaaaagcatacgcatcacgcaccgctatcaccaaggacgttccatcccctgagaagtgaggcatacaacacattctcagagcgtcggctcaaacattcgctggtgctccataagtccaatgaaacgtcgttgcctacagatctgaatcaaacccttccgagcatggacttcggctggatcgcatccctcccggatcacaaccagaactcatcgaacgacaccggacaggcaagctgcccacctggcctgtaccagaccgtgccgcccgaggaacactatcaaacctttccgatccaggatccggatcagatgcatagcaccagtgacccctctcaccgaagctcttcccctgagctgtccgagatgttggagtacgatagaagccacaagagtttcccgacagacataagccaaatgagcccttccagcgagcatgaggtttggcagacggtgatatcccccgacctctcgcaggtgacgctgtctcccgagctttcacagactaatttgagtcccgatctgagtcacaccaccctatcgccagaattgattcaacgaaacctgtcgccggcacttgggcaaatgcctatatcacctgatctatcccataccaccctgagcccagatctcagccacaccacattgagcctggacctcagtcagaccaacctgtcccccgagctgagtcagactaatctgagcccagcacttggtcaaatgcccttgtcgccggatctcagccacaccacgctgagcctagatttctctcagaccaacctatcacctgagttgtcccatatgactctgagtcctgagctgtcgcagacgaatctatcgcctgccttaggccagatgcccatctctcccgacttatcccataccaccctgtcgctcgacttctcccaaacgaacctgtcgccagagctgtcgcagacgaacttgagcccggctctgggacagatgccattgagtcccgatccgtcgcataccacccttagcctcgatctaagtcagaccaatctttccccagaactgagtcagactaacttgagtcccgatctgagtgagatgcccctgttcgccgatctgtcacagatccctctcacgccggacctggaccagatgaccttgtcacccgacctaggcgagaccgatctatccccgaactttggccagatgtccctgtcgcccgatctgtcccaggttacgctgtcgcccgatatatcggacacaacactgcttcccgatctgagccaaatatctccccccccagacctggatcagatattctacccatccgaaagctcgcaaagtctgctgttgcaagagttcaacgagtccttcccctaccccgacctgggccagatgccctcgcccagctcgcccaccctaaacgacacgtttctgagcaaagagtttaaccccctagtgatcgttgggctgtcaaaggacggcacggactatatcgagatcatccccaaggaggaggtccagagctcagaggacgactatgccgagatcgattacgtgccttatgacgacccctataagacggacgtccgcacaaatataaactcgtctcgtgaccctgacaacatcgccgcatggtacttgcgatccaataatggtaatcgccgcaattattacattgctgccgaggaaatttcctgggattactcggagtttgttcagcgtgaaaccgacatcgaggacagcgacgatataccagaggatacgacatacaaaaaggttgtgttccgaaagtatctggacagcactttcaccaagagagatccgcgtggcgagtacgaggaacacctcgggattcttggccccatcatacgtgccgaggtggacgacgtcatccaggtgcgctttaagaacctggccagcagaccgtacagccttcacgctcatggcttgtcctacgaaaagagttcggagggtaaaacgtacgaggatgatagcccagagtggttcaaggaagacaatgcagtccaacccaactcatcgtatacgtatgtgtggcatgcgacagagcggagcgggccagagtcgccgggaagtgcgtgtcgggcatgggcgtactactcagctgtcaaccccgagaaagatatccactcgggactcataggcccactacttatctgccagaagggcattctccataaggattcgaacatgccaatggacatgcgggagtttgtgttgctgtttatgacattcgatgaaaagaagagctggtactacgaaaaaaagtcacgttcctcatggcgtctgacgtccagcgagatgaaaaagagccatgagtttcatgctataaatggaatgatttactcgctccccggtctaaagatgtacgagcaagagtgggtcaggctacatctcttgaatattggtggctcgcaggatatccacgtggtacacttccatggacaaacgctgttggagaacggtaataaacaacaccagctcggcgtatggccgcttctgccgggcagtttcaagacgctagagatgaaagcaagcaagccgggctggtggctgctgaatacagaggtgggagagaaccagcgcgcgggcatgcagacaccatttctcattatggatcgcgattgtagaatgccaatggggctgtcgaccggcataatttccgactcccagataaaggcctccgagttcctggggtactgggagccacgccttgcgcgcctgaataacggcggtagctacaacgcttggtccgtcgaaaaactggctgcggaattcgccagtaagccgtggatccaagtggatatgcaaaaggaagtcataattacaggcatccagacccaaggtgccaagcactacctcaagtcttgctataccacagaattctacgttgcttactcctcgaaccaaattaattggcagattttcaaaggtaactcgacgaggaatgtcatgtactttaatggcaacagcgatgcctccacgatcaaagagaaccagtttgacccgccaattgttgcgcgttatatccgcataagcccgactcgagcctacaatcggccgacgcttcgcttagaactccagggatgcgaagttaacgggtgctccactccattgggcatggagaatggcaagattgagaataagcagatcacggcatcatcttttaagaaaagctggtggggcgattactgggaaccatttcgagcgcgtttgaacgcccaaggccgtgtgaacgcgtggcaagccaaggctaataacaataaacaatggttagaaatagaccttctgaagatcaagaaaatcactgcgataatcactcagggctgtaagtctctctccagtgagatgtacgtgaagagctacaccatccactactccgagcagggagtagaatggaagccataccggctgaaaagctccatggtggataagatcttcgagggcaatacaaataccaaaggacatgtgaagaacttctttaaccctccaattatcagtaggttcattcgcgtgatacctaagacctggaatcaaagcatagcattgcgcttagaactgtttggctgcgacatatac

SEQ ID NO: 2256 - DNA, 6672 bp, Artificial Sequence
  derived and/or modified sequence
atgtttccaggatgtccgcgcttatgggtgctggtcgtgctgggtacatcttgggtggggtggggatcacaaggaacggaggccgctcaactgagacagttttacgtagcggcacaaggaatctcttggtcatatcgcccggaaccgacgaactcatcattgaacttgtcagtcacgtcttttaaaaaaattgtttatcgtgaatatgaaccgtactttaaaaaagaaaagccgcagtctacaatttcaggtcttctggggccgaccttatatgcagaagtaggggacattataaaggtgcactttaagaataaggctgataagccgttatctatccaccctcaggggattcgttactccaaacttagcgaaggagcatcatacttagatcatacctttccggcggagaaaatggatgatgctgtggcgcctggccgtgagtatacgtacgaatggagcatttcagaggattctggccctacacatgatgatcctccatgtttaacgcacatttattattcccatgaaaacttgattgaagattttaacagtggtttaatcggtcctctcttgatttgcaaaaaaggtacgttaacagaaggagggacacaaaaaacatttgacaaacaaatcgtcttgctttttgccgtgtttgacgagtcaaaatcttggtcacagtcatcatctctcatgtatacagtgaatggctatgttaatggcaccatgccggatatcacagtctgtgcccatgatcatatttcatggcatctcctggggatgtcgtcaggccctgagttattttcaattcattttaatggtcaggttttagaacaaaatcaccacaaagtcagtgcaattacgcttgtaagcgcaacatcgacgacagctaacatgacagtcggccctgaaggaaagtggattatctccagcctgactccgaaacatttgcaagccggtatgcaagcgtacattgatattaagaattgtcctaaaaaaacgagaaaccttaaaaagatcacgcgcgaacagcggcggcatatgaaacgctgggaatattttatcgcggcggaggaagtcatttgggactacgcgcctgttattccggcgaacatggataaaaaatatcgcagccaacacctggataatttttctaatcaaatagggaaacactataaaaaagtgatgtacacacaatatgaggatgaatcttttacgaaacatacagtgaacccgaacatgaaagaagacggcatacttggacctatcatacgcgcgcaagtgcgcgacacactgaagatcgtgtttaaaaacatggcaagccgcccgtatagcatctatcctcatggagtcacatttagtccttatgaagacgaagtgaacagcagctttacctctggtcgcaacaacacaatgattagagctgttcagccgggtgaaacatacacatacaagtggaatatccttgaatttgatgaaccgacagaaaatgatgcacagtgcctgactcgtccatattattctgacgtggatatcatgagagatatcgcttcaggactcatcggcttgctcttaatatgtaaatctcggtccctggacaggagaggcatccagcgtgctgcggatattgaacaacaggccgtatttgcagtctttgatgagaacaaatcttggtatttggaggataacattaacaaattttgtgaaaatcccgatgaagtgaagcgtgacgacccgaaattctatgagtcgaacattatgtctacgattaacggctatgtaccggagtccattacaacattgggattttgctttgatgatacggtccaatggcacttctgtagcgtgggaacacagaacgagatcttgacaattcacttcacaggacatagtttcatttatggaaaaagacatgaagacacgcttacgctgtttccgatgcgcggcgaaagcgtaactgtcacaatggataatgtcggcacctggatgttgacgtctatgaactctagcccacgcagcaaaaagctgcgcctgaaatttcgtgacgttaagtgcatccctgacgacgatgaagattcgtacgagatctttgaacctccggaatcaactgttatggccacgcgtaaaatgcatgatagactggaaccagaagatgaagaaagtgatgcggattatgattaccaaaatcgcttagctgccgcactcggaatacgctcttttagaaactcttcactgaaccaggaagaagaggaatttaatctaacggcactagccttagaaaatggtacagaatttgtgagctccaacacagacataatcgttggaagcaattactccagcccgtctaatatcagtaaatttaccgtaaataatcttgcagaaccccaaaaagccccgtctcaccaacaggcaaccacggcaggttcgcctcttagacaccttattggcaaaaattctgtgttgaactctagcaccgcagagcactcatcgccttatagtgaagacccaatcgaggatcccttacagccggacgtcacaggtatcagattactttctcttggagccggagagtttaaatcacaggaacacgccaaacataaaggaccgaaagtagagagagatcaggcggctaaacatcgtttctcatggatgaaattgcttgcccataaagtaggacgccatctctcacaagataccgggagcccgtctggcatgcggccttgggaagatctcccttctcaagatacaggttccccgtcaagaatgcgtccctggaaagaccccccatccgacttgcttttattaaagcagtcaaactcatccaaaattcttgtcggcagatggcatttggcgtccgaaaaggggtcttacgaaattattcaggatactgatgaagacacagctgtgaataattggctaatctctccacagaacgcaagtcgcgcgtggggagaatcgactccgctagctaacaaaccgggcaaacagtcaggacatccgaaattcccgagggtgagacataagtctctgcaggtacggcaggatggtggcaaatcgagattaaaaaaatcacaatttttaattaaaacacgtaaaaagaaaaaggaaaaacacacccatcacgcaccgttatctccgcgcacatttcatccactgaggagcgaggcctacaatactttctcagagagacggctaaaacactctctggttctccataaatccaatgaaacatcactacctacggacttgaaccaaactttgccttctatggattttggatggatagcatccctgccagatcataaccaaaattcttcaaatgacacaggacaggcctcttgcccgcctggcttataccaaaccgtgccaccggaagagcactatcagacatttccgattcaagatccggatcaaatgcatagcacgtcagatccttcacatcgatccagctctccggaactttctgagatgctggaatacgaccggtcacataaatcatttccgacagatatctcgcagatgagcccgtcgtcagaacacgaagtgtggcagacggttatttctcctgatttgagccaagtgacgctgagcccagaactttctcagacgaatctgtcaccggatctctcccacactacgctgtcaccagaattgatccaacgtaatctctcgccggcattaggacagatgccaatctctccggacttgtcccacacgacgctgtcacctgatttaagccatacaactttgtccttggatttgtcacagacaaatctttctccagagttgagtcaaaccaatctgtctccggcgttgggtcagatgccgctttccccggatctgagtcacactacattatcgctcgacttctcgcaaacaaatctatcgccggagctctcacatatgacactaagccctgaactttcccagactaatttgtctccggcacttggacagatgccaatttcacccgacttgtctcacacgacgcttagcttagatttttcacaaacgaatcttagccctgaactgtcacaaacaaatctctctccggccttaggccaaatgccgctttcaccagatccttcacacacgacgttgtctctcgacttatcccagactaatttatctccggaactgtcccagacaaacttatcaccggatttatcagagatgcctttattcgccgacctctcacagattccgttaacaccagacttggatcaaatgactctgtcaccggacctaggggaaacagacctgagtccgaacttcggccaaatgtcgctgtctcctgacttatctcaggtcacgttgtccccggatatttcagatacgacattgttgccggatctttcacagatttcaccaccgccagacctggaccagattttctatccgtccgaatcctcacaatcactgctgcttcaggaatttaatgagtcttttccgtatccggacttaggccaaatgccttctccatctagcccgacacttaacgatacgttcctctcaaaagaatttaatccgctagtcattgtaggactttctaaagatggcacggattatattgagattatcccgaaagaggaagtgcagagttccgaagatgactacgcagaaatcgattatgtcccgtatgacgatccatataaaacggatgttcgtacaaatattaattcttctcgtgatccggacaatatcgctgcgtggtatttacggagcaataacggaaatcgccgaaattactatatcgcggcagaagagatttcatgggactattcggaatttgtgcagcgggagaccgatattgaagattcagacgacattccggaggatactacctacaaaaaagttgtgtttcgcaagtatctggatagcacattcacgaagcgtgatcccagaggggagtatgaggaacatttgggtattttaggtcctataattcgcgcagaagtggacgatgtcattcaagttaggtttaaaaaccttgcatcgaggccgtacagcttacatgctcatggattgtcatatgaaaaatcttcagagggaaagacatatgaagacgatagccctgaatggtttaaagaagataatgcagtccaaccaaattcatcttacacgtatgtttggcatgctacggaacggtcaggcccggagtctcctggatcagcgtgtagggcttgggcgtactattctgcggtgaatccggaaaaagatattcattccggattgataggccctctacttatctgtcagaagggtattctgcataaagattcaaacatgccaatggatatgcgagagtttgtcttgctgttcatgacgttcgacgaaaaaaaaagctggtattatgaaaaaaaatctcgatcatcttggcggttgacatcctcagagatgaaaaaatcgcatgaatttcacgcgataaatggaatgatatacagtttaccgggattgaaaatgtatgaacaagaatgggtgagattgcacttgctcaatattgggggcagccaagatatccacgtggttcactttcacggccagacgctactggaaaatggtaataaacaacaccaactgggagtctggcctctgctgcctggctcttttaagacactggagatgaaagcttctaaaccaggatggtggcttcttaacactgaggtaggggaaaatcaaagggcgggaatgcagaccccatttctgattatggatagagactgcaggatgccaatgggcttatctacgggcattatctcagattcccagattaaagctagcgagttcctgggctattgggaaccgagattggcacgccttaataatggagggagctataacgcgtggtctgtcgaaaagctggccgccgaatttgcaagtaaaccatggattcaagttgacatgcaaaaagaagtcatcattacgggcatacagactcagggcgcgaagcattatctgaaatcttgctatacaacagagttctatgttgcctacagcagtaatcaaataaattggcagatctttaaaggcaattctacacgcaacgttatgtatttcaatggtaactccgacgcatccacgattaaggaaaaccaatttgaccctccgattgtggcaagatatatcaggatcagcccgactcgggcttacaacaggccgacgctgagactagaactccaagggtgcgaagtgaacgggtgttctacaccactgggcatggaaaatggaaaaattgagaataagcaaattaccgcatcgagttttaagaaatcttggtggggagattattgggagcctttccgcgcacgactgaacgcccagggccgggtgaatgcatggcaagcaaaagcgaataacaacaaacagtggctggagatagatctcttaaaaatcaagaaaattacggcaatcatcacgcaaggctgtaagtctctgtcttcagaaatgtacgtcaagagctatacgatccactattcggaacaaggagtagagtggaaaccgtatcggttgaaaagctcgatggtagataaaatctttgagggaaatacaaatactaagggccatgtgaagaactttttcaaccctcccattatttctaggtttattagagtcatccctaaaacgtggaatcagagcatcgcactgagactcgaactttttggatgcgatatttat

SEQ ID NO: 2257 - DNA, 6672 bp, Artificial Sequence
  derived and/or modified sequence
atgtttccaggctgtcctcgcctgtgggtactagtggtcttgggcactagctgggtcgggtggggatcccaggggaccgaagctgcccagctgaggcagttctatgtcgcggcccaagggatttcctggtcttaccgtccagagccaacaaactcctcactgaacttgtccgtgacatcattcaaaaagatcgtgtaccgggagtatgaaccatactttaagaaggagaagccacagagtacaatctctggactgctggggccaactctctatgccgaggtcggggatatcattaaggtgcacttcaaaaacaaagcagataaaccgctgtccatccatcctcagggtataaggtattccaagctttcggaaggggcttcatacctagatcatactttccccgccgaaaaaatggacgacgccgttgcacccggccgagagtacacctatgaatggtcaatctctgaagacagtggacccacacatgacgacccgccttgtctgacgcatatatattatagccacgaaaatcttatcgaagacttcaattctggcctcatcggacctcttttgatttgcaagaaggggacactgacagaagggggcacccagaaaaccttcgacaagcagatcgtgctgctgttcgccgttttcgatgagagtaaatcttggagccagagttcctccctgatgtacactgtgaacggatatgtcaacggcacaatgccagacatcaccgtctgcgcccacgaccatatctcttggcatctcctcggcatgtcttccgggcccgagttgttctctattcattttaatgggcaggtgctcgagcaaaaccatcataaggtttccgcaatcactctagtgagcgctacgtccacaactgccaacatgaccgttggccctgagggcaagtggattatctccagcttgacccctaagcatctgcaggcgggaatgcaagcctacattgatatcaagaattgccccaaaaagactcgcaatctcaagaaaattactcgggagcagcgtaggcatatgaaacggtgggaatacttcatagccgcagaggaggtcatttgggattacgccccggtgatccccgccaacatggacaagaagtatcgctcgcaacacctcgacaatttctccaatcagattggaaaacattacaagaaggtaatgtacacgcaatatgaggacgaatcattcacgaagcacaccgttaaccctaacatgaaggaggatggaatcttaggccctatcatcagagcccaggttagagacactttaaaaattgtattcaagaacatggctagcagaccgtactctatttacccacacggcgtgacctttagcccttacgaagatgaagtaaattccagctttacatcaggtcgaaacaacaccatgatcagggcagtgcagcccggagagacttatacgtacaaatggaacatcctcgaatttgatgaacccaccgagaacgatgcacagtgtctcaccagaccatactattccgacgtggatatcatgcgagacattgcaagcgggctcataggactgctactgatctgtaaatccagaagtctggacagacgaggtattcaacgcgccgctgacatagagcaacaggcggtcttcgccgtttttgacgagaataagtcatggtatctggaagacaacatcaataaattttgcgaaaaccctgatgaagtgaaacgagacgaccccaaattctacgagtctaatataatgagtacaatcaatggttacgtccccgagagtatcaccacgcttgggttctgttttgatgacactgtacaatggcatttctgctccgtcggtacacagaacgagattcttactatccactttactggacacagttttatctatggcaaacggcacgaggatacccttaccctctttccaatgcggggggagtccgtgacagtgacgatggacaatgtggggacttggatgttaacctccatgaattcttcccctcgttctaaaaagttgcgactgaagttccgcgatgttaagtgtattcccgatgatgatgaagattcctatgaaatcttcgaacctcccgaaagtactgtcatggctaccaggaagatgcacgatagactggagccggaggatgaggagtccgatgccgactacgattaccaaaacagactagcagctgctcttggtatacggtctttccgcaacagttcactgaaccaggaagaagaagaatttaatctgactgccctggccctcgagaacggaacagagtttgtgtcatctaacactgatattatcgtcggtagcaactatagtagccctagtaacatatccaagtttacggtgaataacctggccgagccccagaaggctccgagccatcagcaagcaactacagcaggtagccccctcaggcacctaataggaaagaactcagtgcttaacagctcaacagcagagcacagttcaccttattccgaggaccctatcgaagacccgctgcagcccgatgtgacaggcatccgactccttagtttgggtgctggagagtttaaatcgcaagaacatgccaaacacaaagggcctaaagtggaaagagaccaggcagcgaagcaccggttttcctggatgaagctgctagcacataaagtggggagacatctctcccaggatactggcagtccttctggcatgagaccatgggaagatctgcccagccaagatacgggatccccgtctcggatgcgtccatggaaggatccgcctagcgaccttctgttgctgaagcagagcaactccagtaagatcctggtgggacggtggcatctcgcaagcgaaaaaggtagctacgagattatccaggatacagacgaagatacagccgtgaacaactggctgatctccccgcaaaatgcatctagggcttggggcgagagcaccccactggccaataagcccggtaaacagagcggacaccccaaattccctcgcgtgagacataaatctctgcaagtccggcaggacggaggcaagtctaggcttaagaaatctcagtttctcattaagacacgcaagaagaaaaaagaaaaacacactcatcacgcccccctgagcccgaggacgttccaccccctccgctcagaagcatacaataccttcagcgaacggcggttaaagcactccctggtgctccacaagagcaacgagacctcattgcccacggacttgaaccagacactcccttcaatggattttggctggatagcgtctctgcctgatcataaccaaaattcctctaacgacacggggcaggccagctgccctcccgggctttatcagaccgtaccgccggaggagcattatcagacgttccctatccaggatcccgatcagatgcattcgactagtgacccttcgcatagaagctccagcccagagctgagtgaaatgctcgagtacgatagaagtcataagagctttcctactgacattagtcagatgtctccgtcatctgaacacgaggtatggcagaccgtgatcagccccgatttatcccaggtgactctgtcacctgagcttagtcagacaaacctctcccctgacttgtctcatactacactatcgcccgagctgatacagcgcaatctgagcccggccctagggcagatgcccattagccccgacctctctcacaccactctcagtccagatttgagtcacactacgctctcgttggatctgagtcagacaaatttgtctccagagttgtcccagacaaacctgagccccgcactgggccaaatgcccttaagccctgatctgtcccacacgacgctatccctggatttcagtcaaaccaacctcagcccggagctcagtcacatgactctctcacccgagttgtctcagaccaatctgagcccagctctcgggcagatgccaatctcacccgatttgtcccacacaactctgtctctggacttcagccagacaaacctctcaccagaattgtcacagactaacttgtccccagcgctgggtcagatgcccctgagcccggatccgtctcacacgactttaagcctggacctaagccaaacaaatctgtctcccgaactgtcccaaaccaacttatccccagatctcagtgaaatgcccctgttcgcagatttgagccagatccccctgacaccagacctcgaccagatgacactctcccctgatctgggagaaaccgacttaagtcccaactttggacagatgagtctgtcacctgacctgtctcaggtgacactgagccctgatatctcggataccaccctgctccccgatctgagccagataagcccacccccagatctcgatcagattttctacccctccgagtcaagccaatccctgctgctccaggagttcaacgagtcttttccctacccggacctgggccagatgccaagcccctcatcccccaccctcaatgatacctttcttagcaaagaatttaatcccctggtgatcgtaggcctgtccaaagacggcacagactatatcgagattatcccaaaggaggaagtgcagtcgtcagaggacgattatgccgaaatagactatgtcccttatgacgatccctacaagacagacgtccgaaccaacattaattccagccgtgaccccgacaacatagcggcgtggtaccttcgctcgaacaacgggaatcgcaggaattactatatcgccgctgaggagatcagttgggactacagcgagttcgtgcagcgtgaaaccgacatagaggatagcgatgacattcctgaggatactacttataagaaagtcgtgtttcgtaagtatcttgattcaacgttcacaaagcgggatccaagaggtgagtatgaggagcatctgggcatattggggcctatcattagagcagaagttgatgatgtaatccaggtccgctttaagaacctagcaagccgtccctatagtcttcacgcccacggattgagctacgaaaaaagtagcgagggcaaaacttacgaggacgattcccccgaatggtttaaagaggacaacgctgtgcagccgaatagtagttacacgtacgtgtggcacgccactgagaggagtggaccagagtcgccagggagcgcttgccgcgcatgggcatactacagcgcagttaaccctgagaaggatatccacagcggcctaattggccctctcctcatttgccagaaaggaatcctgcataaagacagcaacatgcccatggatatgcgggagttcgtgctcctgttcatgacttttgatgagaaaaagtcttggtactacgagaaaaagtccagaagttcgtggcgactgacctcgagcgagatgaagaaatcacacgaattccatgcaattaacggtatgatctattctctgcccgggctgaagatgtacgagcaagagtgggtcagactgcacctgctaaacattggaggatcgcaggatatacatgttgtgcactttcatgggcagactctgctcgaaaacgggaacaaacagcatcagctgggagtttggcccttactccccggtagtttcaagacattggagatgaaggccagcaaacctggatggtggttgctaaacaccgaagtaggcgaaaatcaaagggcgggaatgcagaccccattcctcataatggatagagattgtagaatgcccatgggtctgagtactggaataattagcgattctcagatcaaagccagtgagttcttaggctactgggagccaagactggcacggcttaataacgggggaagttacaacgcctggtcagtggagaaactggctgcagaatttgcatctaaaccttggattcaggtggatatgcagaaggaagtcattataactggaatccagacacaaggggctaaacattacctcaaaagctgttacacgacggagttctatgtggcctattctagtaaccagataaattggcaaatctttaaagggaattcaacacgaaacgtgatgtactttaacggaaacagtgatgcctccactattaaggagaaccagttcgatccgcctattgtagcccgttacattcgcatcagcccaacccgcgcctacaaccgcccaacactgagattggagttacaaggttgcgaagtgaacgggtgctctacaccgttaggcatggagaatggcaaaatagaaaacaagcagattacggccagcagtttcaagaaatcttggtggggcgattactgggaaccatttcgagcaagactaaacgctcaggggcgggtgaatgcatggcaagctaaggcgaataataacaagcagtggctggaaatagatctgttgaaaatcaagaagatcaccgctattatcacccaggggtgcaagagtctgtccagcgaaatgtacgtgaagagctacactatacactattcagaacagggggtagaatggaagccataccgtctaaaatcttctatggtggataagatttttgagggaaatacaaacaccaaaggtcatgtgaagaatttctttaacccaccaataataagccgtttcattagagtgataccaaaaacatggaatcagagcatagcgctgcgattggaactatttggatgcgacatctac

SEQ ID NO: 2258 - DNA, 6672 bp, Artificial Sequence
  derived and/or modified sequence
atgtttccgggctgccctcgcctgtgggtgctggtcgtcctgggaacctcgtgggtgggatggggttcccagggaactgaagcggctcagctgcggcagttctacgtggcagcccagggaatctcgtggtcatatagaccggaacctaccaactcgtccctcaatctgtccgtgacttccttcaagaaaatcgtgtaccgcgagtatgagccgtactttaagaaggaaaaacctcagtccaccatcagtggactgctgggacccactctgtacgctgaagtgggtgacatcatcaaggtgcatttcaaaaacaaggccgacaagcccctgtcaattcatcctcaaggcattcggtactccaagctctccgaaggtgcctcatacctggaccacacgttcccggccgagaagatggatgacgcagtcgcgcccgggagagagtacacctatgaatggtccatctcggaagattcgggacccacccatgacgatccgccgtgtctgactcatatctactacagccacgagaacctgatcgaagatttcaactccggactgatagggccacttttgatatgcaagaagggcaccctcacggaagggggcacccagaaaactttcgataagcaaatcgttctgcttttcgccgtctttgacgagagcaagtcgtggagtcaatcgtcgtcccttatgtatactgtcaacggatatgtaaatggaaccatgccggacattaccgtctgtgcccatgaccatatctcctggcacctgctgggaatgtcctcagggcctgaattgttctcgattcactttaacggccaggtcctggaacaaaaccatcacaaagtcagcgccatcactctggtgtcggctacgagcaccactgccaatatgactgtgggacccgaaggaaaatggattatctcctcgctcactccgaagcacctgcaagcaggtatgcaggcgtacatcgacatcaagaattgcccaaagaaaacgcggaacctcaagaagatcacccgcgaacaacggagacacatgaagcgctgggagtactttattgctgccgaggaggttatctgggactacgccccagtcatcccggctaacatggataagaagtatcggtcacagcaccttgacaacttctccaaccagatcggcaagcactacaagaaggtgatgtacactcaatacgaagatgaatcgttcaccaaacacaccgtgaatccaaatatgaaggaggatggaatcctcggccccatcatccgcgcccaggtccgcgataccctgaaaattgtgttcaagaacatggcctcgcggccttactccatctacccacacggggtgacgttttcaccgtacgaggacgaagtcaattcgtccttcacttccggccgcaataacaccatgattagagccgtgcaacctggagagacttatacttacaagtggaacatcctggagttcgacgaaccaaccgaaaacgatgcccagtgcctgactaggccgtactactcggatgtggacattatgcgcgacatcgcatcaggacttattggcttgctgctgatatgcaaatcgcggtcgctggatagacggggaatccagcgggcggcagatatcgaacaacaggccgttttcgccgtgttcgatgaaaacaagtcctggtacttggaagataacatcaacaagttctgcgaaaacccggacgaagttaaaagagacgacccgaaattctacgagagcaacataatgtcgacgattaatggatacgtcccagagtcgatcaccaccctgggattttgctttgatgacaccgtgcagtggcacttctgtagcgtcggaacccagaatgagattctgaccatccatttcaccgggcactcattcatctacggaaaacgacatgaagatacgctgactctgttcccgatgcggggagaatcggtgaccgtgaccatggacaacgtgggcacctggatgctgacctccatgaactcgtccccgaggagcaaaaagctgagactgaagttccgcgacgtgaagtgcatcccggacgacgacgaggactcctacgagatcttcgagccgcccgagtccaccgtgatggcgaccaggaagatgcatgatagactcgaaccggaggacgaagaatccgatgcggactacgactaccagaaccggcttgcagccgccctgggaatccggtcgttccgcaactctagcctcaaccaggaggaggaagaattcaacctgactgcgctcgctctggagaacggaactgaatttgtgagctcgaacacggatatcatcgtgggatcgaattactcctctccgtctaacatctcgaagtttactgtcaacaatttggctgagccgcagaaggcaccttcccaccagcaagcaaccactgcgggaagcccactgagacacctcatcggaaagaacagcgtgctgaattcgtctactgctgagcatagctccccgtacagcgaggatcctatcgaggacccacttcaaccggacgtcaccggcatccgtctcttgtccctgggagctggcgaattcaagtcgcaggaacacgcgaagcacaagggacccaaggtcgaacgcgatcaagcggcaaagcaccgcttctcttggatgaagctcctggcgcacaaggtgggtcggcacctctcgcaggacaccggcagcccgagcggaatgaggccatgggaagatctcccgagccaagacacgggatcaccgtcccgcatgcgcccatggaaagaccccccgtcagatctcctcctgctgaaacaatcgaacagtagtaagatcctcgtgggacgatggcacctcgcctccgaaaagggaagctacgagatcatccaagatactgatgaggacacggcggtgaacaactggttgatctccccccagaacgcgtcccgcgcctggggggaatcaacgccgctggcaaacaaacctggaaaacaatcaggacaccctaagttcccacgcgtgcggcacaagtcgctccaggtgagacaggacggcggaaagagtcgcttgaaaaagagtcagttcctgatcaaaaccagaaagaagaaaaaagaaaagcacacgcatcatgcgccgctgagtccgcggacctttcatcctctcagatccgaagcatacaacacctttagcgagagacgcctgaaacattcacttgtgttgcacaagtcaaatgagacttcgctgccaaccgacctgaatcagaccctgccgtctatggacttcggatggatcgcttcccttccagaccacaaccagaattcgtcgaatgacactggacaagcgagctgcccgcccggcttgtaccagaccgtcccaccagaggagcattaccaaaccttccccattcaggatccggatcagatgcactcgacgtcggatccgagccaccgctcgagcagcccggaactcagcgagatgctggaatacgaccggtcgcacaagtcattcccaaccgacatcagccagatgtcaccgtcgtcagaacatgaggtctggcagacggtgatctcacccgacctctcgcaagtaaccctctcgccagagctctcgcaaacgaacctctcacctgacctgtcgcatactactttgtcgccggaacttattcaaagaaacctttcgccggccctgggacagatgcctatctccccggatctgagccacaccaccctcagccctgacctctctcacactaccttgtcgctggatctgtcacagactaatctctcgcccgaactgagccagactaacttgtcgccagcgttgggtcaaatgcccctgtccccagacctctcgcataccacgctttcactcgacttttcacagaccaacctgtcgccagaactctcacacatgactctgagcccggaactgagccaaaccaacctgagcccggctttggggcaaatgccgatctcaccggacctttcccacactactttgtctctggactttagccaaacgaatctgtcgccagagttgtcccagactaacctttcacctgcgctcgggcagatgcccttgtcgcccgatccctcgcacacgaccctctcactcgatctgtcccaaaccaatctctccccggagctgtcccaaactaatctgagcccagatctgagcgagatgcctctcttcgccgatctgagccagatacctctcactcctgaccttgatcaaatgaccctgtccccggatttgggggaaaccgatctttcaccaaacttcggccaaatgtccctgtcgccggacctcagccaggttaccttgtcgccagacatctcagacaccaccctcctcccagacctgtcccaaatcagccctccaccagatctcgatcagatcttctacccctctgagtcctcccagtcgctcctgctgcaggagttcaatgaatccttcccttacccagatttgggccagatgccctcaccatcgagcccgacgttgaacgacaccttcctctcgaaagagttcaacccactggtcatcgtggggctgtcgaaggacgggaccgactatatcgagatcatcccgaaagaagaggtccagtcatccgaggacgactatgcggagatagactacgtcccatacgacgacccgtataagactgacgtgcggactaacatcaatagctcccgagatcctgataacatagccgcatggtaccttcgcagcaacaacggtaaccggaggaattactacatcgcagcagaagaaatctcgtgggactactcggaatttgtccaacgtgaaactgatatcgaggactccgacgacatcccggaagatactacttacaaaaaggtggtgttcagaaagtacctggacagcacttttactaagcgggatccgaggggagagtacgaagaacatctcggaatcctgggccctatcattcgggcggaagtggatgatgtgatccaggtccgctttaagaacctcgcatcccgaccgtactcgcttcatgcccacggcctgtcgtacgaaaaatcttcggaaggtaagacttacgaagatgattcaccggaatggttcaaggaagataatgcggtccaacctaattcctcatacacttacgtgtggcatgcgaccgagcggtcgggaccggagtcaccaggcagcgcctgccgcgcttgggcgtactactccgctgtgaaccctgagaaggatatccatagcggtctgatcggaccactgctgatctgtcaaaaaggtatcctccacaaagattcgaacatgccgatggacatgcgggaatttgttctgctgttcatgacgttcgacgaaaagaaatcatggtactacgagaagaagtcacgcagcagctggcgcctgacttcgtcggaaatgaagaagagccacgagttccatgccataaatggaatgatctactcactgccaggactgaaaatgtatgagcaagaatgggtgaggctccaccttctgaatatcggggggtcccaggacattcacgtggtgcatttccacggccaaacgctgctcgaaaatggaaacaagcagcatcaactgggagtgtggcctctgcttcctggatcgttcaagactctcgaaatgaaggcgtccaagcccgggtggtggcttctgaacaccgaggtcggcgaaaaccagcgcgcaggcatgcagaccccgttcctgatcatggaccgtgactgcaggatgccgatgggactgtcaactggaatcatcagcgattcccagatcaaggcctcggaattcctcggctactgggaaccgcgcttggcccgcttgaataatggtggaagctacaatgcttggtcggttgaaaagctggccgctgaatttgcatcaaagccgtggatccaagtcgatatgcagaaggaagtgattatcactggtattcagacccagggcgccaaacactacctgaagagctgctacaccaccgaattctacgtggcttactccagcaaccagatcaactggcagatcttcaagggaaactcgacccgcaatgtcatgtacttcaacggaaattcggacgccagcaccatcaaagagaatcaattcgacccgcccatcgtggcccgctacatccgaatctccccgacccgcgcatacaatcggccgactctccggcttgaattgcaggggtgtgaggttaatgggtgctctaccccactgggcatggagaatggcaagatcgaaaacaagcaaatcactgcttcctcattcaaaaagtcctggtggggggattattgggagccatttcgggcacgcctgaacgcccagggtcgagtgaacgcctggcaggcaaaggcaaacaataacaaacagtggttggaaatcgacctgctgaagataaagaagatcactgcgatcattactcagggatgtaagtccctttcgtcagagatgtatgtgaagtcatacaccattcattactccgaacagggtgtggagtggaagccgtacagactcaagtcgtcaatggtggacaagatttttgagggtaacaccaataccaaaggacatgtgaagaacttcttcaaccctcccattatcagccgcttcatcagagtgatcccgaaaacgtggaaccagtccatagctctccgcctggaattgtttggatgcgacatctat

SEQ ID NO: 2259 - DNA, 6672 bp, Artificial Sequence
  derived and/or modified sequence
atgtttcccggatgccctcgtttgtgggttcttgtggtgctgggtacatcatgggtcggatggggaagccagggtactgaagccgctcagttgcgtcagttttacgtggctgctcagggcatcagctggtcataccgccccgaacccaccaacagctcattgaatctctctgtgacttcattcaaaaagatcgtctatagggaatatgaaccttactttaagaaagaaaaacctcaatctactatttctggactgctgggtccaacactttacgctgaggtgggagacatcattaaggttcatttcaagaataaggctgataagccactcagtatccaccctcagggcatcagatattctaagctctcagagggagcttcctacctcgatcatacttttccagcagaaaaaatggatgatgccgtggctccaggaagggaatacacatatgaatggtcaattagcgaagattcaggccctacacacgacgatcctccttgcctcacacatatttactactctcatgagaatctgattgaggattttaactccggattgatcggccctctccttatttgcaagaagggtaccttgactgaaggtggaacccaaaagactttcgacaaacagatcgtgctgctgtttgccgttttcgacgagagtaaaagctggtcacagtcttcctcactcatgtacaccgtgaatggttatgtgaacggaaccatgcctgacatcactgtatgcgcccatgatcatatatcctggcacttgttgggtatgtcctccggaccagaactgttctcaatccacttcaacggtcaagtactcgagcagaaccaccataaggtcagtgctatcactctggtgtccgccacttccaccacagcaaacatgacagtcggcccagaaggaaagtggattatcagctccctgacaccaaaacatctccaggccggaatgcaggcctacatcgacatcaagaactgcccaaagaagacacgcaacctgaagaagatcacaagggagcaaaggaggcacatgaagcgctgggagtacttcatcgctgccgaggaagtcatttgggactatgcccccgtgatcccagccaatatggacaagaagtaccgtagtcagcacctggataacttctccaatcagatcggaaagcactacaagaaggtgatgtacacccaatacgaggatgagagctttacaaaacatacagtgaacccaaacatgaaggaagatggaatactcggtccaattataagagctcaggtgagggataccctcaagattgttttcaagaatatggcttccaggccctactctatttatcctcatggagtgacttttagcccctacgaagacgaggtcaattcctccttcaccagtggccgcaacaacaccatgataagggcagtccagcctggagagacatacacttataagtggaatattttggagtttgatgagccaacagaaaatgacgcacagtgtttgacccgtccatattactctgatgttgacattatgagagatatcgcctctggactgatcggccttcttctgatctgcaagtccaggtccttggacagacgcggcatacagcgtgctgctgatatcgagcagcaggctgtgtttgctgtcttcgacgaaaataaatcatggtatctcgaagacaacatcaacaaattctgcgagaaccccgatgaagtgaagcgcgatgatcctaaattctacgagtccaacatcatgtcaaccatcaatggatacgtgcccgagagcatcactacactcggattttgttttgatgataccgttcagtggcacttctgcagtgtaggtacacagaacgagatcctcactatccatttcacaggacactcttttatttatggaaagcgccatgaagatacactgaccctgtttcctatgaggggagaaagtgtaacagttaccatggacaatgtaggcacatggatgcttaccagcatgaactcttccccacgttccaaaaagctccgtttgaagttcagggacgtgaagtgcatccccgacgacgatgaggacagctacgagattttcgaaccccccgagtctactgttatggccactaggaaaatgcacgaccgtctcgagcctgaggatgaggagtctgacgcagactatgactaccagaatcgtctggcagccgctctgggaattcgttcatttaggaattcctctctgaaccaagaggaagaagagttcaatctgacagctctggctttggaaaacggtaccgaattcgtatcaagcaacaccgacataatcgtgggaagtaactacagctctcccagcaacatttccaaattcacagtgaataacctggccgagccacagaaggccccaagccatcagcaggccaccaccgccggctccccccttcgtcacctgatcggcaagaacagcgtactgaactcttctacagccgagcacagttccccttactctgaggatcctattgaagatcccctgcagcccgacgtgaccggtatcagattgttgtccctgggcgctggagagtttaagagtcaggaacacgccaaacacaagggacccaaggtggagcgtgaccaagcagccaagcatcgcttcagttggatgaaactgttggcccacaaggttggcaggcatctgtctcaggatacaggttccccttcaggaatgagaccctgggaggacctgccttcacaagacactggaagtccctccaggatgcgcccctggaaagaccccccttctgatctgttgctccttaagcagtcaaactcttccaagattctggtgggccgttggcacctcgcttctgaaaagggctcctatgaaattatccaggatacagatgaggacaccgccgttaacaattggctgatctctccccagaatgccagcagagcctggggtgaatccaccccacttgccaacaaacctggcaaacagtcaggtcaccccaaattcccacgtgtaaggcacaagagtttgcaagtccgccaggacggaggcaaaagtagacttaagaaaagtcagtttttgatcaagacaaggaagaagaagaaggaaaagcatacacatcacgccccactgagccctaggactttccaccccttgaggtctgaggcatacaacaccttttccgaaagaaggctcaagcatagcctggtcttgcataagtcaaacgagaccagtctgcctactgatctgaaccaaaccttgccaagcatggatttcggatggatcgcatctctccctgaccataatcagaatagcagtaacgacaccggtcaggcatcttgtcctcctggcctgtaccagaccgtcccacccgaagagcattaccagaccttcccaatccaggacccagaccagatgcactccacctccgacccctctcaccgcagttcatcacccgaactgtctgagatgctggaatatgataggtcacacaagagctttcctaccgacatttctcaaatgtcccccagctctgagcatgaggtatggcagaccgtaatatctcctgacctcagtcaggttaccttgtcacccgagctttcccagactaatctgagtccagatctgtctcacacaacactgtccccagaactgattcagaggaatctttccccagctcttggtcaaatgcccatctctccagacttgagccacacaaccctctcccctgatctctcacacacaactctgagtctggatctctcacagactaatctcagccccgagctgtctcagacaaacctgtcacctgctctgggccagatgcccctctcaccagacctcagccacaccactctctccttggatttttctcagaccaacctctcacccgaactgagccatatgacactgtctcctgagttgagtcagaccaacctctcacctgccttgggacaaatgccaatctctcctgatcttagtcatacaacccttagccttgacttttcacagacaaatctgtctccagagctgtcccagaccaacttgagccctgctctgggacaaatgcccctttccccagatccaagtcatactacactcagcctcgatctgagccagaccaacctgtcccctgagctgtcacagactaacttgtctcctgatctgtccgagatgccacttttcgcagacctctcacaaatcccactcacccccgatctggatcagatgaccttgtcccccgatctgggtgagaccgatctgtcacccaactttggccagatgtctctctcccccgatctgagccaggtaaccctgagcccagacatctccgacaccaccttgctcccagacctgtctcagatctcacctcccccagatctggatcagatcttttatccttccgaatccagtcaatccttgcttcttcaggaattcaacgagagctttccataccctgacttgggccagatgcctagcccctcttcacccactctgaatgacactttcctttccaaggaattcaatccccttgtgatagttggtctgtcaaaagatggaaccgattatatagagattatccccaaggaagaagttcaatcctcagaagacgattatgcagagatcgattatgttccctacgatgatccctacaaaaccgatgttcgcaccaatatcaattccagcagagatcctgacaacatcgccgcttggtatctgcgttcaaacaatggtaaccgccgcaattactacattgccgcagaggagatttcatgggactactccgagtttgtacaacgcgagacagacattgaggactccgatgacatccctgaggacacaacttacaagaaggtagtattcagaaagtacctggactcaacattcaccaaaagggatccccgcggtgaatatgaggagcacctgggtatcttgggtcctattatccgcgctgaggtggatgatgtgatccaggtcaggttcaagaatcttgcctctcgtccttattcactgcatgctcacggtttgtcctatgagaaatcttccgaaggaaagacttacgaggatgacagtcctgagtggttcaaggaggacaacgccgtacaacccaattcctcctatacctatgtttggcatgccactgagcgctctggtcctgagagccctggttctgcatgtcgtgcatgggcttattacagcgctgtgaacccagagaaggacattcacagcggcctcatcggacctctcctcatctgccagaagggcatccttcacaaggattcaaacatgcccatggatatgcgcgagttcgtcctcttgttcatgacttttgacgaaaagaagagctggtactacgagaagaaatcaagaagctcctggcgcctcacttcctccgagatgaagaaatcccacgagttccacgctatcaatggaatgatatactcactgcctggtcttaagatgtacgagcaggagtgggtgagattgcatttgctcaacatcggtggttctcaggacatccatgttgtccactttcatggccaaactctgcttgagaatggtaataagcagcaccagctgggtgtgtggccactgctgccaggtagctttaagactctcgagatgaaggcttcaaaacctggttggtggctcctcaacactgaggtcggtgaaaaccagcgcgccggaatgcaaacccccttcctcatcatggacagagactgccgtatgccaatgggcctgtcaaccggaatcatcagcgacagccaaataaaagcatccgagttcctgggctactgggaacctcgcttggccagactcaacaacggaggatcatataacgcttggagcgttgagaagttggcagctgaattcgcatcaaaaccttggatacaagtagacatgcaaaaagaggtgataatcaccggaatacaaacacagggagctaagcactacctcaagtcttgctacaccacagaattttacgtggcatattccagtaaccagataaattggcagattttcaagggaaactccactcgtaacgttatgtacttcaatggaaactctgacgcctcaacaattaaggagaatcaattcgaccctccaattgtagcaaggtatattaggattagtcctaccagagcatacaacagacccacacttagactcgaattgcagggttgcgaggttaacggatgttcaactcctctgggaatggaaaacggaaaaatcgagaataagcaaatcacagcctcctcatttaagaagtcttggtggggagactactgggagccctttagggcccgccttaacgcccagggtagggtgaatgcatggcaagccaaggcaaacaacaacaagcaatggctggagatcgaccttcttaagatcaaaaaaatcacagctataattacccagggatgcaaaagtctgagttctgagatgtacgtcaaatcttacactattcactactccgagcaaggagtggagtggaagccttataggctgaaaagttctatggtcgataagatctttgagggtaacacaaacaccaagggtcacgtcaaaaacttcttcaatccccctattattagcaggttcatcagagtgatccccaaaacttggaaccagagcatcgcccttcgccttgaactctttggctgcgatatttac

SEQ ID NO: 2260 - DNA, 6672 bp, Artificial Sequence
  derived and/or modified sequence
atgtttcccggctgcccccgcctgtgggtgttggtggtactagggacgagttgggtgggatggggaagccagggcaccgaggccgcacagttgaggcaattctacgtggcagcacagggaataagttggagttatagacctgaacccaccaattcatcactcaacctcagcgtgactagtttcaaaaagattgtgtacagggagtatgagccatatttcaagaaggagaagcctcaatcaactattagcgggttgctgggcccgaccctctacgctgaggttggcgatatcataaaggtccatttcaaaaacaaggctgataagcccctgtccattcatccacagggaatccgctactctaagctctctgagggcgcgtcctatctggaccacaccttcccggctgaaaagatggacgacgcggtggcgccagggcgcgagtacacttatgagtggtccattagcgaagacagtggaccgactcacgatgacccaccctgtctcacacatatctactactctcacgaaaacctgattgaggattttaattcaggactgatcggcccattgctgatttgcaagaagggcacactgaccgaaggaggaacccagaaaacgttcgataagcagatcgtgctgcttttcgcagtgtttgatgagtcaaaaagctggagccagagcagcagcctcatgtacacggtcaacggctatgtgaacggaaccatgcccgatattaccgtttgcgcacacgatcatatctcttggcacctcctaggaatgagcagcgggcccgagctgttttcgatccattttaatggccaggtgctcgagcagaatcaccacaaggtgagtgctattaccctggtgtcggccacaagcacgacagctaatatgaccgtcgggcccgaagggaagtggatcatcagctcacttacccccaaacatctgcaggcggggatgcaagcttatattgacattaaaaactgcccaaagaaaactaggaatcttaaaaaaatcacacgtgaacaacgtagacacatgaagagatgggaatactttattgccgcagaggaggtgatttgggattatgccccggtgatccccgccaatatggataaaaagtaccggagccaacaccttgataacttcagcaaccagatagggaagcattataagaaggttatgtatacccagtacgaggatgaaagtttcacgaagcatactgtcaacccaaatatgaaagaggacggaattctagggcctataattagggcacaggtgcgcgacacgctgaagatcgtttttaagaatatggcctctaggccctactctatatacccacatggcgtgaccttctcaccttacgaggacgaagtcaactcatctttcacctccggaagaaacaacacgatgataagagccgtccagcccggggagacctatacctacaaatggaacatcctggaattcgacgagcccactgaaaatgatgcccagtgcctgacgaggccttattattctgacgtcgatattatgcgggatattgcgagcggcttaatcggactcctgctaatttgcaaatccagaagcctggatcggagaggaattcaacgcgcggcggacattgaacaacaggcggtcttcgcagtttttgacgagaacaagtcttggtaccttgaggataatatcaataagttttgtgaaaatcccgatgaagtcaaaagggatgatcctaagttctacgagtccaatatcatgtccaccatcaacgggtacgtgccagagtcaatcacgacattgggattctgcttcgacgacaccgtgcagtggcacttctgctccgtcggcacccagaacgaaattcttaccatacatttcacagggcattcatttatctacggcaagaggcatgaggataccctgacactgtttccgatgcgaggagagtctgtgactgtaaccatggacaatgtcggcacctggatgctaactagcatgaactcaagtcctcgctcaaagaagctgcggctgaagttcagggatgtgaagtgcatccccgacgacgatgaagattcttacgaaatttttgagccacccgagtccacagtgatggccacacggaagatgcacgataggttagaaccagaggacgaagagagtgacgcagactacgactatcagaataggttggcagcagcattagggataagatcattccgcaactcaagtctgaaccaagaggaggaggagttcaacctgaccgccctcgccctcgagaatggcacagagtttgtgagtagcaacaccgatattatagtaggaagcaattatagctcaccctcaaacatatctaaatttacagtgaacaatctcgcagagccacagaaggccccatcacaccaacaggcaaccactgccggatccccactgcggcaccttataggcaaaaattctgtattaaactccagcactgctgagcactcctctccatatagcgaagatcccatcgaggacccgttgcagcctgatgtgaccggcatcagactgttgagcctcggcgctggagagttcaaatcgcaagaacacgctaaacacaaaggacccaaagtggagcgggaccaggccgcgaagcatcgtttctcatggatgaagctcttggcgcacaaagtggggagacatcttagtcaggacaccggatccccatctggaatgcgtccatgggaggacctcccttctcaagatacggggtccccctctagaatgcggccatggaaagatccaccttcagacctgcttctcctaaagcagagtaactcaagtaaaatactggtcggccgatggcatctagcctctgaaaaggggtcctacgagatcatacaggacacagatgaagacactgccgttaataactggctgatttcacctcagaatgcctccagagcctggggcgaatccaccccacttgccaacaagcccggcaagcagtcgggccatcctaagtttcctcgggtccgccataagagcctccaggtacgacaagatggcggaaagtcacggctgaaaaagagccagtttcttattaaaaccaggaagaagaagaaggagaaacatactcatcacgcacctctgtcacctaggacatttcatcctctgcgctctgaagcatacaatacattctctgagagacgtctgaaacattccttagtgttgcataagagcaacgagaccagtttgcccactgatctcaaccagacgctcccgagcatggactttggatggatcgctagcctgcccgaccacaatcagaattcgagcaatgatacaggacaggcctcttgcccacctggactgtatcaaaccgttccaccagaagagcattatcaaacattcccaattcaagatcccgaccagatgcacagtacctcggatccctcccatcgcagctctagcccagaactgagtgaaatgctggaatacgaccggagtcataaaagcttccctaccgacatttctcagatgtctccatcctcagaacacgaagtatggcaaactgtgataagccctgacctgtcacaggtgacactgtcccctgagttaagtcagacaaatctgtcccccgacctctcgcatactaccttgtcgcctgagctcatacaaagaaatctgagccccgcactggggcagatgcctattagcccagacttatcccataccacactgtcgcctgatctcagccacaccaccttgagtctcgacctgagccaaacgaatctttcacccgagctatctcaaactaatttgtctccagccttggggcagatgccccttagtcccgacctctcccatactaccctgtctttggattttagtcagactaacctctccccagagctctcgcatatgactctcagtccggaactaagtcaaaccaacctgagcccagcccttgggcagatgccaatatccccggacttgtcccataccaccttgagcctcgatttcagtcagaccaacctatcgccagaactgtcccagactaacctctccccggcccttgggcagatgcccctgtctccagacccctcccatactacgctcagtctggacctgtcacagactaatttgtccccagaactttcccaaacaaacctgtctcctgacctttcagaaatgccgttgtttgccgacttgtcccagattcccctgacacctgaccttgatcaaatgaccctcagcccggaccttggcgaaactgacctgtctcccaattttgggcagatgagcctgagccctgacctgtcacaagtcaccctaagtccagatatcagtgataccaccctgctccctgacctgtcccaaatttctccacccccagaccttgaccagatcttttatccttccgaatcttcacagtccctgctgctgcaagagttcaatgagtcttttccttaccccgacctaggccaaatgccaagtccgagttctccaactttgaacgacacctttctgtccaaggaatttaatcctctggttatagttggcctttccaaggacggcaccgattatatcgagattatccctaaagaagaggtccagtcctccgaggatgattacgccgaaatcgactatgtgccgtatgatgacccttataagaccgatgtacgcaccaatattaactccagtagagatccagataatatagccgcttggtacctgagatcaaacaatgggaacagacgcaattattacattgctgccgaagagataagttgggactattcggagttcgttcaacgagaaaccgatatcgaggactcagacgacataccagaagatactacttataagaaagtggtctttcgcaagtatctggactctacattcaccaaaagagaccctcggggagaatatgaagagcatctggggatcctcggccctatcatcagagcagaagtggacgatgtgattcaggtgcggttcaaaaacctggcctctcggccctatagtttacacgcccacggattatcgtatgaaaaatcttctgaggggaaaacttacgaggatgactcccctgagtggttcaaggaggataacgctgtgcaaccaaattcttcatatacatacgtgtggcacgccactgaacggtctggcccagagagtccggggtccgcttgccgcgcatgggcctactacagtgccgtgaaccccgagaaggatattcattctggtcttattgggccactgctcatctgtcagaagggaatcctgcataaggatagcaatatgccaatggacatgcgcgagttcgtacttctgtttatgacctttgacgagaaaaagtcctggtattacgagaagaaaagcagatccagttggcgactgacatcttctgagatgaaaaaaagccacgagtttcacgctatcaacgggatgatttactcgctcccggggctgaaaatgtacgagcaagaatgggtgagactgcacttactgaacattggcggatcacaagatattcacgtggtgcatttccacggccaaacactgcttgaaaatggaaacaagcaacaccagttgggagtgtggccgctgctgccaggtagcttcaaaaccctggagatgaaggcatctaaacccggatggtggctcttgaatacagaggtcggagaaaaccagagggcggggatgcaaacacccttcttgattatggatagagactgtaggatgccgatgggcttaagcacaggcataatcagtgactctcaaatcaaggcctccgagttccttggctattgggagccgaggttagcacggttgaataatggagggtcttacaatgcatggagtgtcgaaaagcttgccgccgaattcgcatcgaaaccatggattcaggttgacatgcagaaggaagtgatcataactggaatccagacacagggcgccaaacactatctgaaatcctgctatacaacagagttttatgtggcctattcaagtaaccagattaactggcagatctttaagggcaattcaacccgtaatgtgatgtattttaacgggaacagcgacgccagtactatcaaagagaaccaatttgatccgccaattgtagcaaggtacatacgcattagccccacccgagcttacaataggcccacactgagactagaactccagggatgtgaggtgaacgggtgtagcactcctttgggtatggaaaatggtaagatcgaaaataaacaaatcaccgctagctcctttaaaaaatcctggtggggcgactactgggaaccatttcgcgctcggctgaatgcccaaggacgcgtcaacgcttggcaggcgaaggctaataataacaagcagtggttagagatagacttacttaagatcaaaaagatcaccgctataattacccaaggctgcaagagtctatcctctgagatgtatgttaaaagttatactatacactatagtgaacagggggtggaatggaaaccatatagattgaagtcctctatggtggacaaaatttttgagggcaatactaatacaaagggacatgtgaagaacttctttaatcctccaatcataagtagattcatccgggttattcctaaaacctggaaccagagtatcgcactgcgactagaactgtttggctgtgatatctac

SEQ ID NO: 2261 - DNA, 6672 bp, Artificial Sequence
  derived and/or modified sequence
atgtttcctggatgccctaggctgtgggtgctggttgtgctgggcacaagctgggtcggctgggggtcacaagggaccgaagcagcccagctgagacagttttacgtcgccgcacagggcatttcatggtcctaccggcccgagccaactaatagttctcttaatctctccgtaacttctttcaagaaaattgtttatagggagtatgagccgtactttaagaaggagaaaccgcagtctactatctccgggctgttggggccaaccctctatgctgaggtgggtgacatcattaaggtgcatttcaagaacaaagcggataagcccctgagtatccatccccagggtatccgctattccaagctgagcgaaggcgcatcttacctcgaccacacattccccgccgagaagatggacgatgccgtcgcccctggaagggagtacacctatgaatggagcatatctgaggattctggccctactcatgacgaccctccctgccttacgcatatctactattctcatgaaaatttgatcgaggattttaacagcgggcttatcggccctctgctgatttgcaaaaaaggaacactgacagagggcgggacacagaagacctttgacaagcagattgtgctcctgtttgctgtgttcgacgagtccaagagttggagtcagagtagttccctgatgtatacagtcaacggctacgtgaatgggacaatgcccgacattacagtgtgcgcacacgaccacatcagttggcatcttttggggatgtcaagcggccccgaactcttttccatccacttcaatgggcaggtactggagcagaaccatcacaaagtgtctgctattacgctggtgtccgcaacaagcaccaccgcaaacatgaccgtcgggccggagggtaaatggattataagtagtctcacacccaagcatctgcaggcaggcatgcaagcgtacatcgatattaaaaattgtcccaaaaaaacccgcaacctgaagaagatcacaagggagcagcggcgacacatgaaacgatgggaatacttcatagcagcagaagaagtaatctgggattacgccccagtaatcccagctaacatggataagaaatatcgcagtcagcatctcgacaatttctccaatcagattggcaagcactacaaaaaggttatgtacactcaatatgaggatgagtccttcacgaaacatacggtgaatccaaacatgaaagaggatgggattctgggacccatcattagagcacaggtccgggacaccctgaagatcgtctttaagaatatggcttccaggccttacagcatctaccctcacggagtcacattctccccgtatgaagacgaagtgaatagctccttcacgtcaggcagaaacaatactatgatccgggctgttcagcctggagagacctatacttataaatggaatatccttgaattcgacgaacctaccgagaacgacgcccaatgcctgacccgaccatactattccgacgttgatatcatgagagatattgctagtgggctcatcggtctgctcctgatctgcaagagcagaagcttggaccgccgcgggatacagcgcgcagcggatattgagcaacaggctgtattcgccgtatttgatgagaataagtcctggtacttggaagataacattaacaaattctgcgagaatcctgacgaggtcaaaagagatgaccccaaattctacgagtccaacattatgagcactatcaacggttatgtccctgagtcaattaccacactcggtttttgtttcgatgacacagtccaatggcacttctgctccgtcgggacccagaacgaaatcctgaccatacattttaccggacactccttcatttatggcaagagacatgaggatacgttgacgctgttcccaatgcgaggagaatccgtaacagtaaccatggataatgtcgggacttggatgcttacttcaatgaattcctctccaaggtcaaagaaactgcggctgaagttccgcgatgtcaagtgcattcctgatgacgatgaggattcttatgagatcttcgaaccccctgagagtactgtgatggcgacaaggaaaatgcacgatcggctcgaacccgaagatgaggagtcagacgccgactacgattaccagaacaggcttgcggccgcactggggattagaagcttccggaactctagtcttaatcaggaggaagaagagttcaacctgacagctcttgctctggaaaatggcacagagtttgtgagctccaacacagacataatcgtgggttcaaactattcttcaccttctaacatcagcaagttcactgttaacaacttggccgagccgcagaaggcccccagccaccaacaagcaactactgccggatctccactgcgacacctgatcgggaaaaactccgtgctgaattcctctaccgccgaacattcatctccatacagtgaggaccccattgaggatccattgcaacccgatgtcaccggaattcggttgctctcccttggggccggcgaattcaagagccaggaacacgctaagcataaggggccaaaagtggagcgcgatcaagcagcaaagcatagattcagttggatgaagctgcttgcgcataaggtggggagacacctgtctcaggataccggctctccatcaggcatgagaccatgggaggacctgccttcccaggacactggctcaccttcccggatgagaccttggaaggatcctccttctgatctgctgttgctgaagcagtccaattctagtaagattctcgtggggcggtggcacctggcctctgaaaaaggttcctatgagatcattcaagataccgacgaggatactgcagttaacaactggctcatatcaccccagaacgccagcagggcctggggggaaagtactcccttggcaaataagcctggaaagcagtctggccatcccaagtttccgagggtccgccataaaagcctgcaagtgcggcaggacggcggaaagtcacggctgaagaaatctcagttcctcattaaaaccaggaagaaaaagaaggagaagcatacccaccatgctcccctgagccctcggaccttccatcccctgcgcagcgaggcatataatactttcagcgaaaggagactcaagcactcactcgtgctgcataagtctaatgagacatccctcccgaccgacttgaatcagactctgccctccatggacttcggctggattgcgagcctgccagatcacaatcagaactccagcaacgacaccggccaggcatcctgccctcccggcttgtaccaaaccgtacccccggaggaacactatcagaccttccccatccaggatccagatcagatgcacagcacctcagatccatctcaccggagtagtagccccgaactctccgaaatgcttgaatacgacagaagccacaagagcttcccaaccgacattagccagatgagccccagctctgagcacgaagtatggcaaactgtcatttccccggatttgtcccaggtgactctgtcccctgagctgtcccagaccaatttgtcccctgatctttcccacacaacccttagccccgagctgatccagaggaacctgtctccggccctcggccagatgccaatttctccagatctgtcacacaccaccctgagccccgacttgtctcacactactctgagcctggacctgtcccagactaatcttagccctgaactgtcccagactaatttgagtcccgccttgggacaaatgcccttgtcccctgatctgagtcacaccactttgagtcttgatttctcacagacaaacctgagcccagagctgtcccacatgacactgtctccagagctgtcccaaacaaacctttcccctgccttggggcaaatgcccatctccccagacctttcacacaccacactgtctctggacttttctcagaccaacctgagcccagaactctcacagactaatctgtctcctgctcttgggcagatgcccctttctccagatccatcccacaccactttgtccctggacctctcccagacaaacctcagtcccgagctttctcagacaaatctttcacccgacctgagcgaaatgcctctcttcgctgacctgtctcagatcccactcactcctgacctggaccaaatgaccctgagcccagatctgggagagaccgacctttccccgaattttggccagatgagtttgagccccgatctcagccaggtcaccctgagccctgacatctccgataccactttgctgcccgatctgtctcagatctcccctcccccagatcttgatcagatcttctatccgtccgagtcttcacagtctctgctcctgcaggagtttaatgaatcttttccataccccgatctcgggcagatgccgagccctagttctccaactctcaatgacacattccttagcaaggagtttaatccgctcgttatagtcggcctgagtaaggatggcacagactacatcgaaatcatccccaaggaggaggtgcagtcctctgaagacgactacgcggagatcgattatgtgccctacgatgacccttacaagaccgacgtgcgcaccaacatcaactcatcacgcgaccctgacaacatcgcagcgtggtacctgagatccaacaacggtaaccggcgcaattattatatcgccgcggaagagatttcttgggattacagcgagttcgttcagagggaaactgatatagaagactcagacgacattccagaggataccacttacaaaaaggtggtgtttagaaagtatcttgactcaacattcaccaagagggatccccgcggtgagtacgaggagcaccttggcatactgggccctattataagggccgaagttgatgatgtcatccaggttaggttcaagaacttggcctctagaccgtatagtctgcacgcgcacggactgtcctacgagaaatctagcgaagggaagacctacgaagacgattcacctgagtggtttaaggaagataatgccgtacagcctaatagtagttacacctatgtttggcatgccactgagagatctggcccagaaagtcccggttccgcctgtcgggcatgggcgtactacagtgccgtcaatcccgagaaggatatacatagcgggctgattggcccgctgctcatctgtcagaagggcatcctgcataaggacagcaacatgccaatggacatgagggaatttgtgcttctcttcatgactttcgacgaaaaaaaatcctggtattatgagaaaaaatccagaagctcttggcggctcacttcatcagagatgaagaagtctcacgaattccacgccataaatggaatgatttactctcttccgggcctgaaaatgtacgagcaggagtgggtgcggctgcacctcctgaacatagggggatcccaagatatacatgtggtccatttccacggacaaaccttgttggaaaacgggaataagcaacatcagctgggagtctggccgctgctgcccggctcttttaagaccctcgagatgaaggcttccaaacccgggtggtggctgcttaacacagaagtcggtgagaaccagcgggccggtatgcagactcctttcttgatcatggaccgagattgcagaatgccaatgggtctgagtacagggattatctccgatagccagataaaggcatctgagttcctcggctattgggaaccccggctggccaggctcaataacgggggcagctataatgcttggtcagtggaaaaacttgctgcagagttcgcgagcaagccatggatacaagtggatatgcaaaaggaggtgataatcacagggatccagactcaaggagctaagcactatctgaagagctgttataccaccgagttctatgtggcctacagctccaatcagatcaactggcagatttttaagggtaattccacccgaaatgtaatgtattttaacggcaatagcgacgcttccacaatcaaagaaaaccaattcgatccaccgattgttgcacgctacattagaatctcccccacaagagcctataataggccgacccttcgactggaactccaaggctgcgaagtcaacggttgctccacgccactcggaatggagaacgggaaaatcgagaacaagcagattaccgcaagctcatttaaaaagtcttggtggggagattactgggagccattccgggcccggctgaatgcacaaggtagagtcaatgcctggcaagccaaagcaaataacaacaaacagtggctggagatcgatctgctcaagataaagaagatcaccgcgataatcacacagggctgtaagtctttgtccagtgaaatgtacgtcaagagctacactattcattatagcgagcaaggggtggagtggaagccctatagactcaaatcaagcatggtcgacaagatcttcgaagggaacacaaataccaagggccacgtgaaaaatttcttcaatccccctattatttctaggttcattagagtgattccgaaaacttggaaccagagcatcgcactgaggctggagcttttcggctgcgacatctat

SEQ ID NO: 2262 - DNA, 6672 bp, Artificial Sequence
  derived and/or modified sequence
atgttccctggatgtccacgattatgggtattggttgtgctgggcaccagttgggttggatggggatcccaaggtacagaggctgcccaattaaggcaattctatgtagctgcccaaggaatctcctggtcatatagaccagagcctactaattctagcctgaatttatccgtaacatcttttaagaagatagtttatagggaatatgaaccttacttcaaaaaggaaaagcctcagagcactatttcgggtcttcttgggccgacgctttacgctgaagtaggtgacataatcaaggttcatttcaaaaataaagccgacaagccattgtctattcatccacaaggtatccggtatagcaaacttagcgagggtgctagttatctagatcatacttttccagcagagaaaatggatgatgcagttgctccaggccgtgaatatacttacgagtggagtatctctgaggactctgggcctacacatgacgatcctccttgtttaactcacatctattactctcatgagaacttgatcgaagacttcaattcaggattaattggaccattactcatttgtaagaagggcactttgacagaagggggtacccaaaagacttttgacaagcaaatagttcttcttttcgccgtatttgacgagtctaaatcatggtctcaatcatcctcattaatgtacaccgtcaatggttacgtaaacggcactatgcctgacattacagtttgtgctcatgatcatatcagctggcatcttctcggaatgtcctctggtcccgaattgttttccatccactttaatgggcaggttttggagcaaaaccaccacaaggtgtcggcgatcacgctggtatctgccacctccactaccgcaaatatgaccgttgggcctgagggaaaatggattatcagctctttgactccaaaacacttacaagctgggatgcaggcttacatcgatatcaagaattgtcccaaaaaaactcgtaatttaaaaaagattactagagagcagagaaggcacatgaagaggtgggaatactttatagcagcggaagaggtaatctgggattacgctccagttattcccgctaacatggataaaaagtatcgttctcagcacctcgacaatttcagcaaccaaattggaaagcattataagaaggttatgtatactcaatacgaggatgaatctttcactaaacataccgttaacccgaatatgaaagaggatggtatattaggtccaattatcagagcgcaggtccgtgatacccttaaaatagttttcaaaaacatggcatcgaggccatactccatttatcctcatggcgtgacatttagtccgtatgaggatgaggtgaattcttcttttacgtctggccgaaataacactatgatacgagctgttcaacctggcgaaacatacacttataaatggaatatcttggaatttgatgaacctactgagaacgacgctcaatgccttacaaggccctattactccgatgttgatattatgagagatatcgcatcgggcttgatcggcttactactgatctgtaagagcagatcactagataggcgcggcattcaacgcgctgcagatatcgaacagcaagctgtattcgccgtctttgacgaaaacaagtcgtggtatctcgaggataacattaataagttttgtgaaaaccctgatgaagttaaacgtgatgaccctaaattttacgaatctaacattatgagcactataaatgggtatgtcccagagtcaattaccaccttaggattctgcttcgacgacaccgtacagtggcatttctgcagcgttggtacccagaacgagattctcactatacatttcactggccattcattcatctacggtaaaaggcatgaagataccttaactcttttccccatgcgaggggaatctgttactgtgactatggataatgttggcacttggatgttgacatctatgaactcatctcccaggagcaagaaacttagacttaaattccgtgacgttaagtgtattccagatgatgacgaggactcctatgaaattttcgagccacccgagtctacagtcatggctacacggaaaatgcatgatcgattagagccagaagatgaggaatcagatgctgattatgattatcagaacagattagccgctgccctaggcattcgtagtttccgaaactcttcgctcaaccaagaggaagaggagttcaacctgacggcgttagctctagagaacggaacggagtttgtttcttccaatacagatatcattgtcgggtccaactacagctctccatcaaacatttctaagttcaccgttaacaaccttgccgagcctcagaaagcaccctcacatcaacaggcaaccacggctggttcccccttgaggcatcttatcggaaaaaactcggtattaaattcttccactgctgagcattcatcgccttattccgaagacccgattgaggatcctcttcaacctgatgtaacaggcatccgcttattaagtttaggggctggagagtttaagtctcaggaacacgccaagcataaaggaccaaaggttgaacgggatcaagctgctaaacaccggttctcttggatgaaattgttggcccataaggtggggagacatctatcgcaggatacaggttctccgagcgggatgaggccttgggaggatttgccatcgcaggatactggcagcccctctcgtatgagaccatggaaagatccaccctctgaccttttgctactcaaacaaagtaacagttccaaaatcctcgtggggagatggcatcttgcttcagaaaaggggtcttacgagatcattcaggataccgatgaagatacagctgtaaataactggctaatctcaccccaaaatgccagtagggcctggggtgagagcactccacttgcgaataaacccgggaaacagtcaggacatcctaaatttccaagggttcgtcataagagccttcaggttaggcaagacggaggaaagagtcgtctgaaaaaatcacaatttctgatcaaaaccaggaagaaaaaaaaagagaaacatacacatcatgcgccattgtcacctagaactttccaccctctccgcagtgaggcttataatactttctcagagcgacgtcttaagcattctcttgttttgcacaagtcaaatgagaccagccttcccactgatctgaatcagacattgccatctatggattttggatggattgcttctcttccagaccataaccagaattcctcaaacgatacagggcaagcatcctgtcctcctggtctctaccagacagttccaccagaggagcattatcagacattcccaatccaagatcccgatcagatgcacagcacttccgacccatcgcatcgctcatccagccctgagctctcagaaatgttggaatatgacagatctcataaatcctttcccaccgacatatcacaaatgtcaccttccagcgaacatgaagtatggcagaccgttatcagcccggacctatctcaggtaacattgagccccgagctatcccaaactaacctttctcctgatttgtctcacaccactttgagtcccgaacttatccaaagaaatctaagccctgcccttggtcaaatgcccatctctccagacttgtcccatacgaccctctctccagatctcagtcatacaactttatctctggatctctctcagacaaatcttagcccagagttgagtcaaactaaccttagcccggcacttgggcagatgcctcttagccccgatctgtcacacactaccctttcgcttgacttctcccagactaatctatctccggagctttcgcatatgacactttcgccggagctcagccagacgaacctttctcctgctctgggccagatgcctatttctcctgacctctcgcacacaaccttgtctctcgacttctctcaaaccaacttgtctcctgaactgagtcaaactaatttgtctcctgcgcttggtcaaatgcctttgtccccagatcctagtcataccactttgagtctcgatttatctcagactaatctaagcccagagctatctcaaacgaacttatctcctgatctctccgagatgccattatttgcagatttgagtcaaattccactgacgccagacttggatcaaatgaccctgtctcccgatttgggagaaaccgatctttcaccaaattttggacaaatgagtctttctccagacttatcccaggttactttatcacctgatatttcggatacaacactacttccagacctttctcaaataagtccgccaccagatctggatcaaattttctatcctagcgaatcaagtcagtctttacttcttcaggagttcaatgaaagttttccttatcccgatttaggtcagatgcctagcccatcttcgccaactctgaacgatacattcctgtctaaggagtttaacccactggttatcgtcggtctctccaaagacggtacggattacatcgagatcattcccaaagaggaggttcaatcctcagaagacgactatgctgagattgactatgtgccttacgatgacccatataagaccgacgttagaactaacatcaacagctctcgggaccccgataacatcgcagcatggtacttgaggtcaaataacggtaatcgcagaaattactacatagctgctgaggagatttcttgggactactcagagtttgttcaaagggagactgatatcgaagactcggatgacattccagaagatactacctacaagaaagtggttttccgtaagtatcttgattccactttcactaaacgagacccaaggggcgaatatgaggaacatcttggtattcttgggcctattattcgtgcagaagtggatgatgtaatccaagtgagatttaagaacctggctagtagaccatattctcttcacgcacatggtctcagttacgagaaaagctctgaaggaaagacatatgaggatgattcacccgaatggtttaaggaagataacgctgtccagccgaactcttcctatacttatgtctggcacgctaccgaaaggtccgggccagagtcccctggatctgcatgccgtgcttgggcatattattctgccgttaatcctgagaaagatatccactctggacttatcggcccattattgatctgtcaaaaaggtattcttcataaggacagtaacatgcctatggatatgagagagttcgtgttgttgtttatgacctttgatgagaaaaaatcatggtactacgagaaaaagagtaggtctagttggcgtttgacctcttccgaaatgaagaagtcccacgaatttcatgcgatcaacggtatgatatactctttgccaggtttgaaaatgtacgagcaagaatgggtgagacttcatcttttgaacattggaggttctcaagatattcatgttgttcacttccatgggcaaacactcctggaaaatggtaacaagcagcatcagttgggtgtgtggccacttttgcccggatcttttaaaacccttgagatgaaagcctctaagcctggctggtggttgttgaatactgaagtgggagagaaccagagagcaggaatgcaaactccattccttattatggatcgtgattgtagaatgccaatgggcttatctacaggtataatttcagatagtcagatcaaagcctcggagtttctaggctactgggaacccagacttgccaggctgaataatggaggctcttataatgcttggagtgttgagaagttggccgctgagttcgctagtaaaccctggatacaggtagatatgcagaaggaggtaattatcaccggcattcagactcaaggagccaagcattacctgaaatcgtgttacaccacagaattttacgttgcttatagttccaatcagatcaactggcagattttcaaggggaattctactcggaatgtgatgtactttaatggaaattccgatgccagcactattaaggagaaccaatttgatccaccgattgttgctagatacattcggatttctcccactagagcttataatcgaccgactcttaggttagagttgcaaggttgcgaggttaatgggtgcagcacacctttaggaatggagaatggtaagatagagaataaacaaatcacagcatcttcatttaagaaaagttggtggggtgattactgggaaccattccgtgctcgtcttaacgcacagggtagggttaatgcatggcaagccaaggccaataataacaagcaatggctcgaaatagatctgcttaaaatcaaaaagataaccgctataataacccagggctgtaagtcgctatctagtgaaatgtacgttaagtcctacactatccactactctgagcagggtgtagagtggaaaccttatagactaaaatcatccatggtcgacaaaatctttgaaggcaacacaaacacaaagggacacgttaaaaacttcttcaatccaccgattatttcccgtttcatcagagtaatcccaaagacctggaaccaatccattgctcttcgtttagaattgttcggttgtgatatctat

SEQ ID NO: 2263 - DNA, 6672 bp, Artificial Sequence
  derived and/or modified sequence
atgttccctggatgccctcggctctgggtgctggtggtgctgggaacttcttgggtgggatgggggtcccaggggaccgaagccgctcagctccgccagttctatgtggccgcgcagggcatttcctggtcgtaccgcccagaaccgactaactcgagcctcaacctgtcggtgacttcattcaagaagatcgtgtaccgcgaatacgaaccgtactttaagaaagagaagccgcaatccaccattagcggactgctggggccgaccctctacgcggaggtgggcgacattatcaaggtccacttcaagaacaaggcggacaaaccactgtcgatccacccgcaaggaatccggtatagcaagctgtccgagggagcttcgtacctggatcatacttttcccgctgagaaaatggacgatgccgtcgccccaggtcgggagtacacctacgaatggtccatttcagaagattcgggtccgactcatgacgacccaccatgcctcactcatatctactacagtcacgagaaccttatcgaggacttcaactcgggactcatcggtcctttgctcatctgtaagaagggcaccctgaccgagggaggaactcagaaaacctttgacaaacaaatcgtgctgctgttcgctgtgtttgatgagtcgaaatcgtggtcccagtcgagcagccttatgtacactgtgaacggatacgtcaacggaaccatgccagacatcaccgtgtgtgcccatgaccacatcagctggcacttgctgggaatgtcctcgggaccagagctgttttcgatccacttcaacggccaggtcctggaacagaaccaccacaaggttagcgcgattacgctggtgtcggccacttccactaccgccaacatgaccgtggggccggagggaaagtggatcatctcgagcttgacgccgaagcaccttcaggctgggatgcaggcttacatcgacatcaagaactgccctaaaaagacccggaacctgaaaaagattaccagggaacagcgccggcacatgaaacggtgggaatacttcatcgccgccgaggaggtcatctgggactacgccccggttattcctgcaaacatggacaagaaatatcgcagccagcacctggacaatttctccaatcagatcggaaagcactacaagaaggtcatgtacactcaatacgaggacgagagcttcaccaagcacaccgtgaatccaaatatgaaggaagatggtattctcggcccgatcatccgcgcccaagtgcgggacactctgaaaattgttttcaagaatatggcctcacggccatacagcatctacccgcatggtgtgactttcagcccgtatgaggatgaggtgaactcatcattcacttccggacgaaacaacaccatgatccgcgccgtccaacctggagaaacttacacctacaagtggaacatcctggagttcgatgagccaactgaaaacgacgcgcagtgcctgacccgcccgtactattccgacgtggatatcatgcgagatatcgcgtccggactcatcggactgctgctgatctgtaagtcccggtcgctggaccgtaggggcatccagcgcgcagccgacatcgaacagcaagcggtgttcgccgtctttgacgagaacaaatcttggtatctggaggacaacatcaataagttttgcgagaaccctgatgaggtgaaacgcgacgatcctaagttctacgaatctaacatcatgtcgactatcaacggatacgtgccggagtcaatcactactctgggattctgctttgacgacaccgtgcagtggcacttctgttccgtcggcactcagaatgaaatccttaccatccactttactggtcatagcttcatttacggtaaacgccacgaagataccctcaccctgttccctatgcgcggtgagtccgtcaccgtgaccatggataacgtcggaacctggatgctcaccagcatgaattcgtcaccccgctcgaagaaacttaggcttaagttccgggacgtcaaatgcatcccggatgacgacgaagatagctacgagatttttgaaccaccggaatcgactgtgatggccactcgcaagatgcacgacagacttgaaccggaagatgaggaatcggatgccgactacgactaccagaatagactggctgccgcattgggcattcgctccttccgcaactctagcctgaaccaggaggaagaggaattcaacctcaccgcactggccttggagaatggaaccgaattcgtgtcgagcaacaccgacatcattgttggttccaactactcctcgccatccaatatctcaaagttcaccgtgaataatctggccgagccgcagaaggcaccaagccatcagcaagccaccaccgcgggaagcccacttcggcacctgatcggcaaaaactcggtgcttaattcatctaccgcggaacacagctcaccatactcagaagatccaattgaagatccgctgcaaccggacgttaccggcatccggctgctgtcgcttggtgcgggagagttcaaaagtcaggagcatgccaagcataagggaccgaaagtggaacgggatcaggcggcaaagcaccggttctcctggatgaagctgctggcgcataaggtcgggcggcatttgagccaggacaccggaagccccagcgggatgcgcccctgggaggacctgccttcacaggacactggaagcccatcccggatgcgcccgtggaaggacccaccgagcgacctgctgttgctcaagcagtctaactcgagcaagatcctggtcggcagatggcacttggcctcggagaaaggatcctatgaaatcattcaagacaccgacgaggataccgctgtgaacaattggctgatctccccgcaaaatgcctcgcgggcgtggggcgagagcactccgctggcgaacaagccaggtaagcaatcgggtcacccaaagttcccgagagtgagacataagtcgctccaagtccggcaggacggagggaagtcacgcctcaagaagtcccagttcctcattaagaccagaaagaagaagaaggaaaagcatacccaccacgcccctctgtccccccggaccttccacccgctgagatcggaggcttacaacactttctccgaaaggcggctcaagcattccctggtgctgcataagtccaacgagacgtcactgccgaccgacctcaaccaaactctgccgtccatggactttggatggatcgcttcgctgcccgaccataaccagaactcctcaaacgacaccggacaggcgtcgtgccctccgggactgtatcagactgttccgccagaagaacattaccagacctttcctatccaagacccggaccagatgcactcgaccagcgatccttcccaccgcagctcgagcccggaactgtccgaaatgctggaatacgacagatcacacaagtcgtttccaaccgatatcagtcaaatgtcgccctcttcagagcacgaggtgtggcaaaccgtgatctcccctgatctgtcgcaagtcaccctctcaccggaactgagccaaactaacttgagcccagatctttcccacaccactctgagtcctgagcttatccagcggaaccttagcccagcgctcggacagatgcctatttcgccggacctgtcccacactaccctcagcccggacctctcacacaccactctcagcctggatctctcgcaaactaacctctcccccgagctgtcacaaaccaacctctcaccagctctcggccaaatgccgctctcccccgatctctcacataccactctgagcctcgacttctcccaaaccaacttgtcgcccgaactctcccacatgactctttcaccagaattgtcacagactaatctgtccccggccctcgggcagatgcctatctcgcctgatctgtcacatactactctctcgctcgatttttcgcaaaccaatctttcacctgaactgtcccagactaacctgtccccagcgcttgggcaaatgcctctctcgcctgaccccagccacactactctgtcattggatctgtcccagaccaatttgagccccgaattgtcgcaaactaatctctcgccagatctctcagagatgccccttttcgcggacttgtcgcaaatcccactgaccccggacctggatcagatgaccctctcgcccgacttgggagagactgacctctcaccgaactttggacagatgtcactgtcgcctgacctcagccaagtgaccttgtccccggacatcagtgacacgacgctcctgcccgatctgagccagatctcgcctccacccgatctcgaccaaatcttctatccatccgaatcgtcgcaaagccttttgctccaggagttcaacgaatcctttccctacccagacctgggccaaatgccttcgccgtcgtcaccgactctgaacgataccttcctctcaaaggagttcaaccccttggtgatcgtgggtctttcaaaagacggcaccgactatatagagatcattcccaaggaagaggtgcagtcgtcagaggacgactacgccgaaatcgattacgtcccctacgatgacccttacaaaaccgacgtgcgaacgaatatcaactcctcgcgggacccggacaacatcgctgcctggtacctcagatcgaataacggaaacagacgcaactactacatcgcagcagaagaaatctcgtgggattactccgagttcgtgcagcgggaaaccgatatcgaagattcggatgatattccggaggacaccacgtataagaaagtggtgttccggaaatatctcgacagcactttcaccaagcgcgacccgcgaggagaatatgaagagcatctgggaattctgggaccgattatccgcgccgaagtcgatgacgtgatccaggtgcggttcaagaacctggcgagccgcccatacagcctgcatgcccatggactgagctacgagaaatcatccgaaggcaagacttatgaagatgattcacctgagtggtttaaggaggacaacgccgtgcagccgaactcctcgtacacttacgtctggcatgcgactgagcgctccggaccggaatccccgggatcagcgtgccgggcgtgggcgtactactccgccgttaacccggaaaaagacatccattcaggcctcatcggcccactgctgatttgccagaagggaatcctgcacaaagattccaatatgccgatggacatgcgcgaattcgtcctgctgtttatgacgtttgatgaaaagaaatcctggtactacgaaaagaagtccaggtcatcctggaggctcacctcgtccgagatgaagaagtcccatgagttccatgcgatcaatggaatgatctactcgctcccgggcctcaagatgtacgaacaagagtgggtccgcctgcacctgctgaacatcggtggatcgcaggacatccacgtggtgcacttccatggacaaaccctgctggaaaacggtaacaagcagcaccagctgggtgtgtggcctctcctgccgggatcgttcaagactctggagatgaaagccagtaagccagggtggtggctgttgaataccgaggtcggagagaaccaacgggcaggtatgcagactccctttctgatcatggaccgggattgtcgcatgccgatgggtctgtcgacgggtatcatcagcgactcccagatcaaagccagcgaattcctcggctattgggagccgcgactcgcacgcctgaataacgggggatcgtacaatgcctggtccgtcgaaaagctggctgctgagttcgcgtcaaagccatggattcaggtggatatgcagaaggaagtgatcatcactggcatccaaacgcaaggggccaagcattacctgaaaagctgctacaccactgaattctacgtcgcatactcctcgaaccagatcaattggcagatctttaagggcaactccactagaaacgtgatgtacttcaacggaaattcagatgcctcgactatcaaggaaaaccagttcgacccgccgattgtggcgcgctacatccgcatctccccgacgcgggcatacaaccggccgaccctccgcttggaactccagggatgcgaagtgaacggatgcagcacgccgctgggaatggaaaacggaaagattgagaataaacagatcactgcgtcctccttcaaaaagtcgtggtggggagactactgggaaccgtttcgcgctagacttaacgcacagggacgcgtgaatgcttggcaggctaaagccaataacaacaaacagtggctcgaaatcgaccttttgaagatcaaaaagatcacggccatcatcactcagggttgcaagtccctgtcctcagaaatgtacgtcaagagctacaccattcactactccgaacaaggagtggagtggaagccttaccgcttgaagtcctcaatggtggacaaaatctttgaaggaaacaccaacaccaagggccatgttaagaatttcttcaaccccccgattatcagcaggttcatccgtgtgattcctaaaacgtggaatcagagcatcgccctgcgcctcgagctcttcggatgcgacatctac

SEQ ID NO: 2264 - DNA, 6672 bp, Artificial Sequence
  derived and/or modified sequence
atgtttccaggttgccctcggctctgggtgttggtagttttgggaacaagttgggttgggtggggatcacaaggcacggaagccgcacagttgcgacaattctatgttgctgcacaaggcatatcttggtcttacagaccagagccaactaactcttctctcaacttgtcagtcacatcatttaagaagattgtttatagagaatatgaaccctatttcaaaaaagaaaagccacaatctactatatctggccttttaggaccgacattgtatgctgaagttggagatattatcaaagttcatttcaaaaataaggccgacaaaccactatcgattcacccacagggaatacgttatagtaagctgtctgaaggagcatcttatttagatcatacttttccagctgagaaaatggacgatgcagttgctccaggacgtgaatatacatatgaatggtcaatatcggaagacagtggaccaactcatgacgatccaccttgcctcactcatatttactacagccatgaaaacctaatagaggatttcaattcagggctcattggtccactgcttatatgcaaaaaaggaactcttactgaaggaggaactcaaaaaactttcgataagcaaattgtcctccttttcgcggttttcgatgaatcaaagtcctggtctcagtcctcttcgctaatgtatacagtgaatggatacgtcaatggaacgatgccagatataacggtatgtgctcatgatcatatttcgtggcacttattaggaatgtcctccggacctgaattgttctctattcacttcaacggacaggttctggaacaaaatcatcacaaggtgagtgcaataacccttgtatctgctacttcaacgaccgcaaatatgacagtaggcccagaaggtaaatggataatttcgtcattgacaccaaaacatctgcaggcaggcatgcaggcttatatcgatattaagaactgccctaagaaaacacgtaatttaaaaaaaattacccgagaacaacgtcgtcatatgaaacgttgggaatatttcattgcagcagaggaggtaatttgggattatgctccagtcatcccagccaacatggataaaaagtaccgatcacaacatttggataatttctcgaatcagatcggaaaacattataagaaagttatgtatactcagtatgaggatgaatcgttcacgaagcatactgttaaccctaacatgaaagaggacggtattttaggtccaatcattagggcacaagttagggatacattgaagattgtcttcaagaatatggccagtcggccgtattctatatatccacacggagttactttttcaccatacgaagatgaagtcaatagctcgttcacgtcaggacggaataacactatgatcagggctgttcaaccaggagaaacctacacctataaatggaatattctcgaattcgacgaacccacagaaaacgatgcccagtgtttgactagaccatattattctgacgttgacatcatgagagacatagcttccggactaattggtttgcttcttatctgcaagtctcgttcactcgatcgtcgtgggatccaacgtgctgccgatattgaacaacaagcggtattcgctgtgtttgatgaaaacaaatcgtggtatttggaggataatattaataaattctgtgagaatccagacgaagtgaagcgtgatgatccaaaattttatgaatccaatattatgagtactattaacggatacgtgccagagtcgattacaacccttgggttttgcttcgacgacacggtccaatggcacttctgctcagtgggtacccaaaacgagatattgacgatccattttacagggcactcgttcatttatgggaaacgacatgaagatacacttacgcttttcccaatgcgcggagaatcggttaccgtcactatggataacgttgggacctggatgttgacatccatgaacagctcgccgcgttcaaaaaagctccgactcaaattccgagatgtcaagtgtatcccagatgacgatgaagactcatatgagatctttgaaccaccagagtcgactgttatggctaccaggaagatgcatgaccgactagaacccgaagacgaggagtcagatgcagattatgactatcaaaatagacttgcagccgcactgggaatcagatcgtttagaaattcgtccttgaatcaagaagaagaggaatttaatctcaccgctctggcactcgagaacggaacggagttcgtgtctagtaatacggatataatcgtcggaagtaactattcgtctccaagtaatatttccaagtttaccgttaataacttagccgaacctcaaaaggcaccgtcacaccagcaagctaccacggcaggatcaccactccgtcatctgattggcaaaaactccgtcttgaatagctcaactgctgagcattcatcaccatatagtgaggatcctatagaggatcctctccaaccagatgtgactggtatccgattgttgtctctgggcgctggggagtttaaatcgcaggaacatgccaaacacaagggaccaaaggtggaacgagatcaagctgccaagcatcgtttctcatggatgaaattactcgctcacaaggtcggtagacacctctcgcaagatactggatcgccatcaggaatgcgaccctgggaggatcttccatcacaagataccggatctccatcgcgaatgcggccatggaaagatccaccatccgatcttctgttgctaaaacagagcaactcatccaaaattcttgtgggtcggtggcatcttgcctcagaaaaaggatcttatgaaattatccaggatacagacgaagatacagccgttaacaactggcttatttcgccacaaaacgcctctcgggcttggggtgaatcaacgccgttagcgaataaacccggtaagcaaagtggacaccctaagtttcctagagttaggcataagtcactacaagtccgtcaagatggtggaaaaagtcgactaaaaaaaagtcaattcttaatcaagacaaggaaaaaaaaaaaagaaaaacatactcatcatgctccactctctccaaggactttccatccactacgttcagaggcctataacacttttagcgaacgtcgtttaaaacactctcttgttctgcacaaaagtaatgaaacatcactgccgactgacctcaatcagacattgccttccatggatttcggatggatcgcatcgctgcctgatcataatcaaaattcaagcaatgatacaggacaggcctcctgtccaccaggactgtatcaaaccgttccaccggaagagcactatcaaacatttccaatacaagatccagaccagatgcattccacttccgatccgtcccatcgtagttcatcacctgaactctcagagatgttggaatacgacagatcacataaatcttttccaacagatatctcacaaatgtcaccaagttccgaacacgaagtgtggcagacggttatttcacctgacttgtcgcaagtgacattgtctcccgaattgtcccaaacaaacctcagcccagatttgagtcatacaactctttcgccggagttgattcagcgcaacctaagcccggcattgggacagatgcccatctccccagatcttagccatactacattgtcaccggatctgtctcataccactctctcacttgatttatcgcagacgaacctttcgcctgagctctcgcagactaatctctccccagctcttggtcaaatgcccctgtcacctgacttgtcgcatactactctctctttagatttctcgcaaactaatctttcgccagaattgtctcatatgactttgtctccagagctttcgcaaacgaatttgagcccagctcttggacaaatgccgatttccccagacctttctcacaccacactctccttagatttctctcaaactaatctatcacctgaacttagtcagacaaatttgtctccggctttaggacaaatgccactctctccagatccatctcatacaacgcttagtttggacctttcacagaccaatctttctccagaattgtctcaaactaatttgtcaccagatctttctgagatgcctttatttgcggatctttcacaaatccctctcactccggacctcgatcagatgactctttcacctgacttgggagagactgacctgtcacctaatttcggacaaatgagtctcagtccagacctttcacaagtcacattatccccagatatttcagatactacactgctgcccgatctgtctcaaatttctcctccaccggatcttgatcaaatattctatccatcagaatcttcacaatcattgcttcttcaagaatttaacgaatccttcccgtatccagatctaggtcagatgccgtccccaagttcgccgaccctgaatgacactttcctgtcgaaggaattcaatcctttggtcattgtgggactctctaaggacggaacggattacatagagatcattccaaaggaagaggttcaaagttcagaagacgactatgccgagattgattatgtaccctacgatgatccatataagaccgatgttaggacaaacatcaacagctcgcgtgacccggataacatagctgcctggtatttacgctccaataatggaaatagaagaaattattacattgcagctgaagagatctcatgggattactcagagttcgtccaaagagaaacggatattgaagactcagatgacatcccagaagatacaacttataagaaggttgtgttccgcaaatacctcgattcgactttcactaaacgggatccaagaggagagtatgaagaacatctgggaatattgggcccgatcatacgtgctgaggtcgatgatgtaattcaagtccgtttcaagaatttagcttcccgtccttatagccttcacgcacacggactttcttacgaaaaaagtagcgagggaaaaacatatgaagacgattcaccagagtggtttaaggaagataatgctgttcagccaaactcatcttacacatacgtttggcatgcgaccgaaaggtctggtccagaatcgccgggttcggcttgtcgtgcctgggcatactattcagcggtgaacccagaaaaagatatacactcgggtttgattggaccacttctgatctgtcagaaaggcattttgcacaaagattctaatatgcccatggatatgcgagaatttgtattgcttttcatgacgtttgatgaaaaaaaatcctggtattacgaaaagaaatcgcgatcgagttggcgattaacatcgagtgagatgaaaaaatcacatgagttccacgctataaatggaatgatctacagtctgcctggactcaaaatgtatgaacaagagtgggtccgcttgcatttattgaacattggaggatcccaggatattcatgtcgtccatttccacggccagactcttctggagaatggaaataaacaacatcagcttggagtatggcccctgctcccaggctcgtttaagacattagagatgaaagctagcaagccgggatggtggttgctcaataccgaagttggagagaatcaaagggctggaatgcaaacccctttcctaataatggaccgagactgtcgtatgccaatgggattgtctactggcattatcagtgacagtcagattaaggcaagcgagttcctaggctattgggaaccacgcttagcccgactgaataacggaggcagttataacgcatggtctgtcgagaagcttgctgcagagttcgcctctaagccctggattcaagtggatatgcagaaagaagttataataactggtatccaaacacagggagccaaacactatcttaaatcctgctacacaactgaattttatgtcgcatactcatcgaatcaaatcaactggcagatcttcaagggaaactcaacacgaaatgtcatgtacttcaatggcaactcagatgcgagtacaattaaagaaaatcagtttgatccaccgattgttgcgaggtatattaggatatcgccaactcgtgcttacaatcgcccaaccttaagactggaattgcagggatgtgaagttaatggatgcagtactccactgggaatggaaaatggcaaaattgagaataagcaaataactgcatcctcttttaaaaagagttggtggggtgattattgggaaccattcagagctcgtcttaatgctcaaggaagagttaacgcttggcaggccaaagctaacaataataagcaatggcttgagatcgatttgttgaaaatcaagaagattactgccatcatcactcagggatgcaagtcgttgtcatctgagatgtatgtcaaatcttacacgattcactactcggaacagggagttgagtggaagccgtaccgcctgaaaagctcaatggtagataaaattttcgagggaaatacaaacactaagggacatgttaagaattttttcaaccccccaattatttctcgtttcataagggttatcccaaaaacttggaatcaatctattgctttgcggctggaactcttcggttgcgacatctat

SEQ ID NO: 2265 - DNA, 6672 bp, Artificial Sequence
  derived and/or modified sequence
atgttccccggatgtcctaggctctgggtgctggtcgtgctggggacatcgtgggtcgggtggggctcccagggaaccgaagctgcacagctgcgacagttttatgtcgccgcgcaaggaatctcctggtcgtaccgtccagagccgaccaatagcagtttgaacctttcagttacttctttcaaaaaaatagtgtaccgcgaatacgaaccctactttaagaaagaaaagccacagtctaccataagcgggcttttgggtccaacactctacgccgaggtgggagatataattaaagttcacttcaagaacaaggccgataagccgctgagcatccacccccaaggcatacgatactctaaactgagtgaaggagcatcctatctagaccataccttccccgcagaaaagatggacgatgctgtggctcctggccgggagtacacctacgaatggtctatctctgaagattccggacccactcacgacgaccccccttgtctgacgcacatctactacagtcatgagaatctgatcgaagattttaactctggtcttatcggccccctgctgatctgcaagaagggaacacttaccgagggtggtacccaaaaaacatttgataagcagatcgtgctgctgtttgccgtctttgacgaaagcaagtcttggtctcagagttcgagtctgatgtacaccgtaaatggatacgttaatgggacgatgcccgatataacagtctgcgctcacgatcacatctcttggcacctccttggtatgtcttctggaccagagctgttttccatacactttaacggccaggtactcgagcagaaccatcataaggtctcagccattaccctggtctcagctacgtccacaacggcgaacatgacagttggacctgaaggaaagtggatcatatcctctctgacaccaaagcacctacaagccggaatgcaagcatatattgacatcaaaaactgcccaaagaagacccgaaacctgaagaaaattacacgagaacagcgccgacacatgaaaaggtgggagtactttattgccgccgaggaggtgatctgggattatgcccctgtgataccagctaacatggacaagaaatacaggagccaacaccttgacaactttagtaaccagataggcaagcattataaaaaggtgatgtacacacagtacgaagatgagagctttacgaagcataccgttaaccccaatatgaaagaagacggaatcttggggcctattattagggcccaggtacgtgacacactcaaaatcgtcttcaagaatatggccagccgaccctactccatatatcctcatggggtgacattctccccgtatgaagatgaggttaattcatcatttacatccggacgtaacaataccatgattcgtgccgttcagcccggggaaacatacacatataagtggaacatccttgagtttgacgagcccaccgaaaacgatgcccaatgtctcacaaggccatactactcagatgtcgacatcatgcgagacatcgccagcggactgatcggactgctgcttatctgcaagtcccgatctctagacaggagaggcattcaaagagcagcggacatagagcagcaggcggtgttcgcagtgttcgatgaaaacaaatcgtggtacctagaggacaacattaataagttttgtgagaacccagacgaggtgaaacgagacgaccctaagttctatgagtccaatattatgtctacaattaacggctacgtccccgaatccattacaacactgggattctgttttgacgacacggtgcaatggcacttctgttccgtcgggacccagaatgagatcttgactatacatttcaccggccattcatttatctacggcaaacgtcacgaagatactctcacactatttcctatgagaggtgaaagtgttactgtgacaatggacaacgttggaacttggatgttgaccagcatgaattcgagccctcgcagtaagaaactccgattaaaattccgagacgtgaagtgcatcccagacgacgatgaagacagctatgaaatcttcgagcccccggaatcaacagtcatggctactcgtaagatgcacgaccgtttagaaccggaggacgaggaatccgacgctgattatgactaccagaaccgactggctgccgctctcggtattaggagctttcgaaacagcagtcttaaccaggaagaagaggaatttaatttaacggccctggcgctggagaatggcaccgagttcgtctcaagcaacacggatataatagtgggaagtaattatagctccccaagtaacatatccaaattcactgtgaataaccttgccgaaccacagaaggctccttctcatcaacaggctaccacggcagggagccccctacgacacctgattgggaaaaatagcgtcctcaacagctccacggcagagcatagttccccctactctgaagaccccattgaggaccccctgcagcctgacgtgacaggcatccgactgcttagtttaggagctggcgagttcaaatcccaggagcacgccaagcacaaaggaccgaaagtggagagggaccaggccgccaagcacaggttttcgtggatgaagctgttagcccacaaggtcggaagacatctcagccaggatacgggatccccttctggcatgagaccatgggaggacttgccgtcccaggacaccggaagtccgagtcggatgcgaccttggaaggacccccccagcgacctcctcctccttaagcagagcaattctagcaagattctggtcggaaggtggcacctagcatctgaaaaaggatcttacgaaataatccaggatacagacgaggacaccgctgtgaataactggctgatcagtccgcagaacgctagcagggcttggggagaatctacaccactagcgaataagcccggaaaacaaagtggacaccctaagttccccagggtcaggcacaagagcttgcaggttagacaggacgggggcaagtctaggctcaaaaagagccaattcttgattaagacccgcaagaaaaaaaaggaaaaacacacccaccatgcacccctctcccccaggaccttccatcctctgaggtctgaggcttacaacactttctcagagaggcgactgaaacactcactggtcctgcataaaagcaacgaaactagcctcccaactgacttgaatcagaccttacccagtatggactttggatggatcgcttctctgcctgatcataaccagaatagctcaaacgatacaggtcaagcctcgtgtcctcctggcctataccagaccgtcccacccgaggagcattaccagaccttcccaatccaagaccctgatcagatgcattccacaagtgacccctctcatcgttcctcatcaccagagctttcagaaatgctggagtatgatcgatctcataagtctttccctacagacatctctcagatgtccccgtcttctgagcacgaagtctggcagaccgtcattagtccggacctctcacaggtgacactctccccagagctcagccagaccaacctgtcgccggacctatcacatactaccctatccccggagcttattcagcgaaacctttctccagcgctgggccagatgcctatcagtccagatttgagtcacactacgctgtcgcctgacttatcacataccacactttcccttgatttgtcccaaacaaacctctctcccgagctgtctcaaaccaatctgtcaccagccttggggcagatgccgctgagccccgacctgtcccacaccaccttgagcctggatttctctcagacaaatctgtcaccagaactgtcccatatgactttgagtcctgagctttcacaaacaaatctatccccagcactcgggcagatgcccatcagccccgatctttcgcacacaacactgtcgctggatttttcacagaccaatctaagcccagagctctctcagaccaatctttctcccgctttgggacagatgcccctttctcctgaccctagtcacacaactctgagcctggatctgtcccagaccaatctttcaccagaactttcacagacaaacttgtctcccgatctgagcgagatgccacttttcgcagacttgtcacagattccacttacccccgacctggatcagatgactctttcgccagatctgggtgaaaccgatcttagtcccaactttggtcagatgagtctgtctcctgacctgagccaagttacactgtcaccggacatttctgatacaactctgctgcccgatttgagccagatatccccccctcctgatctggatcagattttttatcctagcgagagtagtcagtctttgctcctgcaagagtttaatgagtcttttccatacccagacctcgggcagatgcccagccctagctctccgactctgaacgatactttcctgtcaaaggaattcaaccccctggtaattgtcggcctgagtaaggacggtacagattacatagagatcatccctaaggaagaggtccagtcgtccgaggatgactacgccgagattgattatgtgccttacgatgacccttacaaaactgacgttcgcaccaacatcaacagctcaagggaccccgacaacattgcagcctggtatctaaggagtaacaacggaaatcgacgtaattactacatcgctgccgaagaaatcagctgggattacagcgagtttgtgcagcgagagaccgatatagaggattccgacgatattcccgaagacacaacctacaagaaagtggtcttcagaaagtatctggacagtacgttcaccaaaagggatcctaggggggaatatgaggaacacctgggaattctgggacctatcatccgggctgaggtggatgatgtcattcaggttcgattcaaaaatcttgctagccgtccctattctttacacgcccatggcctgagctacgaaaagtcttctgaaggcaaaacatacgaagatgactcacctgaatggtttaaagaggataacgcggtccagcccaatagctcatatacctacgtgtggcacgcgaccgagcggagtggccccgagtctcctggcagcgcttgtagggcctgggcctattactccgcagttaatccagagaaggatatccattcgggtctgattggccccctgctgatttgccagaagggaatcctgcacaaagattctaacatgccgatggatatgcgagaattcgtgctgctgttcatgaccttcgatgaaaagaaatcatggtactatgagaagaagagtcgatcttcgtggcggctgacttcttcagaaatgaagaaaagccacgaatttcatgctattaacggaatgatttattctctgcccggcctcaagatgtacgaacaggaatgggtgcgacttcatctgctgaacattggggggagccaggacatacatgtggtgcattttcatggacagactctccttgagaatggcaataagcaacatcaactcggcgtgtggccccttctacccggctccttcaaaacgttagaaatgaaagcttccaagccaggctggtggctgcttaacactgaggtaggagagaaccagagggcaggcatgcagactccatttctcattatggatcgtgactgcagaatgcccatggggctgtccacgggtatcatctccgacagtcaaattaaggcctctgagttcttggggtattgggagccacgactggccagactcaacaacggcgggtcttacaacgcgtggtcagtagagaagttggccgcagagtttgcaagcaaaccctggatccaggtcgatatgcagaaagaagtgataataacagggatccagacacagggggccaaacactatctcaagagctgttacactactgaattttatgtggcctattcttccaaccagattaattggcaaattttcaagggtaactctactaggaacgtaatgtacttcaatggcaattctgacgcatccactatcaaagaaaatcaattcgatcctccaatcgtggcacgatacatcaggatatctcctacacgtgcttataacagaccgactctgagactcgagttacaaggctgtgaggttaatggctgctccacccctttgggtatggagaacggaaaaatcgaaaacaagcaaatcaccgcctcctcattcaagaagagctggtggggagactactgggagcctttcagggcaagacttaatgcgcagggcagagtaaacgcttggcaagcaaaggctaataacaataagcagtggcttgaaatagatctattaaaaatcaagaaaataaccgccattatcactcaagggtgtaaatccttatcatccgaaatgtacgtgaagtcgtacactattcattactctgaacagggtgttgagtggaaaccttaccgactcaaatccagcatggtggataaaattttcgaagggaataccaacacaaaggggcacgttaaaaactttttcaatcccccaataatcagccgattcatcagagtcattcccaagacctggaatcagtcgatagccttgaggctggaacttttcggatgtgatatctat

SEQ ID NO: 2266 - DNA, 6672 bp, Artificial Sequence
  derived and/or modified sequence
atgttcccgggatgtccaagactgtgggtgctcgtggtgttgggaacctcatgggtcggatgggggtcccagggaacggaagcggcgcagctcaggcaattctatgtcgctgcccaaggaatctcctggtcttaccgccccgagcctaccaacagctcattgaatctgtcggtcaccagcttcaagaagatcgtctaccgggaatacgaaccgtactttaagaaggaaaagccccaatcaactatctcaggcctgctgggacctaccctctacgccgaggtgggagacatcatcaaggtgcacttcaagaataaggcggacaaaccactgtctattcacccacaaggcattaggtactcaaagctgtccgaaggtgcttcgtacctcgaccacaccttcccagccgagaagatggacgacgctgttgcccctggacgcgagtacacctacgagtggtcaatttcggaagattccggacctactcatgacgacccgccgtgcctgacccatatctactactctcatgaaaaccttattgaggatttcaattccggactcattggaccgctcctcatatgcaaaaagggcaccttgactgagggaggcacccagaaaacctttgacaaacagatcgtcctcctgtttgcagtgtttgacgagtctaaatcctggtcccagtcatcgtcccttatgtacaccgtcaacggatatgtgaacggaactatgccagacatcactgtgtgcgctcatgatcatataagctggcacctgctgggaatgagctcgggaccggaactgttctcgatccacttcaatggccaagtgctggagcagaatcaccataaagtgtcggctatcactcttgtgagcgcgacttcgaccacggcgaacatgacggtgggaccagaaggaaagtggatcatttcatcactgaccccgaagcacctccaagcaggcatgcaggcctatatcgatatcaagaattgccccaaaaagactcggaacctcaaaaagatcactcgagagcaacggcgccatatgaagaggtgggaatacttcatcgcggcagaggaggtgatctgggactacgcgccagtcatccctgccaatatggacaagaagtaccgctcgcagcacctggacaacttctctaaccagatcggcaaacattacaagaaggtgatgtacacccagtacgaagatgagagcttcaccaaacacaccgtcaaccccaatatgaaagaggacggcattctgggcccaatcataagagcgcaagtcagagatacgctgaagattgtgttcaagaacatggcctccagaccctactccatttacccgcacggagtcacgttctcgccgtacgaggacgaagtgaactccagctttacttcgggacgtaataacactatgatccgcgcggtccaacctggcgaaacgtacacctacaagtggaacatcttggagtttgacgaaccaactgagaacgatgcccaatgcttgacccgcccttactacagcgatgtggacatcatgcgtgacatcgcctccgggctgatcgggctcttgctcatctgcaagagccgcagcctcgatcgacgtggaatccagagggccgccgacatcgaacaacaggcggttttcgcggtgttcgatgaaaacaagagctggtaccttgaggataacatcaacaagttctgcgagaacccggatgaagttaagcgcgacgaccctaaattctacgagtcaaacattatgtccaccatcaatggctacgttcctgaatcgatcaccacgctgggtttttgtttcgatgataccgtgcagtggcacttttgctccgtcgggactcagaacgaaatcctcactatccatttcactgggcattcgttcatctacgggaagcgccatgaggacaccctgaccctgttcccaatgcgcggagaatccgttaccgtgactatggataacgtgggaacgtggatgctcacgagcatgaactcctcacctagatccaagaaactccggctgaagttccgagatgtgaagtgcataccagatgacgacgaggattcatacgaaatcttcgagccgccggaatcaactgttatggctaccagaaagatgcacgaccggctcgaaccagaggacgaagaatccgacgcagactacgattaccagaatagactggctgcagcgctgggaatccggtcgttccggaattcttccttgaatcaggaggaggaagaattcaatctgaccgctctcgcattggagaacggaacggagtttgtcagctccaacaccgacatcatcgtgggctcgaactactcgtccccatcgaatatctcaaaattcaccgtcaataacctcgcggaaccgcagaaagccccgtcacaccagcaggctactaccgcagggagcccgctcagacaccttatcggaaaaaactccgtgctgaattcgtcgactgccgaacattcgtcaccctactcggaagatcccatcgaagatcctctgcaacctgacgtcacggggatccggctgctgagcctcggggccggggagttcaagtcacaagagcatgctaagcataaaggccccaaggtggaaagggaccaagccgcaaagcaccgctttagctggatgaaactgttggcgcacaaagtgggccgccacctgtcacaagataccggttcgccctcgggaatgcgtccttgggaggacctgccatcccaagacaccggttccccatcgaggatgcggccttggaaagatccgccgtccgatctgttgctccttaagcagtcgaactcatcaaaaatcctcgtgggacgctggcacctggcgtcagagaagggatcgtacgagatcatccaggacactgacgaggacaccgccgtgaacaactggctgatctcgccgcaaaatgcctcgcgcgcgtggggtgaatcaacgcccctggccaacaaacctggcaagcagtcgggtcacccaaagttcccaagagtgcggcacaagtcacttcaggtgcggcaggatggtggaaagtcgcggctgaagaaatcacagtttctcatcaagacgcgcaagaaaaagaaagagaagcacacccaccatgcccccctgtccccgcggactttccacccactccggtccgaagcatataacaccttctcggagcgacggctgaaacattccctggtgctgcataaatccaacgagacttcccttccaaccgatttgaaccaaactctcccaagcatggacttcgggtggatcgcgtctttgcccgaccataaccagaactcctcgaacgatactggtcaagccagctgtccgcccggtctttaccagaccgtgccacccgaagagcattaccaaacttttccaatccaggacccggatcagatgcactcgacctccgatccgtctcaccggtcaagctcgccggaattgtctgaaatgctggaatacgatcgctcccataagagcttccccactgatatcagccaaatgtcaccgtcatcggaacacgaagtgtggcagactgtgatctcgcctgacctctcccaagtgaccttgtcaccggaactttcgcaaaccaatctttcaccggatctctcgcataccaccctgagcccggaactcatccagcgcaacctctcgcctgcacttggacaaatgccaatctcgccggatctgtcgcacactactctcagccccgatttgtcacatactactctgtcactcgacctgtcgcagactaatctttcgcctgaactcagccaaacgaatttgtccccggcactgggtcagatgccgctgtctccggacctcagccacaccactctgtcgctggacttctcacaaaccaacctctccccagaactcagccatatgacccttagccccgaactgagccagactaatctctcgccggccctgggacagatgccgatctccccagatctgagccataccaccctctcactggatttttctcaaaccaacttgtcacctgaactgtcccagacgaacttgtccccggcgctgggccaaatgccactgtccccggatccttcacacaccactttgtcactggatctctcccaaacgaacctgtctccggaactttcacagactaaccttagcccggacttgtcggaaatgccgctctttgccgacctctcccagatccctctgacccccgacctggatcagatgacgctgtcccctgacctcggtgaaaccgacctcagcccgaacttcggacaaatgagcttgtcgcctgatttgtcacaggttactctgagcccagatatttcggacacgacgctgctgccggacctgtcacaaatatcaccgcctccggacctggaccagattttctacccaagcgaatcgtcccagtcactgctcctccaagagtttaacgaatcgtttccctaccccgacctgggccagatgccgtccccgtcgtcaccgactctgaatgacacttttctgagcaaggagttcaaccctctggtgatcgtgggtctttctaaggacggaaccgactacatcgaaatcatcccgaaggaagaagtgcagtcatccgaggacgactatgccgagatcgattacgtgccatacgacgacccttacaagactgatgtgagaaccaatatcaactcctcacgggacccagacaacattgccgcttggtacctgaggtctaacaacggtaacagacgaaactattacattgccgcagaagagatcagctgggattactcggagttcgtgcaaagagagactgatatcgaagattccgacgatatcccagaggacacgacttacaagaaagtcgtgttccgcaagtacctggactccacctttactaagcgggatccgcgcggagaatatgaggagcaccttgggatcttggggccgattattcgcgcagaagtcgacgatgtcattcaggtgcgatttaagaatcttgcatcgcgcccttactcactgcatgcgcatggtctgagctacgaaaagagctccgagggaaagacttatgaggacgattcaccggagtggttcaaggaggacaatgccgtgcaacccaacagctcctatacctacgtgtggcacgcaactgaacggtctgggccagaatcgccgggatcggcatgtagagcctgggcctactactcagcagtgaatccagaaaaagatatccactccggcctgattgggccgctgctgatttgtcagaaaggaatcttgcacaaggactccaacatgccgatggacatgcgcgaatttgtgctgttgtttatgactttcgacgagaaaaagtcatggtactacgagaagaaatcccggtcctcctggcggctcacctcctcagagatgaagaagagccatgagttccatgccatcaacggaatgatttacagcctgccaggtctgaagatgtacgaacaagaatgggtgcggctgcacctgctgaatatcggcggatcccaggatatccatgttgtgcacttccacggacagaccctgctggaaaacggcaacaaacagcaccaactgggagtctggcctctgctccctggatccttcaagacccttgagatgaaggcctcgaagccgggatggtggcttcttaacactgaagtcggagagaaccaacgggccggaatgcagactcccttcctcatcatggacagagactgccgcatgccgatggggctgtccactggcatcatttcggattcacagatcaaagccagcgaattcctcgggtactgggaaccccgcttggcaagactgaataatggcggatcttacaacgcttggtcggtcgaaaagctggccgcggagttcgcaagcaagccgtggatccaggtcgatatgcagaaagaagtgattatcaccggaatccagactcagggggccaaacactacctgaaatcctgctacaccactgagttctacgtcgcgtacagctcgaatcagattaactggcagatcttcaagggcaacagcactaggaacgtcatgtacttcaatggaaattcggacgcatccactatcaaggagaatcagttcgacccacccatcgtggctcgctacatccgcatctcgcctacccgcgcttacaaccgcccaactctgaggttggagctgcaggggtgcgaagtgaacggatgtagcaccccgctgggaatggagaacggcaagatcgagaataagcaaatcaccgcctcatcgttcaagaaatcgtggtggggggattactgggaaccattcagagctcggctgaacgcccagggccgcgtgaatgcttggcaggccaaagctaataacaataagcagtggctcgagatcgaccttttgaaaatcaagaagatcaccgcgatcatcacccaagggtgcaagtcgctgtcctcggaaatgtacgtgaagtcctacactatccactactctgagcagggagtcgaatggaagccttatcggcttaagtcctcgatggtcgacaagatctttgaaggaaatactaacacgaagggccacgtgaaaaacttcttcaatccgccgatcatcagccgcttcatacgcgtgattccaaagacttggaaccaatccattgcgttgaggctcgaactgttcggatgcgatatctac

SEQ ID NO: 2267 - DNA, 6672 bp, Artificial Sequence
  derived and/or modified sequence
atgtttcctggctgcccaaggctctgggtgcttgtggttctggggacgagctgggtgggttggggttcgcaaggcaccgaagcagcacagctgagacagttctacgtcgcagcacaaggaatctcgtggtcgtaccgcccagaaccgactaattcgtcgctcaacctctcggtgaccagctttaagaaaattgtctaccgagaatatgaaccgtacttcaagaaggaaaagccacagtccactatcagcgggctccttggacctaccctctatgccgaggtcggtgacattatcaaagtccactttaagaataaggcggataaacctctgtcgattcacccacaaggtatccggtactcaaagctgagcgaaggtgcctcataccttgaccacaccttccctgctgagaagatggatgatgccgtggcccctggtagggaatacacctacgaatggtcgatctccgaagattccggcccgactcatgatgatccaccctgcttgactcacatttactactcgcatgaaaacctgatcgaggacttcaactcaggactgattggccctcttctgatttgcaagaagggtactctcaccgagggtggtactcagaaaactttcgataaacaaatcgtcctgcttttcgccgtgttcgatgaatccaagtcctggtcgcaatcttcttcgctgatgtacaccgtcaacggctacgtgaatggaaccatgccggatattactgtttgcgcacacgatcacatttcatggcatctgcttggaatgagctccggtccggaactgttttccatccatttcaacggccaggtgttggaacaaaaccaccataaggtgtccgcaattactctggtgtcggcaacctcaaccaccgccaatatgactgtgggacccgagggcaaatggatcataagcagcctgactcccaagcatctccaagctggaatgcaggcctacattgacataaagaactgtcccaagaaaactagaaacctcaagaagattaccagagaacaaagacgccatatgaagcggtgggagtactttatcgccgcagaagaggtgatctgggactatgcaccagtgatccctgctaacatggacaaaaagtacaggagccaacatctcgacaacttctccaatcaaattggcaagcactacaagaaagttatgtacacgcagtatgaagatgagtcctttaccaagcacaccgtgaaccccaatatgaaagaagatggaatcttggggcctattatccgagcgcaggtgagggataccttgaagattgtctttaagaacatggcttcaaggccctactcaatatacccacatggagttaccttctccccgtatgaggatgaagttaattcctcgtttactagcggacgtaacaataccatgattcgtgcagtgcagcctggtgaaacctacacctataagtggaatattcttgaatttgatgaaccaactgaaaatgatgctcaatgccttaccagaccgtactactcggatgtggacattatgcgagacattgctagcgggcttatcgggcttctgcttatttgtaagagccgatccttggatagaaggggtattcaacgcgctgccgatatcgagcagcaagcagtgtttgcagtctttgatgaaaacaagtcctggtatctggaggacaacatcaataagttctgcgaaaatcctgatgaagtgaagcgtgacgaccccaagttttacgagtcaaacattatgtcgacgattaacggatacgtgccagaatcgattaccacccttggcttttgttttgacgataccgtgcaatggcatttttgctcggtcggaacgcagaacgaaattctcaccatccattttactggccattcctttatctacggtaaaagacatgaggacactctgacgctgtttccaatgcgcggagaatctgtgaccgtgactatggataatgtgggaacgtggatgcttacctccatgaactcgtcacctaggtccaagaaactgcgcttgaagttcagagacgtcaagtgtattcctgatgatgatgaggattcttacgagatttttgaacccccggaaagcactgtcatggccaccagaaagatgcacgacagactcgagccagaggatgaagagtcggatgcggactacgactaccagaaccggcttgcagcagcgctggggatccgctccttccgaaattcatccctcaaccaggaggaagaagagttcaatctgaccgcactggcacttgaaaatggaaccgagtttgtcagctcgaacaccgatatcatagtgggatcgaattactcgtctccctccaacattagcaagtttaccgtgaacaatctggcagaaccccaaaaggcaccatcccatcagcaggcaacgacggccgggagccctttgagacacctgatcggcaaaaacagcgtgcttaactcctcgaccgcggagcatagctcgccatatagcgaagatcctatcgaggatcctctgcagccagatgtgacgggaatcagattgctgtcattgggggcgggtgaattcaaaagccaggaacatgcaaagcacaagggacctaaggtggaacgagatcaggcagcaaagcatcggttctcgtggatgaagttgctggcccataaggttgggagacatctctcccaagatactgggtcaccatccggtatgcggccgtgggaagatctgccttcgcaagacaccggatccccctcacgaatgaggccttggaaggatccaccttcagaccttcttctgcttaagcaatcgaactcctcgaaaattcttgtcggtagatggcatctggcgtctgaaaagggatcgtacgaaatcattcaagacacggatgaagatactgcagtgaacaattggctgatttcgcctcaaaatgcatccagagcatggggggaaagcactcctctggcaaacaagccagggaagcagagcggtcatcccaagtttccccgcgttcgtcataagtcacttcaagtccgccaagatggaggaaaatccagacttaagaaatcccagttcctgatcaaaacgcgcaagaagaaaaaagaaaagcacactcatcatgcacccctgtcccctaggacttttcatcctcttcggtccgaagcctacaacacgttcagcgagcgcagactcaaacacagccttgtgctgcacaaaagcaacgaaacctctctgccgactgatctgaaccaaactctgccatcgatggacttcggatggattgcctcgcttccggatcataatcagaactcgagcaacgacaccggtcaagcatcctgtccccctggactctaccaaaccgtccctcccgaagagcattaccaaacgtttcctattcaagaccccgaccagatgcatagcacttccgacccatcacatcgctcttcgtcccctgaactctccgaaatgctcgaatacgatcgaagccacaagtccttccctacggatatatcccagatgtcgccttcatcagagcacgaagtctggcagaccgtgatttcccctgatttgtcacaggtgacgctctccccagaattgtcgcagaccaacctcagcccagatctctcccatactaccctctctcctgaattgatacaaagaaatctttcgcctgcacttggacaaatgcctatttcgcctgatcttagccataccacgctcagccctgacctgtcccacaccacgctgagcctcgatctgtcgcaaactaatctttcgccagaactctcgcagactaatctgtcgccagcactggggcagatgccactgtctcccgatctgtcccataccacccttagcctggatttttctcagactaacttgtcgcccgaactttcccacatgactctttccccagagcttagccagaccaacttgtcccctgcactgggtcagatgcccatcagcccagacctctcacacaccactctgtcgcttgacttctcacagaccaatctttcaccggagctgagccaaaccaacctgtcccccgcccttggtcagatgccactctcacctgacccctcacatactactctgagcctggacttgtcacaaacgaacctttcccccgagttgagccaaacgaacctcagccctgatctctccgagatgcccctttttgcagacctgtcgcaaattccgctcacccctgatctcgaccaaatgactctgtccccagatctcggtgaaactgatctgtccccgaattttggacagatgagcctttcgcctgacctctcgcaagtcactctttcacctgacattagcgatactacgctccttcctgatctgtcgcagatctcgcctcctccggacctggaccagatcttttatccttcggagtcatcacaatcccttcttctgcaagagtttaacgagagctttccatacccggaccttggtcaaatgccctcgccatcctcaccaactcttaatgacacttttctgtccaaggagttcaacccccttgtgatcgtcgggcttagcaaagacggtacggattacatagaaatcattccaaaggaggaagtccagtcgtcggaagatgactacgcagagattgattacgtcccttatgatgacccctacaaaactgatgtgagaaccaatatcaacagctcccgggatcctgataacattgcggcatggtacctcagatcaaacaatggaaatcgtcggaactattacattgccgccgaagaaatatcatgggactactcagagtttgtgcaacgcgaaaccgatatcgaagattcagatgacatcccagaagatactacctacaaaaaagttgtctttagaaaatacctcgattcaacttttactaaacgcgacccccgaggtgaatacgaggaacatctgggcattcttgggccaatcatacgcgcagaggtggatgatgtgatccaagtccgctttaagaatcttgcaagccgtccatacagcttgcatgctcatggcttgtcatacgaaaaatcgagcgaaggaaagacttatgaagatgactcgccggaatggtttaaagaggataacgcagttcagcctaattcctcgtacacttatgtctggcacgccacggagcgctcgggacccgagtcacctggatccgcatgtcgtgcatgggcatactactccgccgtgaacccggagaaggatatacactcagggctgattggaccgctgctcatttgtcagaagggcatactgcacaaagattcgaacatgccaatggatatgcgggaatttgtgctgttgtttatgacttttgatgagaagaagtcatggtattacgaaaagaagtcacgctcgtcctggcgacttacttcctccgagatgaagaagtcacatgaattccatgctataaacggaatgatctattcactgcctggcctcaagatgtacgaacaggaatgggtccggttgcatctcctgaacattggaggaagccaagatatacacgtggtgcatttccacggtcaaaccctgcttgaaaacggcaacaagcagcatcaacttggtgtgtggcctcttctgcccgggtcgttcaagactcttgagatgaaggcgtcaaagccaggatggtggctgcttaacaccgaagtgggagaaaaccaaagagcaggcatgcagaccccttttcttatcatggatagagactgtaggatgccaatgggtctttccaccggaattatctccgactctcagattaaggcatccgagtttcttgggtactgggaaccgaggcttgcccggcttaacaacggtggatcgtacaacgcgtggtccgtggagaaactggcagcagaatttgcctcaaaaccttggatacaagtggacatgcaaaaagaagtgattatcactggtattcaaacccaaggcgcaaagcactatctcaagtcgtgttacacgactgaattctacgtggcctatagctcgaatcaaatcaactggcagattttcaagggcaactcgactcggaatgtgatgtactttaatggaaattcagatgcgtcgacgatcaaggagaaccagttcgatccacccatcgtcgctcgctacattaggatcagcccgactagagcgtacaaccgcccgacccttcgacttgaactccaaggttgtgaagtgaacggttgttctaccccactgggaatggaaaacggcaagattgagaataagcagattaccgcctcgtcgtttaagaaatcctggtggggcgattactgggaaccattccgggcacgtctcaatgcgcagggacgggtgaacgcttggcaggctaaggcaaacaataacaaacaatggcttgagattgacctgcttaagatcaaaaagattaccgcgatcattacccaaggatgcaaaagcctgtcatctgaaatgtacgtgaagtcgtacacgatacattactccgagcagggcgtcgaatggaagccataccgtctcaagtcctcaatggtcgacaagattttcgaaggaaacacgaataccaaaggacatgtcaaaaactttttcaatccaccaatcattagccgctttatacgcgtgattcctaagacctggaatcaatcaattgccttgaggctcgagctgtttggctgtgacatttac

SEQ ID NO: 2268 - DNA, 6672 bp, Artificial Sequence
  derived and/or modified sequence
atgttcccaggatgtccccgcctttgggttttagtggtgctagggacaagttgggttggatggggatcccagggaactgaagctgcacaacttcgtcagttttacgtggctgcccaggggatctcttggtcttataggcccgaaccaactaattcatcccttaatctgtcagtgacttcctttaagaaaatcgtatatagggaatatgaaccttattttaagaaagaaaaaccacagtctactatctccggattactcgggccaacattgtatgccgaggtgggagatataatcaaagtccatttcaaaaacaaagccgacaaacctctctcaatccatccacagggaatccggtatagtaagctttctgaaggggctagttaccttgaccacacattcccagctgaaaagatggacgatgcagtggcccccggacgagaatacacttacgaatggtctatctccgaagattccggacctactcacgatgatccaccctgcttaacacacatttattacagtcatgagaacctgattgaagattttaactcagggcttattggacccctcttgatatgtaaaaaggggacattaactgaaggggggactcagaaaacattcgataaacaaatagtgctgctgttcgccgtttttgatgaatctaaatcatggtctcagagttcctcattgatgtatactgtcaacggatatgtgaacgggactatgcccgacattacagtgtgtgctcatgatcacatttcctggcacctgctaggaatgtctagtggacctgaactgttcagtatacatttcaacggacaggtcctggaacagaatcatcataaggtatctgcaatcactctggtgtctgccacaagtactacagcgaacatgactgtgggaccagaaggaaaatggatcatctcctctctcacacccaaacatctgcaagcagggatgcaggcctatatcgatatcaagaactgtcccaagaagacaagaaatttgaagaaaatcactagggaacagcgtaggcatatgaagcggtgggagtactttatcgcggctgaggaggtgatctgggattacgctcccgttattcccgccaatatggataagaaatatcggtctcagcatctagataatttttctaaccaaataggaaaacattataaaaaagtcatgtatacacaatatgaagatgaatcatttacaaagcacactgtgaatcccaatatgaaagaagatgggatactcgggccaatcattagggcacaggtacgggatactctaaaaattgtgtttaaaaatatggcatctcggccctatagtatctaccctcatggggtaacattcagtccatatgaggatgaggtgaatagttctttcacaagtggacggaacaacacaatgatacgcgcggtccagcctggggaaacttatacttacaaatggaacatcctcgaatttgatgaaccaactgagaacgatgcgcagtgccttacaagaccttattattccgatgtggatataatgcgggatattgcttctgggcttatagggcttctcctgatttgtaaatcacgctcactcgatcgacgggggatccaaagagccgccgacatcgaacagcaggccgttttcgcagtcttcgatgaaaataaatcttggtatctggaagataacattaataagttctgtgaaaaccctgatgaagtaaaacgggatgatccgaaattttatgaatccaatatcatgagtacaataaatgggtacgtgcctgaatccataacaacattgggattctgcttcgatgatacagtacagtggcacttctgttctgttgggactcagaacgaaatcctcactatacacttcacagggcatagtttcatatatgggaaaaggcacgaggacactctgactctattccctatgcggggggaatcagttacagtcactatggacaacgtgggaacttggatgctgacatccatgaattcttctcccagatccaaaaaacttaggttaaaattccgagatgttaaatgtatacccgatgacgatgaggactcatatgagatctttgagccaccagagagtacagtgatggcaacaagaaaaatgcacgaccggcttgagcccgaagatgaagaaagtgatgcagactatgactatcagaatcgactggcagctgctctcgggattcggtccttcagaaacagtagtctgaatcaggaagaagaggagtttaatctcacagccttagctctcgaaaacgggacagaattcgtaagtagtaacacagatatcatcgtcggaagtaattatagttccccttccaacatctccaagtttactgtaaataaccttgctgaaccacagaaagctccaagtcaccagcaggctacgacagccgggagtccactcaggcacctcattgggaagaacagtgtgctgaattcttcaactgcggaacatagttccccctattccgaagatccaatcgaagatccccttcagcccgatgttactgggatacgactcctttctctcggggctggagaattcaaatcccaggaacacgccaagcacaaaggacctaaagtggaacgcgatcaggccgccaaacatcgcttttcttggatgaagctcctcgctcataaggtaggaaggcacctttcacaggacacagggtcaccctctgggatgaggccttgggaagatctccccagtcaggatactggaagtccttccagaatgcggccctggaaggatccccccagtgatctcctactcctgaagcaatcaaattcatctaaaatactagtcgggagatggcatttagcctcagaaaaagggtcctacgaaataatccaggatacagatgaggatactgctgtgaataactggcttatctctccccagaatgccagtcgggcgtggggggaatccactccactggccaacaaaccaggaaaacagtccggacatcccaaattcccgagggtgaggcataaatctttgcaggtccggcaggatggggggaaatcccggttgaaaaaaagtcagtttctaataaaaacacgaaaaaagaagaaagaaaaacacacacatcacgctccactctcccccagaacttttcatcctttacggtctgaagcgtataacacattctccgagagaaggctcaaacacagtctcgttcttcacaagtcaaatgaaacatcccttcctacagatttaaatcagacacttccttctatggatttcgggtggattgcatccctccctgaccataatcagaactcatctaacgatactgggcaggcctcatgccccccaggactctaccagactgtaccgcctgaggagcattaccagactttccccatacaggatccagaccagatgcattctacatccgacccatcccaccggtcatcgtcccctgaactctcggaaatgcttgaatatgatcgcagtcacaaatctttccccacagatatctcacagatgagtccatcctccgaacatgaagtgtggcagactgtcatctctcccgacctcagtcaggtgacgttgagtcccgaattatctcagacaaacctctccccagatctctcccatacaacactgtctcccgaactgatccagagaaacttgtccccagccctcgggcagatgcctatatccccagacctttcgcacactacactgtctcccgatctgtctcatacaacactctcactggatctctcacagacaaacctctcacctgagttgagtcagactaatctctcccctgctctcggacagatgccactgagtcccgatctctcccatacaacactttctctggacttttctcagacaaatctatctcccgagctgtcacatatgactctgagtcccgaattatctcagactaacctgtctccagcgctggggcagatgcctatatcgcctgatctttctcatactactctatctcttgatttttcccagacaaacctatctccagaactctctcagactaatctctctcccgcgctgggacagatgcccctctctcccgacccttcccatacaacactttccctcgacttatcccagacaaatttgagtcctgaactgagtcagacgaacctctcaccagatctttctgaaatgcctctgttcgcagatctttcacagattcctctgactccagatctggatcaaatgacactgtcacctgatcttggagagacagacctgtctcctaatttcgggcagatgtctttatccccagatctttcccaggtaacactctctcccgatatttccgatactacactgcttccagatctatctcagatctcccccccacccgatttggaccagatcttttatccctcagaatcgagtcagtctctactgctgcaggaattcaacgagagttttccctatcctgatctcggacagatgccttctccctcctcccccacacttaatgatacatttctgtcaaaggaattcaatccactcgtcatcgtggggctatcgaaggatggaacagattatatcgaaataataccaaaggaagaagttcagtcctcagaagatgattacgcagagatagattatgtgccatatgatgatccctacaaaacagatgtcagaacaaatatcaactcaagtcgcgatcccgataatatcgctgcttggtatctgaggtctaataacgggaataggcggaactattatattgccgcagaagaaatatcctgggattattcagaatttgttcagagggagacagatatcgaggattccgacgatatacccgaagacacaacatataaaaaagtggtattcagaaagtacctcgatagtactttcacaaaaagggatcctcgaggagaatatgaagaacatctcggaatcctagggcccattatcagagccgaggttgatgatgttatacaggtgagattcaaaaaccttgcaagtcggccatattctctccacgcccacgggctcagttatgaaaagtcaagtgaaggaaaaacatatgaagatgattccccagaatggttcaaagaggacaacgccgtacagcctaattcatcgtatacgtatgtatggcatgccactgagcgttccggacccgagtcccctggatccgcttgtagggcctgggcttattattcagccgtgaatcctgaaaaagatatacatagtgggctgatcgggcccctattaatctgccagaaagggatcctgcacaaggattccaatatgccaatggatatgcgcgagtttgtgttactcttcatgactttcgacgagaaaaaatcctggtattacgagaaaaagagtaggagttcttggagactgacttcatccgaaatgaagaaatctcacgagtttcacgccataaacggaatgatatattcattaccaggactgaagatgtatgagcaggaatgggtccggttacacctgctgaatataggaggatcacaggatatccatgtggtccactttcacgggcagacattactcgaaaacgggaacaagcagcaccagcttggagtgtggcctctcttacctggatcattcaaaactttagagatgaaagcctccaaaccagggtggtggcttctcaacacagaagtcggagaaaatcagcgggctggaatgcagactccttttctcatcatggatagagattgtcgaatgcctatgggattatcaacaggaattataagtgactcacagataaaagcttccgaatttttgggatattgggaaccccgcctggcaaggcttaataacggaggatcctataacgcctggtctgtcgaaaaactggcggccgaattcgcttctaaaccatggatacaggttgatatgcagaaagaagtcataatcactgggattcagacacaaggagcgaaacactacctcaaatcttgttatacaactgaattttatgttgcctatagttccaaccagattaattggcagatctttaaaggaaactcaactagaaacgtgatgtattttaacggaaactcagatgcctcaacaataaaggaaaaccagttcgatcccccaattgtagcacggtatatcaggatatctcctacacgggcttataatagacctactctgaggctggaacttcaaggatgcgaggtcaatggatgttctactccactagggatggaaaacgggaaaattgagaataagcagataactgctagttcattcaagaaatcttggtggggggattattgggaaccttttagagccagattgaatgctcagggaagagtgaatgcctggcaggctaaggcaaacaacaataaacagtggcttgaaatcgaccttctaaaaatcaaaaaaatcactgcgattatcactcagggatgcaaatccctttcttcagaaatgtacgttaaatcttatactattcattatagtgagcagggggtggaatggaaaccttacagactcaaatcttccatggtcgataaaatcttcgaggggaatactaacactaaagggcacgtgaaaaatttcttcaacccaccaattatttcccgattcatccgggtcatccctaagacttggaatcagtctatcgctctgcgactcgaactgtttgggtgtgatatatat

SEQ ID NO: 2269 - DNA, 6672 bp, Artificial Sequence
  derived and/or modified sequence
atgtttcccggttgcccccgactgtgggttctcgtcgtgctagggaccagctgggtcggatgggggagtcaaggaaccgaagcggcgcagctgaggcagttttacgttgccgcgcagggcatcagctggtcctatagaccagagcccactaattccagcctcaatttgtccgtgaccagctttaaaaaaattgtctaccgcgagtacgagccctacttcaagaaggagaagcctcagtccacaatctctggtctgctgggacctacgctgtacgctgaagtgggtgacatcatcaaggtgcacttcaaaaacaaagccgataagcctctgagcattcatccccaaggaatccggtacagtaaattaagcgaaggggcatcttatctggaccacaccttccctgcagagaagatggacgacgcagttgctccgggccgcgagtatacatacgaatggtccatttcagaagactctggccccacccatgatgacccaccttgtcttacccatatatactatagccatgaaaatctgatagaggatttcaattctggcctcattggccccctattgatctgtaagaaaggcacactaacagaggggggcacacagaagacctttgataaacagattgtcttactgttcgcggtgttcgacgaatccaagtcctggtcccagtctagtagcttaatgtacacagtcaatgggtatgtcaacggcacaatgcctgacatcacagtttgcgcccatgatcacatctcctggcatctcttaggcatgagtagtggcccagaactgtttagtattcatttcaacgggcaagtgttggaacagaatcaccataaggtgtcagccataaccctagtgagcgctacctccactaccgcaaacatgactgtcgggccggagggtaaatggatcatttcctcactgactcctaagcacctgcaagccggcatgcaggcatacattgacattaagaattgccctaaaaagacaaggaacttgaaaaaaattaccagggaacagcgccggcatatgaaaaggtgggaatactttatcgctgccgaagaggtgatctgggactacgcacctgtaatccctgctaatatggacaagaaatatagatctcagcatttggataatttcagtaatcagatcggtaagcattataaaaaagtgatgtacacacagtacgaagacgagtcatttacaaaacatactgtgaatcccaatatgaaggaggacggaattctcgggccaattatcagagcccaggtgagagacacactgaaaattgtgtttaagaacatggcttcacggccctattcaatctacccccacggggttactttctcaccctatgaagatgaggtcaatagttccttcacttcaggtcgcaacaacaccatgattagggccgtccagcctggggagacttacacttataagtggaacattttagagttcgacgagcccacagagaatgatgctcagtgccttaccagaccttattattcagatgtggacataatgcgcgacatagctagtggccttattggattgctcctgatctgcaagagccggagcctggatcgcagaggcatacagcgggcagcagatatcgagcaacaggccgtcttcgccgtcttcgacgagaacaaaagctggtatttggaagacaacatcaataaattttgtgagaaccctgacgaggtcaagagggacgacccaaaattttacgaatctaatatcatgtccacgatcaacggttacgtgcccgagtccatcactactctgggattttgttttgatgatactgttcagtggcacttctgttctgttggcacacagaacgagatacttaccatccatttcacagggcattccttcatctatggtaaacgacatgaggatactctcaccctgttccccatgagaggagagagtgtgactgtgaccatggacaacgtggggacctggatgctgacaagtatgaactctagccctcgcagcaaaaagctcagattaaaattcagggacgtcaaatgcattccggatgacgacgaggattcctatgagatcttcgagcccccggagagcactgttatggctacaaggaaaatgcacgaccgcttagagccagaagacgaggaatcagacgccgactatgactaccaaaatcgcctcgccgcagccttgggaatacggtccttccgcaattcctctctgaaccaggaagaggaggagttcaatctcactgccctagctctggagaacggaactgagttcgtatccagtaatactgacattattgtcggttctaactactcctccccaagtaatatttcaaagttcaccgtgaataacctggccgaaccccaaaaggcccccagtcaccagcaagcgacgacggcagggagtcccctgcgccacctgatcggcaagaatagcgttctaaatagcagcacagccgagcactccagcccatacagtgaggaccccatcgaggatcccctccaacccgacgtgaccggtattaggctgctttcgctgggcgctggggagttcaagagtcaagagcacgcaaagcacaaaggtcccaaagtcgagcgcgatcaagccgccaagcatcgctttagctggatgaagctgctggcgcataaagtcgggagacatcttagccaggatacaggatcgcccagtgggatgcggccgtgggaggacctgcccagccaagatactggtagccccagccgaatgaggccctggaaggacccgccgtcggatctgttgctgctgaaacagtcaaactcaagtaaaattctagtggggcgatggcacctggctagcgaaaaaggatcctatgaaattatccaggataccgacgaggacactgcggtcaataactggcttatttcacctcagaatgctagccgggcctggggggaaagcacacccctggcaaacaaaccagggaagcagtccggccaccctaaatttccccgggtcaggcataagtctttgcaggtacgccaggatggtggtaagtcccggctgaaaaaatcacaattcctcattaaaaccagaaagaaaaaaaaagagaagcacacacaccacgcccctttgtctcctagaacatttcatcccctgcgctcagaagcctacaacacgtttagcgagagaagactcaagcattccctggttttacacaagtctaacgagaccagccttcccactgacctgaaccagactctgcctagcatggacttcggttggatagcctccctaccagaccataatcagaacagttcaaatgatacagggcaggcctcctgtccccccggcctgtatcagactgtccccccagaagaacactatcagaccttcccaatccaggatcccgatcagatgcactctacatctgatcccagtcatcggagtagcagtccagagctcagtgagatgctagaatacgatcgcagtcacaagagtttccccactgatatctcacagatgtctccatcaagcgagcacgaggtttggcaaacagtaatttccccggacttgagtcaggtgacgctgtcccctgagctgagccagaccaacctgtcccctgatctcagccatacaacactgtctcctgaactaattcagcgcaatctttctcccgccttgggccagatgccaattagccccgacctctcacatactactttgagccctgacttgagtcatacaactctttcactggacctctcacagactaacctgagcccagagctgtcccagacaaacctctcacccgccctcggccagatgcccctgtccccagatctgtcccacaccaccctgtccttggatttcagtcagaccaatctttcacctgagctaagtcacatgacactctcccccgaactgtcacagaccaatctctcacctgccctcggacagatgcctatctcaccagaccttagtcacactacgctgtcactggatttttctcagactaacctcagccctgaactctcgcagaccaatttatcgccggcgctcggacagatgcccttatcaccagacccatctcacacaactctgtcactcgatctcagccaaaccaacctgtcccctgaattgagccagacgaatctctctccagacctttctgagatgccacttttcgccgacctcagtcagatccctctgacacccgatctggaccagatgaccctcagccccgacctcggggaaacagatctttcccccaatttcgggcagatgtctctgagccctgatcttagccaggtaacactttctcctgacatcagtgatacaacactactccccgacctgagccaaatctccccgccacctgatctagatcagatattttaccctagtgagtcttcacaatcactgctactgcaggagtttaatgaatctttcccatatccagaccttggccagatgccatccccctcaagtcccacattaaatgataccttcctctctaaagagttcaaccctctggtcattgtaggcctctcgaaagacggaaccgactatatcgaaataattccaaaagaagaggtgcagagcagtgaggacgactatgccgagatagactacgtgccctacgatgatccctacaaaaccgacgtgcgaactaacatcaacagcagtcgcgaccccgataacatagctgcgtggtatctgcgatccaacaatgggaaccgaagaaactactatatcgccgcagaggagatcagttgggactatagtgagttcgtgcagcgcgagaccgacattgaggattcagatgatatccctgaggacacgacctataaaaaggtagtttttcgcaagtaccttgatagtactttcactaagcgggaccctcggggagaatacgaggagcacctgggcatcctgggtcccattataagggcggaagtggatgacgtgattcaagttcgcttcaagaatttggcctctcgcccctacagcctccacgctcacggtctgtcttacgaaaagagttctgaaggtaagacctatgaggacgacagtcccgagtggtttaaagaagacaacgcagtacagcccaatagttcctacacctacgtgtggcacgctacagaacgctccggccccgagtccccaggctcagcgtgcagagcgtgggcatattatagcgcagtgaatccggagaaagatatacacagtggtcttatcggcccactgttaatatgtcaaaagggaattctccacaaggatagcaacatgcctatggacatgagggaattcgtgctcctcttcatgacatttgacgaaaaaaagtcctggtattacgaaaagaaatcaaggtctagttggcgccttaccagtagcgagatgaagaaatcacatgagttccacgcgattaacggtatgatctatagtcttcctggcctcaaaatgtatgaacaggaatgggtgcgtctgcatctgctgaacatcggcggctcccaggatatccacgtggtgcactttcacggccaaacactgttagagaacggcaacaagcagcaccaactaggcgtatggcctctcctgcccggaagcttcaagacgctcgagatgaaagcttccaagcccggatggtggttactcaacaccgaagtgggggaaaaccaaagagcggggatgcaaacaccattcctaatcatggatagggactgcaggatgcccatgggcctgagtacaggcatcatttccgattcccagattaaggccagcgagtttctaggatattgggagcctagacttgcccgattgaacaatggtggatcgtataatgcttggagcgttgagaaactggccgcggagttcgccagcaagccctggattcaggttgatatgcaaaaagaggttatcatcaccggaatacagacccagggcgccaagcattacctgaaatcatgttacactacagaattttacgttgcctactcttccaatcagattaactggcagatttttaaaggcaactcaactcgaaatgtgatgtacttcaacgggaattcagacgcatctacaatcaaggagaatcagtttgaccctcctatcgtcgctagatatatccgcatctctccaacaagagcctacaatcggcccaccctgcggctggaacttcagggctgtgaggtgaacggctgctccaccccactaggtatggagaacgggaaaatcgaaaacaaacaaataacagcctcgtcttttaaaaagtcttggtggggggactactgggagcctttccgtgcgcgtttgaatgcccagggaagggtcaacgcttggcaggccaaagccaacaacaataaacagtggctggagatcgacctgttgaaaattaagaaaatcaccgccataatcacccaaggatgtaagtctctgagcagcgagatgtatgttaaatcatatacgatccattattctgaacaaggcgttgaatggaagccatataggctgaaatcaagcatggtcgataagatcttcgagggtaacacaaacactaaaggccatgtaaagaacttctttaatcccccgatcatcagccgattcattcgcgtgatccctaagacctggaaccagtctatcgccctacgcctggaactgttcgggtgcgacatctat

SEQ ID NO: 2270 - DNA, 6672 bp, Artificial Sequence
  derived and/or modified sequence
atgtttccggggtgtccgagactctgggtgcttgtggtgttgggaacgtcgtgggtggggtggggatcacaaggaaccgaagcggcacagctgcggcagttctacgtggccgcgcaggggatctcgtggagctacaggccggaaccaacgaactcgagcctgaatctgagcgtgacctcctttaagaagatcgtgtaccgcgaatacgaaccatactttaagaaagaaaagccccaaagcactatatccggactgctgggaccgaccctttacgccgaagtgggagatatcattaaggtccacttcaagaacaaagccgacaagccactgtccatccatcctcaggggattcgctattcgaagctgtcggagggtgcttcgtacctcgaccatactttcccggcggagaaaatggacgacgccgtggcccctgggcgggagtacacttacgaatggagcatctcagaggattcaggacctacccacgatgatccaccgtgcctgactcatatctactattcacatgagaacctgatcgaggacttcaactctggactgatcggccctctcctgatctgtaagaagggcacgctcactgagggaggaactcagaaaaccttcgacaagcaaatcgtcctgttgttcgcagtgtttgacgaatccaagtcctggtcccagagcagctcactgatgtacaccgtcaatgggtacgtgaatggaaccatgccagacataactgtatgcgcacatgaccatatctcgtggcaccttctgggcatgtcctcgggccctgaactcttttcaatccactttaacggtcaggtgctcgagcagaaccaccataaagtgtcagccatcaccttggtgtccgccacttcaaccaccgccaacatgaccgtcggccctgaaggaaaatggatcatttctagcctcaccccgaaacatctgcaggccggaatgcaagcgtacatcgacattaagaactgcccaaaaaagactcgcaatctgaaaaagattaccagagagcaaaggcggcatatgaagaggtgggagtactttatcgcagcggaggaagtgatctgggattacgcccctgtgatcccggctaacatggacaaaaagtaccgaagtcaacatctggacaatttctcaaatcagatcggaaaacactacaagaaggtgatgtacacccagtacgaagatgaatcattcacgaagcataccgtgaaccctaacatgaaagaagatggtattctcggtcccatcattagggcccaagtccgggacactctgaaaatcgtctttaagaacatggcctccagaccgtacagcatctacccgcatggagtgactttttcgccttatgaagatgaagtgaattcatcattcacctcgggccgcaataacaccatgatccgggctgttcagcccggggaaacttacacctacaagtggaatatccttgagttcgatgagccaactgaaaacgatgcgcagtgcctgacccggccgtactactcagacgtggacatcatgcgcgacatcgcctccgggctgatcgggctgctgctgatctgcaaaagccggtcactcgatcgcagagggatccagcgcgcggccgacatcgagcaacaggccgtgttcgcagttttcgatgagaacaagtcctggtacctcgaggacaatatcaacaagttttgtgaaaacccagacgaagtgaaaagggatgacccgaaattctacgaaagcaacattatgtcgaccataaacggttacgtgccggaatcaatcaccactctcggattctgcttcgacgatacggtccaatggcatttctgcagcgtgggaactcagaacgagatcctgactatccatttcacgggtcactctttcatctacggaaagcggcacgaagataccctcaccctcttcccgatgcgcggggagagtgtgaccgtgaccatggacaatgtgggaacctggatgctgacctccatgaattctagccctcgctcgaagaaactccggctcaagtttagagacgtgaaatgcattccggacgacgatgaggattcgtatgagatcttcgaaccgccggaatcgaccgtgatggcgaccagaaagatgcacgacagactggagcccgaggatgaagaaagcgacgccgactacgattaccaaaaccgcttggcagcagccctgggaattcggtcattccggaactcgtcgctcaatcaagaggaggaggagtttaacctcactgccctcgcgctggaaaatggaactgagttcgtctcttcgaacacggacatcatcgtgggctcgaactacagctccccaagcaacatcagcaagttcaccgtgaataacctggccgaaccgcaaaaggcaccgagccaccagcaagctaccaccgctggatccccgctgcgccaccttatcggaaagaattccgttctcaactcgtcgacggcggagcacagctctccatactccgaggacccaatcgaagatccgctgcagcctgatgtcactgggatccggctgctgtcactgggtgcgggagagttcaaatcccaggaacacgccaagcataaaggcccgaaggtggagcgcgaccaggctgctaagcaccgcttcagctggatgaagctgcttgcccataaggtgggccgacatctctcacaagacaccggctcgcccagcggcatgcggccgtgggaggacctgccatctcaagatactggctccccgagcagaatgaggccgtggaaggacccgccatccgatcttctgctgctgaagcagtctaactcctcgaagatcctcgtcggacgatggcacctggcttccgagaaagggagctacgagattatccaggataccgatgaagatactgccgtcaataactggctcatctcaccgcaaaatgcgtcgcgcgcgtggggcgaatcgactccactggcaaacaagccgggcaaacagtcaggccaccctaagttcccgcgagtgcgccacaaatcccttcaggtccgccaagacggaggaaagtcacggcttaagaagtcgcaattcttgataaagactaggaagaaaaagaaggaaaagcatactcatcacgcaccactgtcgccccggactttccacccgctccgtagtgaagcgtataacaccttcagcgaacggcgtctgaagcactcgctggtgttgcacaagtccaacgaaactagccttccgactgatctcaaccagaccctcccctccatggactttggatggatcgcgtccttgccggaccacaatcaaaactcgtccaatgacacgggccaggcatcttgcccgccaggcctctaccagaccgtgccgccagaggagcactaccagactttcccgatccaggacccagaccaaatgcatagcacttcggacccgtcgcacagatcctcgagccccgaactgtctgagatgttggaatacgaccggtcacacaagagcttcccgacggacatttcgcagatgtccccatcaagcgaacacgaggtgtggcagaccgttatcagtcctgatctgtcgcaggtgactctctcgccggaactgtcgcaaactaacctctcgcccgatttgtcacataccaccctgtctcccgagctgatccagagaaatctctccccggcgctgggtcaaatgccaatcagcccagatttgtcccacacgaccctttcgccggacctgtcacacacgacgctctcgcttgatcttagtcaaactaatctctcaccggaactgagtcagaccaatctctcgccagctctcggtcagatgcctctgtccccagatctctcgcacactaccctgtcgctggatttctcacagaccaatctgtcaccggagctgtcccacatgaccctgtcgcccgagttgtcacagactaacctgtccccggctctgggacagatgccgatttcaccggatctgtcgcatactaccttgtcgctcgacttttcgcagaccaacttgtcccctgagctgtcgcaaacgaatctgtctcccgcgcttggtcaaatgccgttgtccccagacccatcgcacactactctgtcgctggacctgtcccagacgaacctctcaccagagctctcccaaactaacctttcgcctgacctcagcgaaatgcctctgttcgctgaccttagtcaaatcccgcttactccggacctcgaccagatgacgctctcgcccgacctcggggaaactgacctcagccctaacttcggccagatgtctctgtcccccgacctttcgcaagtaaccctgtcccctgatatatctgacactacccttctccctgacttgagtcagatcagcccaccaccggacctggaccaaatcttttacccgagtgaatcctcgcagagcttgctgctgcaggagttcaacgaatccttcccgtaccctgatctgggccaaatgccatcgcccagctcaccgaccttgaatgataccttcctttccaaggaattcaatcccctggtgatcgtgggattgtccaaggacggaactgactacattgagatcattcccaaggaggaagtgcaatcctcggaggacgattacgctgaaatcgactacgtcccgtacgacgacccttacaaaaccgatgtgcgcactaacatcaattcatcccgggatcccgacaacatcgccgcttggtatctgaggtccaataatggaaatcgcagaaactactacatcgccgcggaagaaatcagctgggactactcggaatttgtgcaaagagaaactgatatcgaggactcggacgacatcccagaggatactacttataagaaagtggtgttcagaaagtacctggactccaccttcactaagagagatcctcgcggcgaatacgaagagcatttgggcatcctcggaccgatcattcgcgcagaggtcgacgacgtgattcaggtgaggttcaagaacttggccagccgcccttactcactgcacgcccacggactcagctacgaaaagtcctcagagggcaaaacttacgaagatgactcaccagaatggttcaaggaagataatgccgtccagcctaactcttcatacacctacgtctggcacgcaaccgagcgctctggaccggaatcccctggctcggcatgcagggcatgggcctactatagcgctgtgaacccggaaaaagatatccactccggtctgatcggaccactgttgatttgccaaaagggcattctccataaggatagcaacatgccaatggacatgcgggaattcgtgctgctgttcatgacctttgatgaaaagaagtcatggtattacgagaagaagtccagatcgagctggagactgacttccagcgagatgaaaaagtcccacgagttccatgccatcaacggaatgatctacagcctccccggactcaagatgtacgagcaagaatgggtccgcttgcacttgttgaatatcggagggtcacaggatattcacgtggtccatttccacggacagaccctcctggaaaatgggaacaagcagcatcagttgggagtttggccgcttcttccggggagcttcaagaccctggagatgaaggcttcaaaaccaggatggtggctgctgaataccgaagttggcgaaaaccaacgggccggtatgcagactccgtttctgattatggaccgggattgtaggatgcctatgggactgtcaacgggtatcatctccgactcgcagatcaaggcttcggaattcctcggatactgggaaccgagactggccagacttaacaacggtggatcctacaacgcctggtcggtcgaaaaactggccgccgaatttgcatccaagccgtggatccaagtcgatatgcagaaggaagtaatcatcaccggaatccagacccagggcgcaaagcactacctgaagtcatgctacaccactgagttctacgtcgcatactcctcaaaccagatcaactggcagatctttaaaggaaactccacccgtaacgtcatgtacttcaacggaaactccgatgcttcgactatcaaggaaaatcagttcgacccaccaatcgtcgcccgctacatccggatcagcccgactcgcgcctacaacagacctaccctgcgccttgaactgcagggatgtgaggtcaatggatgctcaactccgctcggcatggagaacggtaagatcgagaacaaacagattactgcgagctccttcaaaaagagctggtggggtgactactgggagccttttagggcacgtttgaatgcgcagggacgcgtcaacgcgtggcaagccaaagcgaacaataacaaacaatggctggaaatagacctcttgaagatcaaaaagatcaccgcgatcatcactcagggctgcaagagcctctcctcagaaatgtatgtgaaatcgtataccatccactactcggaacagggagtggagtggaagccataccgcctgaagagctcgatggtggataagatcttcgaaggcaacaccaatactaagggacatgtgaaaaactttttcaatccgcccatcatatcccgattcattcgcgttatcccaaagacctggaatcaaagtatcgccctgcggctcgaacttttcggatgtgacatctac

SEQ ID NO: 2271 - DNA, 6672 bp, Artificial Sequence
  derived and/or modified sequence
atgttccctgggtgtcctagactgtgggtgctggttgtgctcggaacatcatgggtggggtggggatcccagggcaccgaagcagcacaacttagacagttctatgtcgccgcacaaggcatttcctggagctacaggcccgaacccacaaacagctcactcaacctgtctgtcaccagctttaaaaaaattgtataccgggaatacgagccatatttcaagaaggagaagccacaatccaccatcagcggcttgctgggaccaaccctatacgccgaagttggtgacattatcaaggtgcacttcaagaataaagccgacaagccgttgtcaatacatccccaaggaattcgctattcgaagttgagtgagggcgcttcatacttggaccatactttcccagcagaaaaaatggacgatgcagtggcacccgggagagaatacacttacgagtggagcatctctgaggattcaggaccaacacacgatgaccccccgtgcctgacacacatctattactcccacgaaaacctgatcgaggatttcaattccggtctaatcggcccgttgttaatttgtaaaaaaggtaccctcaccgaaggaggcacccagaaaaccttcgataaacagattgtactcctctttgcggtgttcgacgagtccaagtcatggagtcaatcatcttccctaatgtacacggtgaatggatatgtgaacggaactatgcccgacattacagtttgcgcacatgaccatatttcttggcacctcctgggtatgtcctcggggcccgagctgttttctatccattttaatggccaggtactggagcagaatcaccacaaagtgagtgctatcacactagttagtgctacctccaccactgcaaacatgacagttggtcctgaggggaagtggattatttccagtctcacccctaagcacctgcaggccgggatgcaggcctacattgacatcaaaaattgtcccaaaaaaacaagaaatctaaaaaaaataactcgcgaacaacggcgccatatgaaaaggtgggagtacttcatcgcggccgaagaagtgatctgggactatgccccagttatacctgccaatatggacaagaagtatcggtcccagcacctggataacttctcaaaccagattgggaagcactacaaaaaggttatgtatacccagtatgaggacgagagcttcactaaacataccgtgaatccaaacatgaaggaagatggaatcctgggtcctattatccgcgcccaagtccgggataccttgaagattgtttttaaaaacatggccagtcgaccgtacagtatctaccctcatggagtaacctttagcccctatgaggacgaagtcaattctagttttacctctggccgtaacaacacaatgatccgcgcggtgcagcctggagaaacatacacttacaagtggaatatcctggaattcgatgaacctaccgaaaatgatgcacagtgcctaacacgcccctattactccgatgtggacattatgcgcgatatagcttcggggctgattggcctcctcctaatttgcaagtcacgcagtcttgaccggagaggaatccagcgagcagccgacatcgaacaacaagcagtgtttgctgtctttgacgaaaataagtcatggtacttggaagacaatatcaataagttttgtgaaaatcctgatgaggtgaagagggatgaccccaaattctatgagtctaatatcatgtcaacaattaacggatacgtgcctgaaagcataacaacactgggtttttgttttgatgacacagtgcagtggcacttttgtagtgttggaacgcagaatgagatcctgactatacatttcacggggcattcctttatctacggcaagcggcacgaagataccctgacactgtttccgatgcgcggagaaagcgttaccgttactatggataacgtcgggacttggatgctgacgagcatgaactccagccctcgctctaagaagctgcgacttaagtttcgcgacgtgaaatgtatacccgatgacgatgaagactcttacgaaatctttgaaccaccagagagcacggtcatggccacaaggaagatgcacgacagactggagccggaagatgaagaatctgacgcagattacgactatcagaacagactggctgccgccctgggtattcggagctttagaaactcgtcactgaatcaggaggaagaagagtttaacctaacagccctggccttagaaaacggtactgagtttgtctccagcaatacagatatcatcgtgggctctaattactcttcccccagcaacatatcaaaattcaccgtcaacaatctggccgaaccccagaaagcaccgagtcaccagcaagctacaaccgctgggagtccccttcggcacttgattgggaaaaacagcgtgttgaactcctctactgccgaacactcttccccttactccgaggacccgatagaagatccccttcagcctgacgtgacaggtatccgtctactgtcattgggtgcaggggaattcaaatcgcaggaacacgcaaagcacaaggggcccaaggtggaaagggaccaggccgcaaagcatagattttcttggatgaagcttttggcccacaaagtgggaaggcacttgtcccaggatactggaagcccttctggaatgagaccctgggaggaccttccctcacaggataccggcagcccttcaaggatgaggccgtggaaggaccccccctctgatctcctcctcttaaagcaatccaattcctcaaaaatcctggtcggtaggtggcacctggcttctgagaagggctcttatgaaatcatccaagacacagacgaagacactgctgtaaataattggctgatatccccccaaaacgccagccgggcttggggagagagtacccccctggcgaacaagccaggcaagcagagtgggcatcctaagttccctcgcgtgcggcataaatctctccaggtgaggcaggatggcggcaagagccgccttaagaagtcccagttcctgattaaaaccaggaagaagaagaaagaaaagcatacacatcatgctccccttagccccaggacgttccacccgctcagaagcgaggcttacaacaccttcagtgagcgacgactgaagcatagcctggtgctgcataaatcgaacgagacctcattgcccacagacctgaaccagactctaccaagtatggactttggttggattgcctctctgcccgaccataatcagaactccagcaacgacacagggcaggctagctgcccccccggactataccaaaccgtgccgcctgaagagcactaccagacatttccaatccaggatccggatcagatgcactccaccagtgaccccagccatcgaagctcatcgcccgaattaagtgaaatgttagagtatgaccgcagccacaaatcttttcctaccgatatatctcaaatgtcacctagttctgagcacgaggtgtggcaaaccgtgatttccccagatttatcgcaggtgaccctgtctcctgagctctctcagaccaatctttcgcctgacctgtcacacaccaccctttctcctgagttgatccagcggaacctcagccccgcgctcggacagatgccgatttcaccggacctgtcacacactacgttatcgccggatctgtctcacacgacactgagcctggatttatctcagactaatctctcacccgagttgagccagaccaatttgagccctgcgctgggccaaatgcctctgagtccggatctaagtcatacaactttgtcgctggactttagtcaaaccaacttatcccccgagttgagccacatgacactgtctcccgagctgtcccagacaaatttgagtcccgcgttgggacagatgccaatatcccccgacctgtcccacacaactttatccctagatttttcccagactaatctctctcccgagctgtctcagacaaatttgagtcccgcactgggccaaatgccactctccccggatcccagccatacaaccctgagtcttgatctgtcgcaaacaaacttgtccccagaattatcccagaccaacctatcacccgacttatccgagatgcccctctttgcagaccttagccagattcctctgacgcccgatctcgaccagatgactctcagcccggacctgggtgaaacagatctctctcctaatttcgggcagatgtccctgtcgccagacctgtctcaggttactctctcaccagacatttccgacaccactctgttaccggacctgtcacagatctcaccccctccggatctagaccagatcttctatcccagcgaaagtagtcagagtctccttcttcaggagtttaatgagtcattcccataccctgacctcggacagatgccttctcccagttcccccacgcttaacgacactttcctgagcaaagaattcaatcccttggttatagtaggcctcagtaaagacggaactgactacatcgagatcatcccgaaggaagaggttcaaagctctgaggacgattatgccgagattgattatgtgccttatgatgacccctacaaaaccgacgtccgcacaaacattaacagcagtcgggaccccgacaatatcgccgcctggtatcttaggtccaacaacggaaaccgccggaactactacatcgcagcagaagaaatcagctgggactacagcgagtttgttcagcgtgagaccgacattgaggattccgacgacatccccgaagacactacttacaaaaaggtcgtcttcaggaaatatctggactcaacgttcaccaagagggaccctagaggcgagtacgaggagcacctaggcattctgggccctataatacgcgctgaagtggacgacgtaatacaagttagatttaaaaacttggccagccgaccttattctctgcacgcccacggtctctcctatgagaaatcttcagaggggaagacctacgaagatgatagtccagaatggtttaaggaagacaatgctgttcagccgaacagctcttatacatacgtttggcacgccaccgagcggtccggaccagagagccccgggtccgcctgtcgggcatgggcctattattctgcggtaaatccagagaaggatatacacagtggtttaattggaccactgctgatctgccagaagggaatcctgcataaagacagtaacatgcccatggatatgcgcgagtttgtcctgctgtttatgaccttcgacgagaagaagtcatggtattacgaaaaaaagtcacgctcaagttggagactcacaagttcagagatgaagaagagccatgaattccacgccattaatggaatgatttacagcctgcctgggttgaaaatgtacgagcaggaatgggtaagactccaccttttgaacattggcggatctcaggacatacacgtcgtgcactttcatggtcagactttgctcgaaaacggcaacaagcagcatcagcttggagtctggcccttgctgccaggcagcttcaagaccctggagatgaaggcaagtaagcctggctggtggcttctcaataccgaggtcggggaaaatcaaagagccggaatgcaaacacctttccttatcatggatcgggactgccgtatgccaatgggcctgtccacaggaatcatcagtgatagtcagatcaaggcttcagagttcctcggttattgggaacccagattggccaggcttaacaatggggggagttataatgcctggtccgtagagaaattagcagctgagttcgccagcaagccgtggatacaagtagacatgcagaaagaggttatcatcacaggcattcagacgcagggagcgaagcactatcttaagtcatgctatacaaccgagttctatgttgcttatagcagcaaccagattaactggcagatcttcaaggggaacagtacgagaaacgtaatgtactttaatggcaacagtgatgctagtaccattaaggagaaccagtttgacccaccgattgtcgcccgatacataagaatcagcccaacccgggcatacaaccggcctacgctaaggcttgagcttcagggatgtgaagtcaatggatgtagcacaccgctgggcatggaaaacggaaaaatagagaacaaacagatcacagcgagctctttcaagaagagctggtggggtgattattgggagcccttccgtgcccgactgaatgcccagggacgggtgaatgcttggcaggccaaggccaataataacaaacagtggctggagatagacctcctgaagatcaaaaagattaccgcgataataacgcaaggatgcaagtccctgtcctccgagatgtatgttaagtcatatacgatccactacagcgagcaaggcgtcgagtggaagccatatagacttaaatctagcatggtcgacaaaatattcgagggcaatacgaacacaaaaggccacgttaagaacttcttcaaccctccaattatttcacggtttattcgtgtgataccaaagacctggaaccaaagcatcgcactccggcttgaactgttcgggtgtgatatctac

SEQ ID NO: 2272 - DNA, 6672 bp, Artificial Sequence
  derived and/or modified sequence
atgtttccgggttgtcctagactgtgggtgctggtcgtgcttggcaccagctgggtgggttggggatctcagggcactgaggcagcccaactgcgccagttttacgtggctgcacaaggaatttcatggtcgtacagaccagaacccaccaactcaagcctcaacctgtcggtgaccagcttcaagaagatagtgtaccgcgaatacgagccttactttaagaaggaaaagccacaatctactatttcaggtcttttggggccgactctgtacgccgaggtgggagacatcattaaagtgcatttcaagaataaagcagataagccattgtccatccacccccaagggatacggtactcaaaactgtccgaaggtgcatcctacctggaccatacgttccctgccgaaaagatggatgacgcagtggcgccgggaagagagtacacttacgaatggtcaatctccgaggactcaggacctacccacgatgatcctccgtgtcttactcatatctactacagccacgaaaatcttattgaggactttaactcggggctcattggccctctccttatttgcaagaagggcaccttgaccgaaggagggacccagaaaacctttgataagcagatcgtgttgctctttgcagtgtttgatgaaagtaaaagctggtcacagtcctcatcccttatgtatactgtgaacggatacgttaatggtaccatgcctgatattaccgtctgtgcccatgatcatatctcatggcatctcctcggaatgtcgagcggcccagaactgttctccattcactttaacgggcaggtgctggaacagaaccatcataaagtgtccgctatcactctggtgtccgcaacctctaccaccgccaacatgaccgtcggtcctgaaggcaaatggatcatctcgtcactgacgccaaaacatctgcaagcaggaatgcaagcctacattgacatcaaaaactgtcccaagaaaactcggaacctcaaaaagatcactcgagaacaaagaaggcacatgaagcgttgggaatactttattgccgcagaagaggtcatctgggactacgcacctgtgattcccgccaatatggataagaaataccggagccagcatcttgataacttttccaaccaaattggaaagcactacaagaaagtgatgtacacccaatacgaagatgaaagttttactaagcataccgtgaatcccaacatgaaagaagatggtattctgggacccattatcagagcccaggtgagggacaccctcaagattgttttcaagaacatggcaagcagaccctattcgatctacccacatggtgtgacgttctcgccgtacgaggacgaggtcaactcctcatttacgtcaggacgcaacaacaccatgattcgagcagtgcagcctggtgaaacttacacctataagtggaacatccttgagtttgatgaacctaccgaaaacgatgcacagtgtctgacgcgtccctactactcggatgtggacataatgcgggatattgcatcagggctgataggacttctgcttatttgtaagtcccgctcacttgaccggcgcggtattcagagagcagcagatatcgaacagcaagccgtgtttgctgtgtttgacgaaaacaagagctggtacctcgaagataacattaacaagttttgtgaaaacccagatgaggtcaagagagacgacccgaagttttacgagtccaatatcatgtccacgattaacgggtatgtccccgaaagcattaccacccttggattttgttttgatgataccgtccaatggcacttttgttcggttggtactcaaaatgaaattctgactatccactttactggccacagcttcatttacgggaagcgccatgaggacacccttaccctctttccaatgcgcggagaatcggtcacggtgaccatggataacgtgggtacctggatgctcacttccatgaacagctcacctcggtctaagaaactgcgtttgaagtttcgggatgtcaaatgtatcccagatgatgatgaagattcgtacgagatcttcgaaccacctgaatcaacggtcatggcaactcgaaagatgcatgatagacttgaacctgaagatgaagagagcgatgcagattacgattaccaaaaccgtctggcagcagcccttggtattaggagctttaggaattcgtctctgaatcaagaagaggaagagtttaatctgactgccctggcgctggaaaacggaaccgaatttgtctcctcgaacacggacattattgttggctcgaactattcctcgccttcgaatatctccaagtttactgtgaacaacctcgcggaaccgcaaaaggcaccctcacaccaacaggcgaccactgcaggctcccctcttcgccacctgattggtaagaacagcgtgctcaattcgtcaactgccgaacattcgtccccatacagcgaagatcctattgaggaccctcttcagcctgacgtgaccggaataagactgctgtcactgggagcaggtgaattcaaaagccaggagcatgcgaagcataagggacctaaagtggaaagagatcaggcagcaaaacataggtttagctggatgaagctgttggcccacaaggtgggacgccatctgtcccaggataccggatctcctagcggaatgcggccgtgggaggaccttccctcacaagatactggcagcccatccagaatgcgaccatggaaggatccccccagcgaccttcttctcctgaagcaatcgaactcatccaagatcctggtgggcagatggcatctggcatcggaaaagggcagctacgaaatcatccaggataccgatgaggacactgctgtgaacaactggcttatctcccctcaaaacgcatcccgcgcatggggtgagtctaccccattggcaaacaagcctggcaagcagagcgggcacccaaaattcccacgcgttcgtcacaaatctctgcaggtccgacaagatggaggaaaatcgcgactcaagaaatcccagttcctgattaagactcggaagaagaaaaaggagaagcatactcaccatgctcccctttcccctcgcaccttccatcctctgcggtcggaagcctacaataccttctccgaaagacgtcttaaacactccttggtcctgcacaagtctaacgaaaccagcctcccaaccgaccttaatcaaactctgccatccatggactttggatggattgcaagcctgccagatcacaaccaaaactcttccaacgatactgggcaagcgagctgccctccaggattgtaccaaacggtgccgccagaagagcactaccaaacctttccaattcaggatccagatcagatgcattcgacctcggacccatcgcatagatcgagctctccagaactcagcgagatgcttgagtacgatcggtcccacaaatcatttccaactgatatcagccaaatgtcaccatcatcagaacatgaagtgtggcaaaccgtgatctcccctgacctttcgcaagtgaccctgtcccccgaattgagtcaaactaatctgtcaccagatctctcgcatactactctgagccccgaattgattcaaaggaatctctcgcccgcgttgggacagatgccaatatcccctgacttgtcacacactaccctttctccagatctcagccatacgaccctctccctggatcttagtcagactaacctttcgccggagctgagccagacgaatttgtcgccagccctcggtcaaatgccactgagcccagacctgtcgcacaccacgctttccctggatttttcacaaactaatctcagccctgagctgtcgcacatgactcttagcccagaattgtcacagactaacctcagcccagcactgggacaaatgccgatttcgccagatctctcccatacgactctgagcctggacttttcccagaccaaccttagcccagagctgagccaaactaacctttccccagccctgggtcaaatgcccctctccccagatcctagccacaccaccctgtcgcttgacctctcgcagacgaacctgtcacctgaactttcccaaaccaacctctcaccagacctgtccgagatgcccttgtttgctgatctgtcacaaatccctctgactcctgaccttgaccaaatgacgctgtccccagatctcggtgaaaccgatctttcgcctaactttggtcaaatgtcattgtcaccggacctttcccaagtcactctctcccctgatatctcagataccacccttcttcccgaccttagccaaatctctcctccaccggaccttgatcagatcttttacccatccgaatcatcccaatcgctcctgctgcaagaattcaacgaatcattcccctaccctgatcttggacagatgccttcaccctcctcccccactcttaacgataccttcctcagcaaagagtttaaccccctggtgatagtcggtcttagcaaagatgggaccgactacattgaaatcatacctaaagaggaagtgcagtcctccgaggatgactatgcagaaatagactacgtgccctacgacgacccttacaaaacggatgtgagaaccaacattaacagctcaagagatcctgacaatattgctgcatggtacctgcggtcaaacaatggaaatcgccgtaactactacatcgccgcagaagaaatttcgtgggactacagcgaatttgtccagagagagacggatattgaagattcggatgacattcccgaggacaccacctacaagaaggtggtgttcaggaaataccttgattccactttcactaagagggatccaaggggtgagtacgaagaacatctgggtatcctcggaccaatcataagagctgaggtggatgatgtgattcaggtgcgctttaagaatcttgcgtccagaccttactcactgcacgcccacgggctgtcatatgaaaagtcatcggagggaaaaacgtatgaggacgatagccctgagtggttcaaagaggataatgccgtgcagccaaactcgtcctacacttatgtatggcatgctacggagcggtccggacctgagtcgccaggatccgcatgcagggcatgggcctactacagcgcggtgaaccctgagaaggatatccattcgggcctgattggccccctgcttatttgccagaaaggcattctccataaggattccaacatgcctatggatatgcgcgagttcgtccttctgtttatgactttcgacgagaagaaatcatggtattacgagaaaaagtcacgatcctcctggagattgacgtcgtccgagatgaagaaaagccacgaatttcatgccattaatggtatgatctattcccttccggggctgaagatgtacgaacaagagtgggttcgccttcacctcctgaacatcggtggctcacaggatatccacgtggtgcattttcatggtcaaaccctcctcgaaaacggtaacaaacaacatcagcttggagtttggcccttgctgccgggttcattcaaaactctcgagatgaaggcatcaaagccaggttggtggcttctcaacacggaagtgggagaaaaccaacgggcaggtatgcaaaccccatttcttatcatggacagggattgtcgcatgcctatgggtttgtcgactggaatcatatcagactcacaaatcaaagcatcagagtttctcggttattgggaacccagactggcacgtctgaacaatgggggttcttacaacgcatggtcggtggaaaaacttgcggcagagtttgcgtcgaaaccttggattcaggtggatatgcaaaaggaagtgatcattaccggcattcaaactcagggagcaaagcactacctcaaatcgtgctacactactgaattctacgtggcctattcatccaatcagattaactggcagatctttaaggggaactcaaccagaaacgtgatgtacttcaatggtaattcagacgcatcaactataaaggagaatcagtttgaccctccaatcgtggcgagatacatccgtatcagccccactcgggcatacaaccggcccactctgagactggaactccagggatgtgaagtgaacggatgctcgacccctcttggaatggaaaatggtaagatagagaacaaacaaattaccgcaagttcctttaagaagtcttggtggggagattactgggagcccttcagagcaaggcttaatgcacaaggaagggtgaatgcatggcaggccaaagctaataacaacaagcaatggttggaaattgatcttctgaagattaagaagattaccgcgatcataactcaagggtgtaaatctcttagctcggaaatgtacgtgaagtcatacactatacattactccgaacaaggggtcgaatggaaaccttaccggcttaagtcatccatggtggacaagatttttgaaggtaacactaatactaaaggtcatgtcaagaacttcttcaacccacctatcatctcacgctttatacgggtcatcccgaaaacctggaaccagtccattgcactcagactggaactgtttgggtgtgacatatat

SEQ ID NO: 2273 - DNA, 6672 bp, Artificial Sequence
  derived and/or modified sequence
atgtttccaggctgcccccggctgtgggtactggtggttttaggcacaagttgggtaggttgggggtctcaaggcactgaggcagcccagctaaggcagttctacgtcgcagcacaggggatctcttggagctaccgccctgaacccacaaactcatccctgaacctgtccgttacaagttttaaaaagatcgtgtatagagagtatgagccttactttaaaaaggaaaaaccccagagtactatcagtggcctgttggggcctaccctctacgctgaagtgggagatattattaaggtgcatttcaaaaataaagcagacaagcctctctcaattcatccccaaggcattagatacagcaaattaagcgagggggcctcttatctagatcatacattcccagccgagaaaatggatgacgccgtagcgcccggacgtgaatacacttacgagtggagtattagtgaggactctggccccacgcacgatgaccccccttgtctcactcacatctattattctcacgagaatttgattgaagactttaactccggcctgatcggaccactccttatctgtaaaaaggggaccctgacagaaggagggacgcaaaagacattcgataaacaaatagtgctcctgtttgctgtgttcgatgagtccaagtcctggtcacagtcctcttcgctgatgtataccgtcaatggttatgtcaatggaacaatgcccgatatcacagtgtgtgcacacgatcacatttcatggcacttgcttgggatgtcttccgggcccgagttgttctcgatccacttcaacgggcaagtcctcgagcagaaccatcacaaggtgtccgccattacattagtatcggctacctctacaaccgctaacatgactgtgggccccgagggaaagtggatcataagttctttgacgccaaagcacctgcaagccggcatgcaggcctacattgacattaaaaactgcccaaagaagacccgcaaccttaaaaaaatcacacgcgaacagcgcagacatatgaagcgttgggaatatttcatcgcagccgaggaggtaatctgggactacgccccggtgattcctgcaaatatggataagaaatatcgaagccagcatctagacaacttttccaaccagattggcaagcactacaaaaaagtgatgtatacacagtacgaggatgagagtttcaccaaacatactgttaacccaaacatgaaggaggacggcattctcggtccaataattagagctcaggtcagagacacgctgaagatcgtctttaagaacatggcatctagaccttactccatatatcctcacggagtcacattcagtccctacgaagatgaggtcaattcgtcctttacaagcgggcgcaataacaccatgatcagggctgtgcaaccaggcgagacctatacgtataaatggaatattcttgaattcgacgagccaaccgagaacgatgcacaatgccttacgaggccctactactccgatgtcgacatcatgcgcgacatagcgagcggattaatcggactcctgctaatctgtaagagtagatcactggacagacgaggcatccaacgggccgcggacattgagcagcaggccgttttcgccgtgttcgacgaaaataagtcgtggtacctggaagataacatcaacaagttctgcgagaatcctgacgaggttaagagggacgaccccaaattctatgagagcaatatcatgtctacaataaatggctacgtgccagagtccatcactaccttgggtttttgtttcgacgacacagtgcagtggcatttctgctctgtgggcacacagaatgaaattctgactattcactttaccggccacagctttatctacggtaaacgtcacgaggacactctcacactcttcccgatgcgcggagaatccgtgaccgtcactatggataatgtagggacctggatgctgacgtcaatgaacagctccccccgcagtaagaaactccgcctgaagtttcgggacgtaaaatgcatcccagatgacgacgaagatagttatgagatctttgaacctcccgagtccactgtgatggccactaggaagatgcacgaccgcctggaacccgaggacgaggaaagtgacgccgattatgattaccagaatagactcgcggctgcgctcggcatccggtcctttaggaacagcagcctgaatcaggaggaagaggagtttaatctcacagcacttgctctcgaaaatgggaccgaattcgttagctcaaacacagatataatagtcggatccaattactcttccccaagcaacatcagcaagttcactgtgaataatcttgcggagccccaaaaggcaccaagccatcagcaggctacaactgcaggcagtccccttcgtcacttgattggcaaaaattcagtcctgaactccagcaccgcagagcattcttccccttactccgaggatccaattgaagatcccctgcagccagacgtgacgggaattagactcctgtctttgggggccggcgagttcaaatcacaggaacacgccaaacacaaggggccaaaggtggaacgagatcaagcagccaagcacaggttttcatggatgaagttactagctcacaaggttggcaggcacttgagtcaagacaccggctccccttcgggcatgaggccatgggaagacttaccctcacaggacaccgggagcccgtctagaatgcgtccctggaaagaccccccctcagacttgcttctgttgaaacagtccaactcgtcaaaaatattggtcggtcgttggcacctggctagtgagaaggggtcttacgagataatacaggacacagatgaagacactgctgtgaacaactggctaataagtcctcagaacgcttctagagcatggggggaaagtacccctcttgcgaataaacccgggaagcagagcggccatcccaaattcccgagagtgaggcataagtcattgcaagtccggcaggacgggggaaaaagccgcttaaagaaatctcagttcctgattaagaccagaaagaagaaaaaggagaaacacacacaccatgcacccttgagtccaaggaccttccatcctctaagaagcgaagcctacaataccttctccgaacggagactcaagcactccctggttctccacaagtctaatgaaaccagcctgcctacagatcttaatcaaactcttccttcaatggactttggatggatcgcaagcttgcccgatcacaatcaaaattcgagtaatgataccgggcaagcctcgtgccctcccggcctgtaccagacagtaccaccagaggaacattatcagaccttcccaatccaggatcctgatcagatgcacagcacgtcagatccttcccaccgttctagtagccccgagctgagcgagatgctggagtatgatagatctcataagagtttcccgacagatatctcacagatgagtccctctagtgagcatgaggtttggcagactgttatctctcctgatctgagtcaggtgacccttagccccgagttgagtcaaacaaatttaagcccagaccttagccacaccacactcagccccgagttgattcagcgcaatctttcacctgctctgggtcagatgcctatatccccggacctcagccatacaacattgagtcctgaccttagccataccacactgtccctggaccttagtcagactaatctgagccccgaactctcccagacgaacttgagcccagctctaggacaaatgccacttagccccgacctgtcacatacgacgctttctctcgatttttcgcaaacgaatctgtctcccgaactcagtcacatgaccctgtcccctgaactgagccaaacaaacctgtcgcctgccctcgggcagatgcccataagtcccgatctgtctcataccaccctctcattggatttttcacagactaacttaagtccggagctatcccagaccaacctgtcaccggccctcgggcagatgccactcagccccgacccaagccataccacgctaagcctggacctcagccagaccaacctcagtcccgagctgtctcagaccaacctgagccccgatctcagtgagatgcccctatttgctgacctgtcgcaaatcccgctgacacctgatttggaccagatgactctgagtcccgatcttggagaaaccgatttatctcccaatttcgggcaaatgagcctgagcccagacttgagccaagtgacactgagtcctgacatctccgatactaccctcctgccagatctctcacaaatctcgcccccacctgacctcgaccagattttctatccctccgagtcgagccaatccctcctgttgcaggagtttaacgagagcttcccataccctgacctcgggcaaatgccaagcccatcttctcctacactgaacgataccttcttgtcaaaagagttcaatcccctggtgatagttggcctgtccaaggatggaacggattatattgaaattattcctaaagaagaggtacagtcctcagaagacgattacgctgagatcgattacgttccctacgacgatccgtataagactgacgtgcggacgaacataaactcatccagggatccagataacatagctgcctggtatctgcggtctaataacgggaataggcgaaactactatattgctgcagaggagatctcttgggactactccgagttcgtgcagagagaaacagatatcgaggactcagatgacatccccgaagatacgacctacaagaaggttgtgttccggaagtatttggatagtacctttaccaagagagatcctcgaggcgaatatgaagagcacctaggcatcctgggacccattattagagccgaggtcgatgacgtgattcaagtgcgtttcaaaaatctggcctcacggccatacagccttcatgcccatggtttgagctacgagaaatccagcgaaggcaagacctatgaagatgattcccctgaatggttcaaggaggataacgccgttcagccaaactcaagttacacatacgtatggcatgccaccgagaggagcggccccgagagtccaggaagcgcttgtcgagcgtgggcatattattccgccgtcaaccctgaaaaggatatccattcgggcctcattgggccactactgatctgccaaaagggaatcctccacaaggattctaatatgccgatggatatgagagagtttgtcttgctcttcatgacatttgacgaaaagaagtcctggtactacgagaagaaatctaggagctcctggaggctcaccagctccgagatgaagaagagccacgagtttcacgcaattaacgggatgatctatagtctgcctggcctgaaaatgtatgagcaggaatgggtccggttgcatctcctaaacatcggcgggtcccaggacattcacgtggttcattttcatggtcagactcttctggaaaatggcaataagcagcaccagttgggggtgtggccactgctgccagggagtttcaagaccctcgagatgaaggcgtcaaaaccaggctggtggcttctgaacactgaggtaggggagaaccagagggccggtatgcagaccccctttctgataatggatagagactgtcgaatgcccatgggcctttcaactggcatcatctccgactcacagataaaagctagcgagtttctgggttactgggagcctcggctggctagactgaataatggcgggtcctacaacgcgtggtcagtcgaaaagctcgccgccgagttcgctagcaaaccatggatacaagtggatatgcagaaggaggtgatcataaccgggatacagacccagggcgctaaacattatttaaagagttgttataccaccgagttctacgtggcctatagctccaatcagattaactggcagatctttaaagggaactctactagaaatgtgatgtactttaatggcaactcggacgccagcactatcaaggagaatcagttcgatccacccattgtagccagatacatccggatcagcccaacccgagcttacaacagacctacactccgcctcgaactgcagggctgcgaggttaatggttgcagtaccccattggggatggagaacggtaagattgaaaacaaacagataactgcctcatctttcaagaagagttggtggggcgattactgggagccttttcgcgccaggctcaacgcccaaggaagggtcaacgcatggcaagccaaggctaacaataataagcagtggctggagatcgacctactgaagattaaaaagattaccgcaattattacccaaggctgtaagtcgctgagctccgagatgtacgtgaagagctataccatacactactccgagcagggtgtggaatggaagccgtatcgtttgaagtcgtccatggtagacaaaatctttgaggggaatacaaacacaaaggggcacgtgaaaaactttttcaatccgcctattatctcccgcttcatacgcgtgattccaaagacctggaaccagtcaattgccctacggctagagcttttcggttgcgatatttat

SEQ ID NO: 2274 - DNA, 6672 bp, Artificial Sequence
  derived and/or modified sequence
atgttcccaggctgcccacgcctgtgggtcctcgtcgtcctaggcacaagttgggtagggtgggggagtcagggaactgaagctgcgcagctaaggcagttctacgtggccgcccagggcataagctggtcctatagacccgaacctactaattcatccctcaacctgagcgtaacttctttcaaaaagatcgtttatcgggaatacgagccctactttaagaaagaaaaacctcaaagtaccatctcgggcctcctcggccccaccctctatgcagaggtgggggacatcatcaaggtacattttaagaacaaggccgacaagccactgagcatccatccacagggtatccggtactccaagctgtcagagggcgccagctacctagaccacacctttcctgccgaaaaaatggacgatgctgtggcacctggtagagaatacacctatgagtggtcgattagtgaggattccggacctacccatgacgacccaccatgcctcacccacatttactacagccacgaaaacctgatagaggacttcaatagcggccttataggtcccctgttaatctgtaaaaaaggaacactgactgaggggggcactcagaagactttcgataagcagatcgtcttactgtttgccgtttttgacgaaagcaaatcttggagccagtcaagtagtctgatgtacactgtgaatggctacgtcaatggaacaatgcccgatataacggtgtgtgcccacgaccacatatcctggcacctgctgggtatgagctcaggtcctgaactcttttccattcattttaatggtcaggtactggagcagaatcatcataaggtgtccgccattaccctggtctctgctacatccaccaccgctaacatgacagtaggacccgaagggaagtggatcatttcgtcgcttactcccaaacaccttcaggccggtatgcaggcctacatcgatattaaaaattgtccaaagaaaacgcgtaacctcaaaaagataacaagggagcagcgcagacacatgaagcgatgggagtactttattgctgccgaggaagtcatctgggactatgcacctgttattcccgccaatatggacaaaaaatacaggtcccaacatctcgacaatttcagtaatcaaatcggaaagcattacaagaaggtcatgtatacccagtacgaggacgaatctttcacgaaacacaccgtgaaccccaacatgaaggaggacggaatcttaggccccatcatccgggcacaggtgcgtgacactcttaagatcgtttttaagaatatggcttcgcggccgtactccatatacccccacggcgttacatttagtccttacgaagatgaagtaaactcttcatttacttcgggtcgtaacaataccatgatccgtgcagtgcaaccgggagagacctacacgtacaaatggaatatcttagaatttgatgagcccacggaaaacgacgcacaatgcctcaccaggccatactactccgatgtcgatatcatgagagatattgcttctggtctgatcgggcttctgttgatatgcaaatctcggagcttggaccgccgtggcatccaacgggcagctgatatcgagcagcaggccgtgtttgccgtctttgacgagaacaaatcatggtacctcgaagacaatataaataagttttgcgagaatcccgatgaggtgaagcgggatgatccaaagttctatgaatcgaatatcatgtctacgatcaacgggtatgttcctgaatccatcaccacgctaggcttttgttttgacgacaccgttcagtggcacttttgcagcgtgggcacccaaaacgaaattctgacaatacatttcaccggacatagcttcatctatggtaagcgacacgaggacactctgacgctgtttcccatgagaggggagtcagtgacagtcacaatggacaatgtagggacatggatgttaacttcaatgaattccagcccccgttcaaagaaactgagattgaagtttagagacgttaaatgcattccagacgatgatgaagactcttatgagatcttcgagccacccgagtcaacggttatggcaaccagaaaaatgcatgatcgtcttgaacccgaggatgaggagtccgacgcggattacgattaccagaatcgcctagcggctgctctcggaattcggtcatttaggaactccagcctgaaccaggaagaggaggagttcaacctgactgctttggcactggaaaacggaactgagtttgtgagcagcaatactgatattatcgtagggagtaactattctagcccttcaaatatcagtaaattcactgtgaacaatctagctgagcctcagaaagcccctagccatcagcaggccaccactgcgggcagcccactgaggcatttgattggaaaaaactctgtgctcaacagcagtacagcggaacacagttccccctactccgaggatcccatcgaagacccactgcagcctgacgtcactggcattaggctgctaagtctgggcgcaggcgagtttaagtctcaagagcacgctaaacacaaaggtcccaaggtggagagggaccaggcagccaaacatcgcttctcttggatgaaattgctggcgcataaggtcggccgccaccttagccaagacacaggatctccgagtgggatgcgcccgtgggaagacctgccatctcaggatacaggcagcccaagccgaatgcgtccttggaaggatccaccatctgatcttctgttgcttaagcaaagtaattcatcgaaaatcctggttggccggtggcacctggcctctgagaaaggatcgtatgagattatccaggacaccgatgaggatacagcagtcaacaactggctgataagcccacagaacgcatcacgcgcttggggcgagtctaccccactcgctaataaaccaggaaaacagagtggccaccctaagtttccccgagtgcgtcataagagcctccaggtgaggcaggatggaggcaagtcacgacttaaaaagtctcaattcctgatcaagacccggaaaaagaagaaagaaaaacacactcaccatgctcccctttccccacggacctttcacccacttcgctctgaagcctacaacaccttcagcgagcggagattgaaacattccctcgttctccataaaagtaatgagaccagcctgcccacggacctgaatcaaactctgccctcaatggattttggctggatcgcctcccttcccgaccataatcagaattcaagtaatgataccggccaagcctcttgccctcccgggttgtatcagacagtcccccctgaagagcactatcagacctttccaatacaggaccccgaccagatgcattccactagcgacccgtcacataggagctcgtctcctgagctttcagagatgcttgagtacgatagaagccacaaatcttttcccactgacatcagccagatgtcaccatcctccgaacatgaggtgtggcagacagttatatccccagatttgagccaagtgacgttgtctcctgagctgtcacaaacgaatctgtccccagatctgtcccacactaccttgtcaccagagctgatacagcgcaatttgtcaccagccctggggcagatgccaatctcccccgacctttctcacactacgttgtctcctgacctgtctcatacaaccttatcgctggatctgagccagaccaatctgagccccgagctatctcagacaaacttgtccccagctctgggacagatgcctctctcccctgatcttagccatactaccctgtctctggacttctcccagaccaacctctccccagaactctcccatatgaccctatcccccgaattgtcccaaaccaatctgagtccagcactggggcaaatgccaatatcccccgacttgtcccatacaactctctcgttggacttctcccaaacaaacctgtccccagagctcagccagactaatttaagccctgccctgggacagatgcccctctcccccgatccatcacacacaaccctaagtttggacttgtcccaaaccaacctctccccggaactgagtcagacgaatctgagtcccgacctgagcgagatgcccttgttcgctgatttgtcccagatcccactgacccccgacctggatcaaatgaccctttcccccgacttgggcgagacagatctgtcccccaactttgggcaaatgtcactatctcctgacctcagtcaggtaactctcagccccgacatatccgataccaccctcttacctgacctcagccaaatctcaccaccgcccgatctggaccagatcttttacccttccgagagctcccaaagtctcctgctgcaggaattcaatgagtcgttcccctatcccgatctggggcaaatgcccagcccttcaagcccaacactaaatgacacatttctctctaaggagttcaaccctctagtcattgtggggctctccaaggatggtactgactacattgaaattatcccgaaggaagaggtgcaatcatccgaagacgattatgccgagattgactacgtcccatacgacgacccgtacaagaccgacgtcagaactaatatcaacagttcacgggaccccgataacatcgccgcctggtacttaaggagtaacaatggcaacagacggaattactacattgctgcagaggaaatctcctgggactatagcgaattcgtgcagagggaaacagatattgaagattcggatgacatccccgaagatacaacttataaaaaggtggtttttagaaagtacttggatagcaccttcactaagcgcgacccccgcggggaatatgaggagcatctgggaattctgggtcccattattcgcgcggaggtagatgatgtaatacaggtgaggttcaagaacttagcctctcggccttacagccttcatgcccatgggctctcatatgagaagagcagcgagggcaaaacttacgaagatgacagccccgagtggtttaaggaggacaacgccgtgcaacctaattctagctacacttacgtgtggcatgccacagaaagaagtggcccagagagccccggctcagcctgccgtgcgtgggcctactacagcgctgtgaacccggagaaggacatccattctgggttaattggcccattgcttatttgccaaaaaggaatcctgcacaaggactcaaatatgccaatggacatgcgcgaatttgtcctcctttttatgacttttgatgagaaaaagtcttggtactatgagaagaagagtcggtcttcctggagactcactagttccgagatgaagaaatcccacgaatttcacgccataaacggaatgatatactcactcccagggctaaagatgtatgaacaggagtgggtcaggctgcacctgctgaatattggcggatcccaagatattcacgtcgtgcacttccatggacagaccttgctcgagaatggtaataaacaacatcagttgggtgtctggccactgttgcccggtagcttcaagactctcgagatgaaggcaagcaaaccaggctggtggctgcttaatacggaggtcggtgagaatcagcgggctggcatgcagactcccttcctgattatggatagagactgccgtatgccgatggggctgtctacagggattattagtgacagccagatcaaagcaagtgagttcttgggctattgggagcccagactagctcgacttaacaatgggggcagctataatgcatggtctgtcgagaagctggcggctgaattcgcctcgaaaccatggatccaggtcgacatgcagaaggaggtgataattaccgggatccaaacacagggggcaaaacattacctgaagagctgttataccacggagttttatgtggcttactcctctaatcaaataaactggcagatcttcaagggaaattctaccaggaatgtgatgtacttcaatggcaattctgatgcctccaccataaaagaaaatcaattcgacccccccatcgtggccagatatattcggatctcccctactagggcctataacaggccaaccctcaggctggagctgcagggctgtgaagtcaatgggtgctcaacaccacttggcatggaaaatggtaaaatcgagaataaacaaattacagctagcagttttaagaaaagttggtggggcgattactgggagcccttccgggcacgcttgaatgcccaaggccgtgtgaacgcctggcaggcaaaagctaacaacaacaagcagtggctggagatcgacctgcttaaaatcaagaaaatcaccgctattatcactcagggttgtaagagcttaagctccgaaatgtacgtgaagtcatacactatccattattctgaacagggtgttgaatggaaaccctaccgactgaaatccagcatggtggacaagatatttgaaggaaacactaacactaaaggtcacgttaagaatttttttaacccaccaatcatttcaagattcattagagtcatccccaagacttggaaccaaagtatcgcactgcgacttgagctgtttggctgcgacatatat

SEQ ID NO: 2275 - DNA, 6672 bp, Artificial Sequence
  derived and/or modified sequence
atgtttccaggatgccctcgtctgtgggtgcttgtggtcctcggcacttcgtgggtgggctggggctcccagggcactgaagccgctcagctgcggcaattctacgtggctgctcagggtatctcttggtcctataggcccgagcccaccaatagctcactgaacctgtccgtaacgagttttaaaaaaattgtttaccgggagtatgaaccctactttaaaaaggaaaaaccacagtctacaatcagtggattgctgggcccgactctttacgcagaggtgggtgacatcatcaaagtgcacttcaagaacaaggccgacaaacccctgtccatccatccccaaggtattcggtattcaaaactctccgagggagccagctacttagaccatacgtttcccgccgagaagatggatgatgcagttgctcctggcagagagtatacttacgagtggagcatctctgaggactcaggacctactcacgatgaccccccttgcttgactcacatctattacagccacgagaatctcatcgaggactttaattccggcctgatcgggccactgctcatctgcaagaagggtacattaacggaaggcgggacacaaaaaacattcgataagcaaattgtgttactgttcgctgtattcgacgaatccaaatcctggtcccagtcttccagccttatgtataccgtaaacggctatgttaatgggactatgcccgacattacagtgtgcgcacacgatcatatttcctggcacctgcttggcatgagcagtggccccgaactcttctctatacacttcaacgggcaagtgttagagcagaaccatcacaaagtgagtgctatcaccctggtgtctgctacaagcacaaccgctaacatgactgtagggccggaaggtaaatggatcatctcgagcctgactcctaaacacctgcaagccggaatgcaggcatacattgatatcaagaattgtccaaaaaaaacaaggaacttaaagaagatcacgcgtgagcaacggcggcacatgaagcgatgggagtactttatcgccgcagaagaggtcatctgggactatgcgcccgtaatccccgccaacatggataagaagtatcgcagtcaacatctcgacaacttctctaaccagatcggaaagcactacaagaaggtgatgtatacgcagtacgaagacgaaagttttaccaaacacacagtgaatcctaacatgaaggaggatggaattctggggcccatcataagggcccaggtgagggacaccctgaagattgtctttaaaaatatggccagccgtccatattcgatctacccccatggcgtcacttttagtccgtacgaggacgaagttaatagttcattcacgagtggccgtaacaacacaatgatcagggccgtacagcccggtgagacctacacatataagtggaatatcttagaattcgatgagcccacagagaatgatgcccaatgcctgacccggccgtactactcagacgtggacattatgagggacatagcctccggccttatcgggcttcttctgatctgcaaatcaagaagcctggacagacgtggaatccaaagggcggcagacattgagcagcaggcagtctttgctgtgttcgatgaaaacaagagttggtacctggaagacaatattaacaaattctgtgaaaaccctgatgaggtgaaacgggacgatcctaaattctatgagtctaacattatgtccacaatcaatggctacgtgcctgaatctataacaaccctgggattctgtttcgatgacactgttcagtggcacttttgtagtgtaggtacccagaacgaaatcctgacgatccacttcacaggtcacagctttatctatggcaagcgccacgaggatacgctgaccctgttccctatgagaggggaaagcgttacggtgactatggacaatgttggcacatggatgctcacatccatgaatagctctcctagaagcaaaaaactgaggttaaaattcagagacgtcaagtgtatcccagatgatgacgaggatagctatgagatctttgaaccacctgaaagcactgtgatggccacgagaaagatgcacgatagattagagccagaggacgaggaatctgacgcagactatgattatcagaacaggctggcggccgctctgggcatacgatcatttcgcaacagcagtctgaaccaagaggaagaggagttcaacctcactgcacttgctcttgagaatggcacagagtttgtgagctccaatactgacatcattgtcgggagtaattactcttcacccagcaacatatcaaaattcactgtgaataatctggctgagccgcagaaggccccatcacatcagcaggccacaaccgcagggagtcccctgcgtcatcttattggtaaaaactccgtcttaaattctagcacagctgaacactcaagcccctatagcgaagatcccatcgaggaccctctacagccagacgtgacagggatcagactgctgtcattgggcgcgggcgagttcaagtcacaggagcacgccaaacataagggacctaaagtcgaaagagaccaggctgccaagcaccgtttctcctggatgaaactgctagcgcataaggtcggaaggcatctgagccaggatacgggctccccatcgggaatgagaccctgggaggatctaccctctcaggatactggcagcccaagtagaatgagaccctggaaggaccctccttctgatcttttactgcttaaacagagcaattcatcgaagatcctggtgggtcgctggcatctggcgtcagaaaaaggttcttatgagattattcaagacaccgatgaggacacagcggtgaacaactggctcatctcaccccagaacgcttcccgcgcctggggagaaagcacacctttggcaaacaaacccggcaaacagtctggtcacccgaaatttccccgggtgaggcataagtcgctacaagtgcgtcaagacgggggcaagtcaagactcaagaaatctcagttcctgattaaaactcgaaaaaagaagaaggaaaagcacacccatcacgctcctctgtcaccaaggacattccaccctctgagatctgaagcatataacactttttctgagcggagactaaagcatagcctggtgctgcacaaaagcaatgagaccagcctgccaacggacttaaaccaaaccctgcctagcatggacttcgggtggattgcgtcactgccagaccataatcaaaattcatcaaacgacactggccaggcctcatgcccgcccggattgtaccagactgtcccccctgaggagcattaccaaacgtttcccatccaggatcccgaccagatgcatagtacctccgacccgtcccacagatcaagttctcctgagctctccgaaatgctcgagtacgaccggagccacaaatcctttccaacagacattagtcagatgtccccatcgtctgagcacgaagtgtggcagaccgtgatcagccccgacctgagccaggtcacattgtctcccgagctgtctcagacaaatctctctccggacctcagccacaccacactgtcacctgaactgatccagagaaacctctcacctgctctaggccaaatgcccatctcccctgacctaagccacaccaccctgtcacctgatctctctcatactaccctgtcactggatctcagccagaccaacttgagccctgagctttcccagaccaatctcagtccagcactgggccagatgcccttgtccccggatctgtcccataccacactgtcactggacttcagccagactaatttgagccccgagttgtcccacatgacgctgtcccctgaactgagccagaccaaccttagtcccgctcttggtcagatgccaatttctcccgatctgagtcatactaccttgtctctggatttctcgcagactaacttatctcccgaactctcacagaccaacctgtcaccagcactggggcagatgccacttagtcctgatccgagtcatactaccctatctctcgacctaagtcagaccaacctctcgccggaactgagccagactaacctgtcccctgacctgtccgagatgcctctgttcgcagacctctcacagattccccttactcctgatctggaccagatgacactgtcaccagacttgggtgagactgatctgtctcccaattttggacagatgtctctgtctcctgatctcagtcaggtcacattgtccccagacatcagcgacaccactttgctaccagatctgtcacagatctcgccccccccggacctcgaccaaattttttacccgtcggagtccagccagtcattactccttcaggagtttaatgaatcattcccttatccggacctgggtcagatgcctagcccaagctcaccaaccctaaatgatacgttcctgtccaaagagtttaatcctctggtcatcgtcggtctcagcaaggatggcaccgactacattgagatcattccaaaggaggaggtgcagtcatccgaggatgattatgcagagattgactacgttccttacgacgacccctataagacggatgtcagaacaaacatcaattctagtagggacccagacaatatcgcggcctggtacttgcgatctaataacgggaatcggcggaattattacatagcggcagaagaaatttcttgggattactcagaattcgttcagagggaaacagacattgaggacagcgatgatatccccgaagatactacttataagaaagttgttttcagaaaatacctcgatagcacctttactaaaagagatccgagaggcgagtacgaggagcacctcggcattctgggaccgattatcagagctgaagtcgacgacgtcatacaggtcagatttaaaaaccttgccagccggccctatagcctgcacgcgcacggactgagctatgagaagtctagcgaagggaaaacatacgaagatgattcacccgaatggttcaaagaggacaacgccgtccagcccaatagctcctatacctacgtctggcatgccactgagagatcaggacccgagtcacccggatctgcttgtcgggcctgggcctactacagtgcagttaacccagagaaggacatccactctgggcttatcgggcccctgctaatctgccagaaaggcattcttcataaagactctaatatgccgatggacatgagagaattcgtgctcttgttcatgactttcgacgaaaaaaaaagttggtactacgagaaaaagtctcgatctagttggagattgaccagtagcgagatgaaaaaaagccatgagtttcatgctatcaacggaatgatttacagtctgcccggccttaaaatgtatgaacaggaatgggtgaggctacatctacttaatattggcggatcccaggacattcacgtggtgcactttcatgggcagaccctcctcgaaaacgggaacaaacagcaccagcttggcgtgtggcctttactgcctggtagttttaagacactggaaatgaaggcgagcaaaccggggtggtggctgctgaacactgaggtgggggaaaaccagcgtgccggcatgcagacaccctttctgatcatggaccgggactgtagaatgcccatgggactgagcacaggaattatttctgactcgcaaatcaaggcaagcgaattccttgggtactgggaaccccgactggcacggctgaataacggcggatcttataatgcttggtcagtggagaagctggccgccgaatttgcgagcaagccatggatccaggtggatatgcagaaagaggtgattattacaggtatccagacacagggcgccaagcattacctcaagagttgctatactactgagttttatgtggcatattcatccaatcagattaattggcagatctttaagggtaactctacacggaatgtgatgtactttaacggaaactctgatgcatctacgatcaaggaaaaccagttcgacccccctatcgtggcgcggtatattcgcatttctcccacaagggcttataataggccgaccttgcgcctggagctccaagggtgcgaagtaaatggctgcagtacaccgctgggaatggagaacggtaagattgagaacaaacagatcacagccagctcattcaaaaagtcttggtggggggactactgggaaccattcagagcaaggctgaacgcccagggaagagtcaatgcctggcaggctaaggcaaataacaacaaacagtggctagaaattgacctgctgaagattaagaaaattaccgccattataactcaggggtgtaagtccctttcctccgaaatgtacgttaagagttacaccatccattattccgagcagggggtcgaatggaagccttacagacttaagagcagtatggtagacaaaatcttcgaaggcaatacaaacacaaaagggcacgtaaaaaatttcttcaaccctcctattatctctaggttcattcgtgtgattccgaagacttggaatcagagtatcgctttgcggctggaactgttcgggtgcgatatctat

SEQ ID NO: 2276 - DNA, 6672 bp, Artificial Sequence
  derived and/or modified sequence
atgttcccgggatgccccaggctgtgggtactcgtggtgctgggcacgtcttgggtcggatggggtagccagggaacggaggccgctcagttgcgtcagttctacgttgccgcccagggtatcagctggtcttaccgtccagagcccacaaacagctctctgaatctttccgtaacgtccttcaagaaaatagtttatcgcgaatacgagccttacttcaagaaggagaagcctcagagcaccattagtggcctcctggggcccactttgtatgccgaagtcggtgatatcattaaagtgcatttcaagaataaggccgataagccgttgtctatccatccgcagggcatccggtacagtaagctttccgagggcgctagctacctcgaccacaccttccccgcggaaaagatggatgatgcggtcgccccgggtcgggagtacacgtacgagtggtcaatttctgaggactccgggcctacccatgacgacccgccctgcctcacccatatctattacagccatgagaatctcatcgaggatttcaactccggccttattggtcccctgctcatctgcaagaagggcaccctgactgagggaggcacacaaaagaccttcgataaacagatcgtcttgctgttcgccgtcttcgacgagagcaagtcctggtcccagagctcgtctctgatgtacactgtcaacggatacgtgaatggaactatgcctgacatcactgtctgcgcccacgaccacatctcctggcacctcctcggtatgtcttccggccctgaacttttctccatccactttaacggccaggtgttagagcagaaccatcataaagtcagcgccatcactcttgtgtctgctacaagtaccactgctaacatgacggtgggccctgagggcaagtggatcatatcttcgcttaccccgaagcatctccaggcgggtatgcaagcctacatcgacatcaagaattgccctaagaagactcggaaccttaagaagatcacccgcgagcagcgccggcacatgaagcgctgggagtattttatcgcggcagaggaggtcatctgggattacgctcccgttatcccggctaatatggacaagaagtacaggtctcagcacctcgacaacttttctaaccaaatcggtaagcattacaagaaagttatgtacacccagtacgaggacgaatctttcactaagcacaccgtcaacccgaacatgaaggaggacggcatcttgggccccatcatccgagcccaggtacgcgacacgttaaagattgtgttcaagaacatggcatctcgtccttactccatctatcctcacggcgtaacgttctccccctatgaggacgaggtcaattcctcctttacgagtggccgcaacaatacgatgattcgggccgtccagccgggcgagacttacacctacaagtggaacatcctcgagttcgacgagccgacggagaatgatgctcaatgcctgacccgcccatactactccgacgtcgacatcatgcgcgacatcgcaagcggcctgatcggactcctgctgatctgtaagagccgctctcttgaccgacgtggtatccaacgtgccgcagacatcgaacagcaggctgtctttgctgtctttgacgagaataaatcctggtacctggaggacaacataaacaagttttgcgaaaacccagacgaagtgaagcgggacgacccgaagttctacgaatcaaacatcatgtccactatcaacggctatgtccccgaaagcatcactactttgggtttctgcttcgatgacacggtacagtggcatttttgctcggtcggcacccagaacgaaatcctgaccattcactttaccggccactccttcatatacggaaagcgtcatgaggataccctcaccctctttcccatgcggggtgagtcagtaaccgtcaccatggataatgttggaacttggatgctcacgtcaatgaactcctcgcctcggtctaaaaagctcagactcaagttccgcgacgtgaagtgcatccccgacgacgacgaagactcttacgagatattcgagcctcctgagtccactgtcatggcaacccggaagatgcacgaccgtctggagcccgaggacgaggagagcgacgcagattatgactatcaaaaccgtctcgcagctgcactgggtatccgttcgtttcgcaacagcagtttgaaccaggaggaggaggagttcaacctgacggccttggccctggagaacggtacggagttcgtctccagtaacactgacattatcgtgggatccaactactcctctccgtcgaacatctctaaattcacagtcaacaacctggctgaaccccaaaaggcgccttcacaccagcaagctaccactgcaggctctcccctgcgccaccttatcggcaagaactctgtcttgaacagttccactgccgagcactcctctccatatagcgaggacccgatcgaggaccccctgcagccagatgtcactggtatccggctgctgtcgctgggagccggcgagtttaagtctcaggagcacgccaagcacaagggtcccaaggtggagcgtgaccaggcggccaagcaccgtttcagttggatgaagttgcttgcgcacaaggttggtaggcacctgtcgcaggatactggttcaccttctggcatgcgtccctgggaagacttgccgtcgcaggacacaggtagcccctcgcgcatgcgcccctggaaggatcctcccagtgatctgctgctcctcaagcagagcaacagctccaaaattctggtcggtcgctggcacctcgcttccgaaaagggctcctacgaaattattcaagacacggatgaagataccgctgtcaacaactggcttatctccccccagaacgcctcgcgtgcatggggcgagtcgacgcctctagccaacaaacctggtaagcagagcggacacccgaagttccccagagtccgtcacaagagcttgcaggttcgccaggacggtggaaaatccagactcaagaagtctcagtttctgattaagacccgcaagaagaagaaggagaagcatacgcaccatgctcccctctcgccgcgcaccttccacccgctgcgcagcgaggcctacaataccttctctgagcgtcggctcaagcacagcctcgtgctccacaagtccaacgagacctccctgcctaccgatcttaaccaaaccctcccctctatggacttcggctggatcgccagcctccccgaccacaaccaaaatagctctaacgataccggccaagcttcctgccccccaggcctgtatcagactgtcccccccgaggaacattaccagacgtttccaattcaggaccctgaccaaatgcatagtacgtccgaccccagccaccgatcctcgtctccggagttgtccgaaatgctggaatacgatcgttcccacaaaagcttccccaccgatatctctcagatgtcgcccagctccgagcacgaggtctggcaaactgttatcagcccggatttgtcccaggttacgttgagtccggagctctctcagacgaacctctcgccagacctcagccataccaccctctctcccgagctcatccagcgaaatctttctccggctctcggtcaaatgcctattagccccgatctgtctcacaccactctctctccggacctttcccataccactctctcgctagacctcagccagaccaacctctctcccgagttgtcacagacgaacctctcaccagcgctcggacaaatgcccctctctcctgatttgtcacataccaccctgtccctcgacttctcccagacgaacctgagccctgagttatcccacatgaccttgagccccgaactgtcacaaaccaacctatctcctgctttgggtcaaatgcccattagcccggacctctcccacaccactttgtctctggatttctcgcagactaacttgtcccccgaattgagccagaccaacctaagtccggccctgggtcagatgcctctgtctccagacccttcacacaccaccctctccctcgaccttagccagaccaacctgtcccccgaattgtctcagaccaacctttcaccagacctgtcagagatgccgctcttcgctgacctctcccagatccccctcacacctgacctcgaccagatgacactgtcgccagacctgggtgaaaccgatctctctcccaacttcggtcagatgtccctcagcccggacctctcccaggtcactctctccccggacatcagcgatactactttgctgcccgatctctctcaaatctcccctccccctgatctggatcaaatcttctatccctccgagagctcccagagcttgctgttgcaggaattcaatgagagttttccctaccccgacttgggtcaaatgccgtcccccagctcaccgacactgaatgatacattcctaagcaaggagttcaacccacttgtgatcgtcggtttgtctaaggacggcacagattacattgaaatcatcccgaaggaggaggtccaatcctccgaggacgactatgccgagatcgactacgtcccctatgacgatccctataagaccgatgttaggaccaacataaattcctcccgtgacccagacaacatagccgcctggtacttgcggagcaacaatggtaaccggcggaattactatatcgccgctgaggagatctcgtgggactactcagagttcgttcagagagagacggacatcgaagatagcgacgacatacctgaagacaccacctacaagaaagtcgtattccggaagtacctggattcgacatttactaagcgggatccacggggcgagtacgaggagcatctgggtatcctcggcccgattatacgggccgaagtcgacgatgtgattcaggtgcgatttaagaacctggcctcccgtccctactccttacacgcacacggtctctcttatgagaagtccagcgaggggaagacctacgaggatgacagcccggaatggttcaaagaggacaacgctgtccagcccaactcgagctacacctacgtgtggcatgccaccgagagatccggcccggaatccccgggttcagcgtgtcgcgcctgggcttactactcggcggtgaaccccgagaaggacatccacagtggtctcattggcccgctactgatttgccagaagggtattttgcacaaggactcaaatatgccgatggacatgcgcgagtttgtcctcttgttcatgacgtttgatgagaaaaaatcctggtattacgagaagaagagcagatcgtcctggcgtcttacttcttcggagatgaagaagtcacacgagttccatgccattaatggcatgatctacagcctgcccggtctgaagatgtacgagcaagagtgggtgcgtctgcacctgctcaacattggtggatcccaggacattcacgtagtccacttccacggacaaaccctgttggaaaatggcaataagcagcaccagctgggtgtctggcctttactccctggtagcttcaagactttggagatgaaggcgagcaagccaggttggtggttgctgaacaccgaggtcggtgaaaaccagcgagccggtatgcaaacccctttccttatcatggaccgtgactgtcgcatgccaatgggcctcagtactggtatcatcagcgattcccagataaaggccagcgagttcctgggttactgggagcctcgtctggcccggctgaataacggtgggtcctataacgcctggtctgtggaaaaattggctgccgaatttgcctctaagccttggatccaggttgacatgcagaaggaggtcatcattaccggtatccagacccagggcgccaagcactatctcaagtcatgttacacgacggagttttacgtggcctactcttccaaccagatcaactggcagattttcaagggtaatagcaccaggaacgtcatgtacttcaatggaaatagcgatgcctccaccataaaggagaaccagttcgatccaccgatcgtggctaggtatattcgcatctcgcccactcgagcctataaccgaccgaccctccgtctcgaacttcagggctgtgaggttaacggctgtagcacccctttgggcatggagaacggcaagattgagaacaagcagattactgccagttccttcaagaagtcatggtggggtgactactgggagcccttccgcgctcggttgaatgcgcagggtcgcgtcaacgcttggcaggctaaggctaacaacaacaagcagtggctggagattgatttgctgaagatcaaaaagatcacggctattatcacccagggttgtaagtctctctcatcggaaatgtatgtcaagtcctacactatccactacagcgaacagggtgtcgagtggaagccctaccgtttgaagtccagtatggtcgataagatcttcgagggaaacactaacaccaaaggtcatgtaaagaacttcttcaaccccccgatcatctcccgatttattcgagttatccctaagacatggaatcagagcatcgcactccgcctcgagctctttggctgcgatatctac

SEQ ID NO: 2277 - DNA, 6672 bp, Artificial Sequence
  derived and/or modified sequence
atgtttcccggttgtcctagactgtgggtcctggtggtgttgggtacttcttgggttggctggggcagtcagggtaccgaggccgctcaactccgccagttctatgtcgcggcccagggtatctcttggagttatcgccccgaacccaccaattcatcccttaatttgtcagtaacatccttcaaaaaaatagtatatcgcgaatatgaaccatacttcaaaaaagagaagccgcagtctacaatatccggtcttctgggaccgacactgtacgcagaggtcggcgacattatcaaggtacattttaaaaataaggccgataagccactgagcatccacccgcaaggtatcagatacagtaagctgtccgagggcgctagctacctggaccacactttccccgctgagaaaatggatgacgctgtggctccaggcagggagtatacatatgaatggtctattagcgaagactctggtcccacccacgacgacccaccttgtcttacacatatttactactcacacgagaatcttatcgaagacttcaactccggactcatcggacccctcctcatttgtaaaaaaggcactctgaccgagggtggcactcagaaaacgttcgacaagcaaatagtcctcctgtttgccgttttcgacgagtccaagtcatggtcccagagcagcagtcttatgtacaccgtgaacggctatgtcaacggaacaatgcctgatataactgtctgcgcgcacgatcacatttcatggcacctcctcggtatgagcagcggcccagagctcttctccattcactttaatggccaggtacttgagcagaaccaccacaaagtatctgctatcactctggtttcagctaccagcaccactgcaaacatgactgtgggtccggaaggtaagtggatcattagcagtctgacacctaaacacctgcaagccggcatgcaagcctacatcgacatcaagaactgtccgaagaaaactaggaatttgaaaaaaatcacacgcgaacagagaagacacatgaaacgctgggagtacttcatagccgccgaggaagtgatttgggattacgcaccagttatcccagctaacatggataagaagtacagatcacaacatctggacaatttctccaaccagatcggaaaacattacaaaaaggttatgtacacacaatacgaggacgagagctttactaagcacactgtcaaccctaacatgaaggaggatggaattttgggaccgattatcagggcccaggtcagagacactctgaaaatcgtatttaagaatatggctagcaggccctactccatatatcctcacggagtcacatttagcccgtacgaggacgaggtcaatagtagcttcacaagcggtagaaacaatacaatgatccgcgctgttcagcctggagaaacttacacatacaagtggaacattctggagttcgatgagcccaccgaaaatgacgctcaatgcttgaccaggccgtactacagtgacgtggacataatgagggatatcgcatcaggtctgatcggactcctcctcatttgcaaatcccgcagcttggatagaaggggaatccaaagagccgccgatatcgaacagcaagcagttttcgctgtgttcgatgagaataagtcctggtacctggaggataacataaataagttctgcgagaaccctgatgaggtcaagagggacgatccgaagttttacgaatccaacatcatgagcacgatcaatggctatgtgccagagtcaataactaccttgggtttctgtttcgatgacacggtgcagtggcacttttgctccgtgggaactcaaaacgagattcttacaatccatttcacaggacactcctttatctacggcaaaagacacgaagataccctcactctgttccctatgaggggcgagagcgtgactgtgaccatggataatgtcggcacatggatgctcactagtatgaacagctccccccgctccaagaagctccgcctcaagttcagagatgtcaagtgcatccccgatgatgacgaagattcatacgagatcttcgagccaccagagtcaacagtgatggccacacgcaaaatgcatgaccgcctggagcctgaggatgaggagagcgatgccgattacgactatcagaacagattggccgccgcactcggaattagatccttcaggaactcatccctgaaccaggaggaagaagaattcaatttgaccgctctggctctcgaaaacggaaccgaatttgtgagttccaatactgacatcattgtgggctccaactacagttccccctctaacatttccaagttcactgtcaataatctcgctgagccgcaaaaggccccctctcatcaacaggcgaccacggccggtagcccgctgcgccacctcatcggaaagaattctgtgcttaacagttctaccgccgagcattcctctccttattccgaagatcccatcgaagacccgctgcagcccgatgtaaccggcatcagactgctgtccctgggtgctggcgagtttaagtcacaggagcatgccaaacataagggccctaaagtggaaagggaccaagccgccaagcatagattctcctggatgaagctcctcgcccacaaggtaggcaggcacctttctcaggacacaggtagcccttccggaatgaggccttgggaggatctgccttcccaggatacaggaagccccagtaggatgagaccctggaaggatcctccttcagaccttctcctcctcaaacagagcaactcttctaagattctggttggcaggtggcatctcgcttctgagaaaggctcatacgagatcatccaggatacagatgaggacacagcagtaaataactggctcatctctccgcagaacgcaagtagggcatggggtgagtcaacgcccctcgccaacaagcccggtaaacaaagtggtcatcccaagttccccagggtgcgccacaaaagtctccaagtgcgccaagacggcggaaagagccgcctcaagaagagccagtttctgattaagacaaggaaaaagaagaaggagaagcatacccaccacgcccccctgagcccgaggactttccatccactgcgctctgaggcatataacaccttttctgaaagaaggctcaaacacagccttgtattgcacaagtcaaatgagaccagtctgccaacggatcttaatcagacattgccttctatggactttggctggattgctagcctcccagatcataatcaaaactcatcaaatgacactggacaggcttcctgcccgccaggcctttatcagaccgtgccgccagaagaacactaccaaacatttccaatccaggaccccgaccaaatgcattctacctctgacccgagccacagaagctcatctccggaactgtctgagatgctggagtacgatagatctcataagagtttcccaactgatataagtcaaatgagtccctctagcgaacacgaggtatggcagacagtgatatcacccgacttgagtcaggtgaccttgagccctgagctgtcacagactaacctgtcacctgacctgtctcacacgaccctgagcccggaattgatccagcgcaacctgtccccggcactgggccaaatgcctatctccccggacctgtcccatacgacattgtctccagatctgagccatacgacactcagcctggacctgtcccagacgaatctctctcccgagttgtcacagacaaacctgtctcctgctctgggccagatgcccctgagtcccgatctgtctcacacaactctgtctctggacttttcccaaactaatctgtcacccgagctcagccacatgaccctgtcaccggagctgtctcagactaacctttcaccagccctgggacagatgccaatttctcccgacctgtcccacaccacgcttagcctcgacttctcacaaacaaacctttctcctgagctgtctcagactaatctttctcccgctttgggccagatgcctctgagcccagatcccagccacaccactttgagcctggacctgtctcagaccaatctctctcccgaactttcacagaccaacctgtcaccagatctcagcgagatgcccctgttcgctgatctgtcccagatacccctcactccggacttggatcagatgaccctttccccagatctgggcgagactgacctgagccccaacttcggtcaaatgtccttgagccccgatctgtcccaggttacattgagccctgacatctccgacaccacgctcctgcctgatctgagccagatcagcccgccacccgacctggatcagatcttttacccctctgagagcagccagtctcttttgttgcaagagttcaatgaaagctttccctacccagacctcggacagatgccaagtccgtccagtcccactctgaacgacactttccttagtaaggaattcaaccctctggtgattgtaggcctgagtaaggacggtaccgactacatcgaaattattccgaaggaagaggttcaatcatccgaggacgattacgccgagattgactacgtaccttacgatgacccttacaagacggacgtaaggaccaacataaacagctccagagatcctgacaacatagcggcctggtacctgcgcagtaacaacggtaataggcgcaattactacatcgcagcagaggaaatttcttgggattacagcgaattcgtacagcgcgagacggacattgaggacagcgacgatattccggaggacacgacctataaaaaagtcgtgtttcgcaagtatctcgacagtacgttcacaaagagggatccgaggggcgagtacgaggagcacctcggtatcctcggtcccatcatcagggctgaggtggatgatgttatccaggttaggttcaagaaccttgccagcagaccctatagcctccacgcgcacggactgtcctacgaaaagagttcagaaggcaaaacctatgaagatgattctcccgaatggttcaaggaggacaatgcggtccagcctaactcctcttacacgtacgtatggcatgccacagaacgctctggccccgagagtccaggcagcgcttgcagagcctgggcttattactctgcagttaatcccgagaaagatattcattccggattgatcggtcccttgctgatctgtcagaaaggcatcctccacaaagattcaaacatgccaatggacatgagggagttcgtgctgttgttcatgactttcgatgaaaaaaaatcatggtattacgaaaaaaaatctagatcatcctggagactgacctcaagcgagatgaagaagtcccacgaattccatgccatcaatggaatgatctatagtttgcccggcctcaagatgtacgaacaggagtgggtgagacttcacctgctgaacatcggcggctcccaggacatccatgttgtgcactttcatggccagaccttgttggaaaacggtaataaacagcatcagctcggtgtctggcctctgctgcccggcagcttcaagacactggagatgaaagcatcaaaaccgggatggtggctgcttaacaccgaggtaggagagaaccaaagagccggcatgcagaccccattcctcattatggacagggactgtagaatgcccatgggcctcagcacaggaatcatcagcgactctcaaatcaaggccagtgagttcctgggatactgggagccccgcctggcacgcctgaataacggcggcagctacaacgcttggagcgtcgagaagttggcagccgaatttgcgtccaaaccttggatccaagtggacatgcagaaggaagtcattattaccggcatccagacacagggtgccaagcactatctgaagtcttgctacaccactgagttttacgtcgcctactccagcaatcagatcaactggcaaatcttcaaaggaaatagtacccgcaatgttatgtatttcaatggaaactccgatgccagcactatcaaggagaatcagttcgaccctcccatcgtggcccgctatattcgcatttccccaacaagggcttacaaccgccctaccctcagactggaacttcagggatgcgaagtgaacggatgcagtactccccttggtatggaaaatggcaagatcgaaaataagcagattacagccagttctttcaagaaatcttggtggggtgattattgggaaccttttagagctaggctcaacgctcagggaagagttaacgcttggcaagccaaagcgaataacaataagcaatggctggaaattgaccttctcaagatcaaaaaaattaccgctataatcacacagggatgtaaaagcctcagttctgagatgtacgtgaaatcttatactattcattacagtgagcaaggcgtggaatggaagccttataggctgaagtcatccatggtggataagatttttgagggcaataccaacaccaaaggacatgtgaagaactttttcaaccccccaattatcagtaggtttattagagtgatcccaaagacctggaaccagtccattgccctgagacttgagctgtttggttgcgacatctat

SEQ ID NO: 2278 - DNA, 6672 bp, Artificial Sequence
  derived and/or modified sequence
atgttccccgggtgtccgcggttgtgggtgcttgtcgtgctagggactagctgggtaggatggggttcacagggtaccgaggctgcacaacttcggcaattttacgtggctgcccaagggatatcctggtcctaccgacccgaaccaacgaactccagcttgaatttgagcgttacttctttcaaaaagatcgtataccgcgaatacgagccgtattttaagaaggaaaagccgcagagcaccattagtggcttgttaggacccacactctatgctgaagtgggagacattattaaagtccatttcaaaaacaaggcagacaagcccctgtctatccatccacagggaattcgatattcaaagctttccgagggcgccagctatctggatcacaccttcccagcggaaaagatggacgatgctgtggcaccgggccgggaatacacctacgagtggagcatttcagaggactctgggcccacccacgatgatccaccttgtctgacgcacatctactatagtcatgagaatcttattgaagattttaactccggactgatcggacctcttctgatttgcaagaagggaacattaacagagggaggaacgcagaaaacgtttgacaagcagatcgtgctcctattcgcagtatttgacgagagtaagtcttggagtcagtctagttctctgatgtacacagtcaacggttatgttaatggcaccatgccagatatcaccgtctgcgcccacgatcacatctcatggcacctgctaggaatgtcttccggacccgagctcttctccattcattttaacgggcaagtgctcgagcagaatcaccataaggtatctgccattacactggtgtctgcaaccagtaccacagccaacatgacagttggacctgaaggaaaatggatcatatcttccctcacaccaaagcacctacaggccgggatgcaggcatacatcgacattaaaaactgccctaagaagacccgtaacttgaagaaaataacgagggaacaacgcagacatatgaagcgctgggagtattttatcgcagcggaggaagtcatatgggactatgcaccagtgattccagctaacatggacaagaagtatcgatctcagcacctggataacttctcgaatcagatcggcaaacactacaaaaaggtcatgtacactcagtacgaggatgaatcattcaccaaacataccgtgaaccccaatatgaaggaggatggaatcttggggcccataatccgggcccaggtacgggacacactgaagatcgtgtttaagaacatggcatcaaggccgtactctatttacccccatggtgtgactttctccccttacgaagacgaggtgaattcttccttcacgtcgggccgcaacaacactatgatccgcgccgtccagccgggtgagacctatacgtacaaatggaatatcctggagtttgacgagcctactgaaaatgatgcccagtgcttgactagaccatactattcagacgtggacattatgcgcgacatagcgagcggcttgataggactgctcctgatctgtaagtctcgctccttggataggcgtggcatccagagagctgcagacatagaacaacaagccgttttcgctgtgttcgatgagaataagagctggtacctcgaggacaacatcaacaagttttgtgagaatccagatgaggtgaaacgtgacgatcctaaattctacgagtccaacatcatgagtacaattaatggctatgtgcctgagagcatcacaacattagggttctgcttcgacgacacagtgcagtggcacttctgttcagtgggaactcagaacgaaatattaacgatccactttaccggccattccttcatttatggaaaacgccacgaggatacactgacattgttcccaatgaggggggaaagtgtgacggtgaccatggacaatgtgggcacttggatgcttacttccatgaatagttcaccgcggagcaagaagctccgactaaaatttcgggacgtgaagtgtattcctgacgatgacgaagattcctatgagattttcgaacctcccgagtctacggtgatggccacacggaaaatgcatgatagacttgaacctgaggatgaagagtctgatgctgactatgactaccagaatcgcttggccgccgcactggggatccgctcttttcgcaactcttctctgaaccaggaggaagaagaatttaacctaactgctcttgcccttgaaaacggtacggaattcgtgagctcgaacaccgacataatcgtgggtagcaattactcctctccctccaacatttccaaatttactgttaataacctggctgaaccgcagaaggccccgagccatcagcaggccacaactgcaggctcacccctccgccatctgatcgggaagaactctgtacttaattcctctaccgccgagcatagttcaccctatagtgaggatcctattgaggatccactgcagcccgatgtcaccggcatcagactgctgagcctgggcgccggggaattcaagtctcaggagcatgctaagcataagggccccaaggttgagagagaccaggccgccaagcatagattctcgtggatgaaactgctggcacacaaggtaggaagacatctgtctcaggataccggcagcccaagtggcatgcggccctgggaagacctgccatcccaagatactggttcccctagtcggatgaggccttggaaagatccgccaagcgacttgctcttgctgaagcagtccaacagcagcaagatcctcgtggggcggtggcacttggccagtgagaagggttcctacgagattatccaggacacggatgaggatacggccgttaacaattggctgataagtccccagaacgcttctcgggcctggggggagtcaactccgttggcgaataaaccagggaagcaatcgggacacccgaagtttccaagagtccggcataaaagcctccaggtcaggcaggatggtggtaagtcaaggctgaagaagagtcagttcctcatcaaaacaagaaaaaagaaaaaagaaaagcacacacatcatgctccactgagtccaaggacattccaccccctgcggtctgaggcatacaacactttttccgagagaaggctgaagcattctctggtcctccataagagtaacgagacctctttacctactgatctgaatcagacgttgcccagcatggacttcggatggattgcatcactccctgatcataatcagaacagctccaacgacactggccaagcatcttgtcccccggggctctaccaaacagtgccccctgaggagcactatcaaaccttccctattcaagacccggaccagatgcactcaacatccgacccaagtcatcggtcatccagccccgagctcagcgaaatgctggagtatgatcggtctcataaatctttcccaaccgacatatcccagatgtccccctcatctgaacacgaagtatggcagacagtgatctctccagatctgagccaggtgaccctgtctccagagctgagccagaccaacctgtccccggatctgtcccacactacactcagccctgaactgattcagcgaaacctgagccccgcgttgggacaaatgccaatctccccagacctcagccacaccacactgtccccggatttatcccacacgacgttgtctcttgacctgagccagaccaatctcagcccagaactgagtcaaacaaacctgtcccccgcattgggtcagatgcccctcagtccagacttaagccacacgaccttgagtctcgacttctcccagaccaatctcagcccggaactctctcacatgacattgtcccctgaactcagccagacaaacctctcccctgcactgggccagatgcccattagccctgacttaagccataccacactgtcattagatttctctcagacgaatctctccccagaattgtcccagaccaacctgtccccagccttgggccagatgccactgtctcccgacccgagtcatacaacgctgtccttagacctgagccagactaacttatctcccgaactgagtcagaccaaccttagtccggacctgtctgagatgcccctgttcgccgacctgtctcaaatccctctcacccccgatcttgatcaaatgacactcagtcccgatctgggcgaaactgacttgagcccaaactttgggcagatgagcctgtccccagacctttctcaggtcactctatctccagacatcagcgataccacgctcctgccagatctgagtcagattagtccacctccggacttggatcaaattttttatccctccgaatccagccagtcattgttgttgcaagagtttaacgagagttttccataccccgacctgggtcagatgccgagcccatcaagccccacactaaatgatacttttctttcaaaagaattcaatccccttgttatagtcggactgtcaaaagacggaacggactatattgagatcatcccaaaggaggaagtccaatctagcgaagatgactacgcggagatcgactacgtgccctatgacgatccctataagacagatgtacgcactaacatcaattcttcccgcgaccccgataatatcgctgcttggtacctgcgctccaataatgggaaccggcgcaactactatattgctgctgaagaaatctcatgggactactcagaattcgttcagcgggagaccgatatcgaagacagcgacgacataccagaggacactacctacaagaaggttgtcttcagaaagtacctagacagcacattcactaaaagagatcctcgaggggagtatgaagagcacttagggatactgggcccaatcatccgggcagaagtggatgatgtgatacaggtgcgatttaaaaatctggcctctcggccttattcccttcacgcccacggcctttcatacgagaagtcttcagaagggaaaacctatgaggatgactccccagagtggtttaaggaggataacgcggtccaacctaatagctcctacacgtatgtctggcacgcaaccgaacggtcaggtccagaaagccctgggtcagcctgccgcgcctgggcatactacagcgcagtgaaccctgagaaggatattcattctggccttatcgggcccctgctcatttgtcagaaggggattctgcacaaggactctaatatgcccatggacatgagggagttcgtcctcctgtttatgacatttgatgagaagaaatcttggtattacgaaaaaaagagcaggtcaagttggcgacttacttcctccgagatgaagaagtctcacgagttccatgccattaacggtatgatatatagcctgcccggccttaaaatgtatgagcaggagtgggtgcgtctgcaccttcttaatataggtggatctcaggacatccatgtggtacacttccatgggcagacactgcttgaaaacggcaataagcagcatcagctgggggtctggcctctgctgccaggctccttcaagactttggagatgaaggcctcaaagcctggttggtggctccttaacaccgaggtgggggagaaccaacgcgcggggatgcagaccccattcctcataatggaccgtgactgccggatgccgatgggactcagcactggcattatctccgattcccaaatcaaggcctctgagtttctgggatactgggagccaagactcgcacgcctgaataacggcggttcgtacaacgcctggagcgtggagaaactcgcagccgaattcgcctctaagccttggattcaagttgacatgcagaaggaggtgataatcacggggatccaaactcagggagctaagcattatcttaaaagttgttacacaaccgagttctacgttgcctatagttccaaccaaattaactggcagatcttcaagggcaattccacccggaatgttatgtacttcaacggcaactctgatgcatccaccatcaaggaaaaccaattcgacccaccaattgtggcaagatatatccggatcagtcctacacgggcctataacagaccgactctccgattggagctgcagggatgcgaggtgaacggatgctccacaccgcttgggatggaaaacgggaaaattgagaacaaacagattacagcctcgtcctttaagaagtcatggtggggcgactactgggagcccttcagggccaggctcaacgcccagggcagggtaaacgcatggcaggcaaaggccaataacaacaagcaatggctggaaatcgacctcctgaaaatcaagaagataactgcaatcataacgcagggctgcaaatccctctctagtgagatgtacgtgaagtcctacacaattcactacagtgaacaaggcgtggaatggaagccatatagactgaagagctccatggttgataagattttcgaaggaaataccaacactaaaggtcacgtcaaaaatttctttaatccacccattatctccagatttataagggtgatcccaaaaacctggaaccaatctatagcccttaggctcgaactattcgggtgcgatatctac

SEQ ID NO: 2279 - DNA, 6672 bp, Artificial Sequence
  derived and/or modified sequence
atgttccctggctgcccgcgcctttgggtgctggttgtgctcggaacttcgtgggtgggttggggttcacaaggcactgaggccgcccaactgcgccagttttacgtcgcggctcagggtatctcgtggtcgtaccgccctgagccgactaattcctcgctgaatctctcggtgacttcgttcaaaaagattgtgtatcgggaatacgaaccatacttcaagaaagaaaagccgcagtccactatctccggattgctgggcccgaccctgtacgcagaggtgggggacatcatcaaggtgcactttaagaataaggccgacaagccactttcaatccacccacaaggaattaggtactctaaactgtctgaaggagcttcatacctcgaccacactttccctgcggaaaagatggacgacgccgtcgccccgggaagggagtacacgtacgagtggtcaatctcggaagattcaggacctacccatgatgatccaccttgcctgactcacatctactactcgcatgaaaatctcatcgaagatttcaattctgggctgatcggcccacttcttatctgcaagaaggggactttgactgagggagggacccaaaaaaccttcgataagcagatcgtgctgctcttcgcggtttttgatgaatcgaagtcgtggtcgcagagctcgtcactgatgtacacggtgaatggatacgtcaacggcactatgccggacatcaccgtgtgcgcgcacgaccacattagttggcatttgctcggcatgagcagcggaccggaacttttcagcatccatttcaacggccaagtcctggaacaaaaccaccataaggtcagcgccatcaccctcgtcagcgcgacctcgactactgcgaacatgaccgtcggaccggaaggaaagtggatcatcagcagcctgacccccaaacacctccaggccggaatgcaggcctacatagatatcaaaaactgccctaaaaagaccagaaatctgaagaagattacgagagaacaaaggcgtcatatgaagcgctgggaatacttcatagcagccgaagaagtgatctgggactacgcgccagtcattcctgcaaacatggacaaaaagtatcggagccaacacctcgacaacttctcaaaccaaatcggaaagcattacaaaaaggtgatgtacactcagtacgaggatgaatccttcaccaaacataccgtcaatcccaatatgaaggaagatggtatcctggggccgattattcgcgcgcaggtcagagacactctgaagatcgtgttcaaaaacatggcctccagaccttactcgatttacccacatggggtgactttctccccgtacgaggacgaagtgaatagctcatttacttcgggacggaacaatactatgatcagggcagtgcagccaggagaaacctacacctacaagtggaatatcctcgagttcgacgaaccgaccgagaacgatgcgcaatgcctgacccggccttactactccgatgtggatatcatgcgggacatcgcgagcgggttgatcggcctcttgctcatctgtaagtccagatccctggaccgccgcggcatccagcgcgcagctgacatcgagcagcaggcggtgtttgccgtgtttgatgaaaacaagagctggtatctcgaggacaacattaacaagttctgcgagaatcctgacgaggtcaagcgagatgatccgaaattctacgagtcgaacatcatgtccaccattaacggctacgtgccggaatccatcaccactcttggtttctgcttcgatgacactgtccaatggcacttctgctccgtgggcacccagaatgaaatcctcaccatccactttactggccattcgtttatctacggcaagcgccacgaagatactctcactctgttcccgatgcgcggagagtccgtgacggtcaccatggacaacgtcgggacctggatgctgactagtatgaacagtagcccgcggtccaagaagttgcgccttaagtttagggatgtcaaatgcatcccggatgatgatgaagattcctacgagatttttgagccgccggagagcacggtgatggcaacgagaaaaatgcacgaccggctcgaacctgaggacgaagaaagcgacgccgactacgactaccagaaccggctggccgctgcgctgggaatccggtctttcagaaattcctccctgaatcaggaggaagaggagttcaacttgactgccctggccctggaaaatggcaccgaatttgtgtcctcaaacaccgatatcattgtggggagcaactactcgagcccaagcaatatctccaagtttactgtgaacaatctggcagaaccgcagaaggctccaagccatcaacaggcaaccactgctggctcgcctctgcggcacctgattggcaagaactcggtgctgaactcctctacggctgaacattcgtcaccgtactcagaagatccgatcgaggacccactgcagcccgacgtcaccgggattcgcctgttgtcgctgggcgcgggcgaattcaaatctcaggaacatgcgaagcacaagggacctaaggtggaaagagatcaagccgccaagcataggttcagctggatgaagctcctggctcacaaggtcggacgccatctctcacaagacactggatcgccaagcgggatgcggccatgggaggatctcccatcccaagacaccggctcgccgtcgcgcatgcgaccgtggaaagaccctccgtcggatctgctgctgctcaagcagtccaactcatcaaaaatcttggtcggtcgatggcacctcgcctcggagaaaggctcctatgagatcattcaggataccgatgaagataccgccgtgaacaactggttgatctcgccacagaatgcctcgcgggcatggggagaatccacccccctggccaacaaaccggggaagcagtcgggacaccctaagttcccgcgcgtccggcataagtcgctgcaagttcgtcaggacggtggaaagtcccgcctgaagaagagccagtttctgatcaagactcggaaaaagaaaaaagaaaagcacactcaccatgcccccctttccccaaggaccttccaccccctgcggtcagaagcgtacaacactttctccgagcggcggctcaagcactcactcgtgctccacaagtcaaatgaaacctccctgccgaccgacctcaatcagaccctcccaagcatggattttggctggattgcctccctccctgaccataatcagaactcctcgaatgatactggccaggccagctgcccgcctggactgtaccagaccgtgcctccagaggagcactatcaaaccttccctatccaagacccggaccagatgcactcgacgtccgatccaagccacagatcgtcatccccggaactgtcggaaatgctggaatacgaccgctcgcacaaatcattcccaaccgacatctcccagatgtcccctagctcggaacatgaggtctggcagaccgttatctcgccagatctgagccaggtcactctttcaccggaactttcccagaccaatctttcaccagacctctcccacaccactttgagcccagaactgatccagagaaacctctcgcctgcgctgggtcaaatgccgatatctcctgacctgagtcataccaccctgtcgcctgaccttagtcataccactctctccctggatttgtcacagacgaacctttcccctgagctcagtcagactaatctctcgccggcattgggccaaatgcctttgtcccctgacttgagtcatactactctgtctctggacttctcccaaactaatctgagtcctgagctttcccacatgactctgtcaccagagctctcacagacgaatttgtcgcccgctcttggtcagatgccgatctcccccgatctgtcacacacgaccctgagccttgatttctcccaaacgaacctgtctcccgaactgtcccagacgaacctgtccccggcgctggggcaaatgccgctgagtccggatccttcgcacactacccttagcctcgacctgtcgcagaccaacctgtctccggaactctcacagactaacttgagtccggacctctcagaaatgccactcttcgccgacctgtcccaaatcccactcactccagatctcgatcagatgactctctcaccagatctcggtgaaactgatctgtcccccaacttcggacaaatgtcattgtctcccgatctctcgcaggtgaccctgtctccagacatctcggacaccacgctcctgccggatctttcacaaatctcaccacctccggacctggaccaaatcttctaccccagcgaatccagccagtccctgcttctccaggaattcaacgagtcatttccgtacccggacctcgggcagatgccttcgccttcgtcgcccaccctcaacgatactttcctgtcaaaggagtttaacccattggtgatcgtcggactttcaaaggacggtaccgactacattgaaatcatcccgaaggaagaagtgcaatcgtcggaggacgactatgcagaaatcgactatgtgccttacgatgacccgtacaagaccgatgtccgcactaacatcaactcgtcccgggaccctgacaatattgccgcatggtacctgaggagcaacaacggcaacagaagaaattactacatcgcggctgaggaaatcagctgggactacagcgagttcgtccagcgcgagacggacatcgaggatagcgatgacatcccagaagataccacctacaagaaagttgtattccgcaaatacctggattccaccttcactaaacgggacccgagaggcgagtatgaggaacacctgggaatccttggaccgattatcagagccgaggtggacgatgttatccaagtgagattcaagaacctggcgtcgcggccgtactccctgcacgcgcatggactctcctatgaaaaatcgtccgagggaaagacctacgaagatgactccccagagtggttcaaggaggacaacgctgtgcaaccgaactcgagctatacttatgtgtggcacgccacggagcgatcaggacccgaaagccctggaagcgcctgtagggcatgggcctactactcggctgtaaacccagagaaggatatccactcgggactgatcggaccgctgctcatctgtcaaaaaggcattctccacaaggacagcaatatgccgatggacatgcgggagttcgtcctcttgttcatgacgttcgatgagaaaaagtcgtggtactatgaaaagaagagccgctcgtcatggagactgacttcatcagagatgaagaaatcgcacgaattccatgctatcaatggtatgatctactccctcccgggactgaagatgtacgaacaagaatgggtgcgcctgcatttgctgaacatcggaggatcacaggatatccacgtggtgcactttcacggacaaacccttctggaaaacggcaataagcagcatcaactcggtgtgtggccactcctgcccggatcattcaagactctggagatgaaggcttcgaaacctggctggtggctgttgaacactgaggtcggagagaaccagcgcgcaggtatgcaaaccccgtttctcatcatggatcgagactgtcgcatgccaatgggattgagcaccgggatcatctccgattcgcaaatcaaggcctcagaattccttggatactgggagccccggttggcgcggcttaacaatggtggaagctacaacgcttggagcgtggagaaactcgccgccgaatttgcgtctaagccgtggattcaggtggatatgcagaaggaagtgatcattaccggaatccagactcagggcgccaagcactaccttaagtcctgctacactaccgagttttacgtggcgtactcaagcaatcaaatcaattggcagatcttcaaaggtaattcaacccggaatgtgatgtacttcaacgggaacagcgacgcgtcgaccatcaaagaaaaccagttcgacccgccgatcgtggctcgttacatccgcatctcccctactcgcgcgtacaacaggccaaccttgagacttgaactgcaaggatgtgaggtgaacggatgttctactccgctgggaatggaaaacggaaagatagagaacaagcagatcaccgcgagctcttttaagaagtcatggtggggagactactgggagccgttccgcgcgaggttgaacgcacagggacgcgtaaacgcctggcaggcaaaggccaacaacaataaacagtggctggaaattgacctgttgaagatcaagaaaatcaccgctatcatcactcagggctgcaagagcctgtcgtcagaaatgtacgtgaagtcatacactatccactactctgagcaaggtgtggagtggaagccgtaccgtctgaaatcgtcgatggtggacaaaatcttcgaaggaaatactaacaccaaggggcatgtgaagaacttcttcaatcctccgattatctcccgcttcattcgcgtgattccaaagacctggaatcagtcaatcgccctgcggcttgagctttttggatgcgacatctac

SEQ ID NO: 2280 - DNA, 6672 bp, Artificial Sequence
  derived and/or modified sequence
atgttccccggctgtcctcggctgtgggtgttggttgtactcggcaccagctgggtaggctggggcagccaaggaactgaagctgctcagctgcggcagttttacgttgcagcccaaggtattagttggagctatagaccagagcctaccaacagcagtctgaacctctccgtgaccagctttaaaaagattgtatatcgggagtatgagccttactttaagaaggaaaagcctcagtctacaatctcaggtcttttgggcccgactctgtacgctgaggtgggagacattattaaggtccactttaagaacaaggctgacaagccactgtccatacaccctcaaggcattcggtattctaagctctccgaaggtgcaagctacttggaccacacctttcccgccgaaaagatggacgatgcagtggcgccagggagggagtacacctacgagtggtccatctccgaagactcaggaccaacccacgacgaccccccctgcctgactcacatctattatagccacgagaacctcatcgaagattttaacagcggcctcatcggacctcttctcatctgcaagaagggcactctcacagagggcgggactcaaaaaaccttcgacaagcagattgttctgctcttcgcagtcttcgatgagtccaagtcttggtcccaaagcagtagcctgatgtacactgtgaatgggtatgtgaacggaaccatgccagacatcacagtgtgcgcacacgaccacatatcatggcatctgctgggaatgagttcagggccagaactgtttagcatccacttcaacggccaggtgctcgagcagaatcatcataaggtgtctgccatcaccttggtgtctgccacgtccaccacagcgaatatgacggtcggcccggaaggaaagtggatcatctccagtctgacaccaaaacacttgcaggccgggatgcaggcctacatcgacattaaaaactgcccaaagaagacccgcaacctcaaaaaaataaccagggagcaaaggagacatatgaaaagatgggaatatttcatcgcagcagaggaagttatctgggattacgcccctgtcatacccgctaacatggataaaaaataccgatcacagcacttggataatttctctaaccaaattgggaagcattacaagaaagtcatgtatacgcaatacgaggatgaatcttttaccaaacatactgtgaaccccaacatgaaagaggatggcatactcggccccattatcagagcccaagtcagggataccctgaagatcgtctttaaaaacatggctagcagaccttactctatctacccacacggcgtaacatttagcccatacgaagatgaggtgaatagctccttcaccagcggaagaaacaacacaatgattagagccgttcagccgggggagacatatacatacaaatggaatatcctcgaattcgacgagccaacagagaatgacgctcagtgtcttacacgcccttactacagcgacgtggatattatgagagacatcgctagtgggctcattggcctgctgctgatttgcaagtctcggagcctggataggcggggtatccagagggcagcagacatcgagcagcaggccgtcttcgcagtctttgacgagaacaagtcatggtatctcgaagacaatatcaacaagttctgcgaaaacccggatgaggtcaaacgcgacgaccctaagttctacgagtcaaacatcatgtctaccattaacgggtacgtccctgagagcatcaccaccctcggcttctgcttcgacgatacagtgcaatggcacttctgttctgtgggcacccaaaatgaaattctcacaatccacttcaccggacacagtttcatctatggtaaacggcacgaagacactctcacgctcttcccaatgcggggcgagtcagttaccgtgactatggacaacgtgggcacgtggatgctgacaagtatgaacagcagcccacgctccaaaaaacttagattgaaattccgcgacgtcaagtgtattcccgatgacgacgaggattcctacgagatttttgaaccaccagagtccacagtaatggctacacgcaagatgcacgataggctggagcctgaggacgaggaaagtgatgccgattacgactaccagaatcgcctggcggctgctctcgggatacggtcattcaggaactcatctcttaaccaggaggaggaggagttcaatttgacggcccttgcattggagaatggcacagagtttgtgtcaagcaacacagacatcatagtcgggtccaattattcaagcccaagtaacatttctaagtttacggtgaacaacctggcggagcctcaaaaggctccctcccaccaacaggctaccacagctggcagtccccttagacatctcatcggaaagaactcagtgttgaactcttcaacagctgagcatagtagcccttacagcgaagacccaatcgaggacccactccaaccagacgtgaccggtatcaggctgctgtccctgggggctggagaattcaaatcacaagaacacgccaagcataagggtccgaaggtggagcgcgatcaggccgctaagcatcggttctcctggatgaaactcttggcccacaaagtcggacggcacttgagtcaggacacgggctctccatcaggaatgagaccatgggaagatctgccctcccaagacactggttctcccagtaggatgagaccttggaaggatcccccatctgatctcctgctccttaagcagtctaattcctctaagatcctggtcgggagatggcatctggcgagcgagaagggcagttatgaaattatacaagatactgacgaggataccgccgttaataattggctgatttctccccaaaacgccagcagagcatggggagagtcaacccctctcgccaacaagcctggcaagcagtcaggccatcctaaattccctcgggtgcgccacaagagccttcaagtgcgccaagacggaggaaagtcacgactgaaaaaatcccaatttctgataaagactcgaaagaagaagaaagagaagcacactcatcacgcgcctctgtcacctagaacattccaccctctgaggtctgaagcctacaacacttttagcgagcggagattgaaacacagcctggtgcttcacaagtccaatgagacttcccttcccactgatctcaaccagactctgccatcaatggacttcggatggatcgcctctttgcccgaccataaccagaacagctctaacgatacgggacaggccagttgtcccccgggcctgtatcagacagtgcctcctgaggagcattatcagactttcccaattcaagaccctgatcagatgcacagcactagcgacccatcacatagatcttcttctcccgagttgtcagaaatgctcgaatacgacaggtcccacaaaagctttcctactgacatcagccaaatgtccccctccagcgagcatgaggtctggcagacagttatcagccccgatttgtcccaggtgaccttgagtcctgagctgtcacaaacgaacctttctcccgacctctcacacacaaccctttctcccgagctcatccagagaaaccttagtccagccctgggccagatgccaatttcccctgatctgagtcacactacactgagcccagaccttagtcacaccacgctgagcctggatcttagccagacaaatctgtcacccgagctgtcccagaccaatctgtctcccgctttgggccagatgcccttgagtcctgatctgagccacactacattgagtttggactttagtcagaccaacttgtcaccggagctgtcacacatgactttgagcccagaacttagtcagaccaatctcagtcctgcccttgggcagatgccaatctccccggatttgtcccatactacactgagcctggatttctcacaaactaacctgagtcctgagctttcacaaaccaatctgagtccagcactgggacaaatgcctctgtcacccgatccgtcccacaccactctgtctcttgatctgagccaaacaaacttgtcacctgaactctctcaaactaacctcagtcccgacctgtctgagatgccacttttcgctgatctgtctcagatccctctcactccggacctggatcaaatgacactcagcccggaccttggggaaactgatctttcaccgaattttggacaaatgtccttgtcccctgatctttcccaggtcaccctctctcctgatatctcagacacaacgctgttgcctgacctctcccagatctccccgcccccagatctcgatcagattttctatccgtctgaatcatcccagagcctgctgctgcaggagtttaatgaaagttttccatacccagaccttgggcagatgccatctcctagtagccccacccttaatgacacttttctgtccaaagagttcaaccctctggttatagtaggactgagcaaggacggcaccgactatatagaaataatccccaaagaggaagtgcagtctagcgaagatgactacgcagaaatcgactatgtgccgtatgatgacccgtacaagaccgacgtacgcaccaatataaactcatcaagagaccccgataatattgcagcatggtatctcaggagtaataatggcaacaggcgaaactactacattgcggctgaagaaataagttgggactatagtgagtttgtgcaacgagaaacagacatagaggattctgatgatattcccgaggatacaacttacaaaaaggtcgtctttcggaaatatctcgactccactttcacaaagcgggacccacgcggcgagtacgaggagcatctgggaatcctcggaccaattatccgggccgaggtggatgatgtgatccaagttcggttcaagaaccttgccagccggccctactccctgcatgctcacggattgtcttacgagaaaagcagtgagggaaagacatacgaggatgactctcccgaatggttcaaagaggacaacgccgtccagcctaacagctcctacacttatgtttggcacgcaaccgagcggtctggcccggaaagtcccgggagcgcttgcagggcctgggcctactactctgctgtgaaccccgagaaagacattcactcaggactgatcgggccactgctcatttgccagaagggcatacttcataaggattctaatatgcctatggatatgcgcgaatttgtgttgttgttcatgacgtttgatgagaaaaaatcctggtattatgaaaaaaagagcagatcctcttggcgcctgacctccagcgagatgaaaaagagtcacgagtttcacgccattaatggcatgatctacagtttgccagggcttaaaatgtatgagcaggagtgggttaggctgcacctcctgaatatcggtggctcccaggatatccatgtggttcatttccacggtcaaacccttctcgaaaatggcaataaacagcaccagctcggggtctggccccttcttcctgggagttttaaaacactggagatgaaggcttcaaagccaggatggtggctccttaacacggaggtgggtgagaaccagcgcgccggcatgcagacaccttttctgatcatggatcgggactgtcgaatgcctatgggactcagtaccggcattattagcgacagtcagattaaagcttctgagttcctgggatactgggaacccaggctcgccaggctgaacaatgggggcagctataatgcctggagcgtcgagaaactggcagctgaatttgctagtaagccgtggatccaggtcgatatgcagaaggaagtgatcatcacgggcatccagacacagggggccaagcactacctcaaaagctgctataccacggaattttacgtggcctactcatccaaccagatcaactggcagattttcaagggtaatagcacaaggaacgttatgtacttcaacggaaactctgacgcgtctacgatcaaggagaatcagtttgaccctcccatagtcgcacgctacatcaggatcagccctacacgagcttacaatcggccaacgctcaggctggagctgcaaggttgtgaggtgaacggctgctctacccctctgggtatggagaacggtaagattgaaaacaaacagatcacagcctcctcattcaaaaaatcttggtggggcgattactgggagccattcagggctcgactgaacgcccagggacgagtgaacgcctggcaggcaaaagctaataacaataaacagtggcttgagatcgacttgcttaagattaaaaagattacagctatcataacccaggggtgtaagagcctcagctctgagatgtacgtcaagtcctatactatccactactccgagcagggtgtcgagtggaaaccatacaggctgaaatccagcatggtggataaaatctttgagggtaatacgaacacaaaaggtcatgttaaaaatttttttaatcctccgattattagtaggtttatcagagttatccctaagacatggaaccagagcatcgccttgcggctcgagctctttgggtgcgatatctac

SEQ ID NO: 2281 - DNA, 6672 bp, Artificial Sequence
  derived and/or modified sequence
atgtttcctgggtgtcctcggttatgggttctggtggtcctcggcacctcttgggtgggctggggtagccagggtaccgaagctgcacaacttcgccagttttatgttgccgctcaaggtatctcctggtcatacagacctgaaccaacaaattcatcacttaacctgtctgtcacaagcttcaaaaagatcgtgtatcgagagtacgaaccgtactttaaaaaagagaagcctcagtctaccatctcagggttattgggccctaccctgtacgcggaggtaggggatatcatcaaagtccactttaagaacaaggctgataaacctctcagtatccatccccaaggtatcagatacagcaagttatctgaaggcgcaagttatttagaccacacattccccgccgagaaaatggatgacgccgtggcccctggtagggagtacacctacgagtggagcatttctgaagacagtggcccaacacatgacgatcccccatgcttgacccatatctattactcccatgaaaacttgatcgaagactttaacagtggattgatcgggcccctgctgatctgcaagaagggcaccctgactgagggtggcactcaaaaaactttcgacaaacaaatagtgctgctcttcgctgtgttcgacgagagtaagagctggagtcagtcaagcagccttatgtacacagtgaacggatacgtgaacggcaccatgcccgacattacagtgtgcgcacacgatcatatatcatggcatcttctgggtatgtcgtcaggccctgaactgtttagtattcactttaatggacaggttttagagcaaaaccaccataaagtgtctgccattaccctggtttctgctacttcaactacagctaacatgaccgtagggcctgaggggaagtggatcataagcagtctgacccccaagcacctgcaggctggaatgcaggcttacatagatattaaaaactgtcctaagaaaacaagaaacctgaagaagatcacccgcgagcagcggagacacatgaagagatgggagtacttcattgcggcagaagaggtgatctgggactatgcccctgtgattccggcgaacatggacaagaagtacagaagccaacaccttgacaattttagcaaccagatcggcaaacattataaaaaggtgatgtatacccagtacgaagatgagagtttcacaaaacacactgtcaatcccaacatgaaagaggatggcatcctgggaccaatcatccgtgcacaggttagagacacactgaagattgtctttaaaaacatggctagccgcccatacagcatctaccctcacggcgtcacatttagcccatacgaggacgaggtgaactcttcctttaccagcgggaggaataacacaatgatccgcgctgttcaaccaggtgagacctacacctataagtggaacattctggagttcgacgaaccaacagagaacgacgctcagtgtttgacaaggccatactacagcgacgttgatataatgagggacattgcaagtggcttgattgggctcctgctgatctgtaaatccagaagcctcgacaggaggggcatccagagagccgcggatatcgaacagcaggctgtcttcgccgtctttgatgaaaataagtcatggtaccttgaagataacataaacaaattttgtgaaaaccctgacgaagtgaaacgcgatgatcccaagttctacgaatcaaacattatgagcaccattaatggttacgttccagaaagcattactacactgggcttttgtttcgacgataccgtgcaatggcacttctgctccgtgggtacccagaatgaaatcttgacaatacattttactgggcacagcttcatttatggaaaaaggcatgaagataccctgaccctttttcccatgaggggagagtcagttacagtcaccatggataacgttggaacctggatgttgacatctatgaacagctcgccgcgatcgaagaagcttcgcctcaaatttagggacgttaagtgtatcccagacgacgatgaagattcttacgaaatcttcgagccacctgagtccacagtgatggctaccagaaagatgcatgatcggcttgagccggaggatgaagagtccgatgccgattatgactatcagaacaggctggccgccgccttgggaatccgctcatttcggaactcaagccttaaccaagaggaggaggagtttaacttgaccgctttggctctggagaatggcaccgaattcgtctctagcaataccgatattatagtcggatctaactacagctctccctccaatataagtaagtttaccgtgaacaacttggccgagcctcagaaggcccccagccatcagcaagccaccaccgccggttcaccactgcgacacctgataggtaagaacagtgtgcttaatagctcgacggccgaacacagcagcccctactcagaagatccaatcgaagatcccctccaaccagacgtgaccggcatacgccttcttagcctgggagctggcgaattcaagtcgcaagagcacgctaagcataagggacccaaggtggagagggatcaggccgcaaagcataggttcagctggatgaagctgctggcacataaggtcggaaggcacctgagtcaagatacaggcagcccgagcggaatgagaccctgggaagatttgcccagccaggacaccggatctccatcacggatgagaccctggaaagaccccccatcagatctgcttctgctgaagcagagcaactcctctaaaatcctcgttggccgctggcacttggccagtgagaagggaagctacgaaatcatccaagacacagatgaggacaccgcagtcaacaattggctgatctctcctcagaacgcttcacgcgcctggggagagtctacccccctggctaacaagcccggcaagcaatccggacatccgaaattcccccgagtgaggcataaaagcttgcaggtgaggcaagatggcggcaaaagcaggttgaaaaagagtcaattcctcatcaaaacccggaagaagaaaaaggaaaaacatacccatcacgcaccactgtctccgagaactttccatcctttgagatctgaggcttacaacacattcagcgaacgcaggttgaaacactctttggtgctgcataagtcaaatgagaccagtctgcccaccgaccttaaccagacgctcccctctatggattttggctggatagcaagcctgccagatcataaccaaaactccagcaacgatacaggacaggcaagttgcccgcctggcctctatcaaacagtgcctccagaggaacactaccaaacttttcccatccaggaccctgaccaaatgcacagcacaagtgacccatcccacaggagcagcagtcctgagctttccgagatgctcgagtacgatagatcgcataagagctttcccactgacatcagtcagatgtccccatcttctgaacatgaagtttggcagacagtgatatctcctgatttgagtcaggtcacactgtctcccgaactgagtcaaaccaatttgagtcccgatctttcccacaccactctgtctcccgagttgattcaaaggaacctcagcccagcactgggacagatgcctatcagtccagacctgagtcacacaacactcagccctgacctcagccacaccaccctttcacttgatctgtcacagacaaacctgagtccggagttgtctcagactaacctgtctcccgctctgggacaaatgcccctgtctcctgacctgtcacacaccacactgagtctcgacttcagccaaaccaacctttctcctgagctgtcacatatgaccttgtcccccgaattgtctcagaccaacctgtctcctgctctgggtcagatgcccatctctccagatctgtcccacacaacactgagcctggatttctcacaaactaacctgagccccgaattgtcacagacaaacctaagcccggccctgggacagatgcctcttagccctgatcctagccacactacattgtcacttgacctgagccaaacaaacctttcccccgagctctcacaaacaaacctgagtcctgatctgtctgagatgccccttttcgctgacctttctcaaattccacttacaccagacctggaccagatgactctgtcccccgacctcggcgagactgacctgtcaccaaacttcggccagatgagcctgagccccgatttaagtcaggttacgctctctccagatattagtgacacaacacttctgccagacctgagccagatctctccccctccagatctggatcaaatattctacccatcagagagctcccaatctttgctgctccaagagtttaacgaaagctttccgtaccctgatctgggacagatgccatctccttcaagtcctactctgaatgacacttttctctctaaggagtttaacccacttgtgatagtcggcctttccaaggatggtacagattacatcgaaattatccctaaagaagaagtgcaaagttctgaggacgactacgctgagattgactacgtcccttacgacgatccttataaaaccgacgtgcgcactaacataaactcatcaagagacccagataacatagctgcatggtaccttaggtctaacaatggcaacagacgcaactattacattgctgcagaagagattagttgggactatagtgaattcgttcaaagagaaactgacatcgaagactccgacgatatacctgaggacactacctacaaaaaggtcgtcttcaggaaatacctggactcaacatttaccaagagagaccctagaggggaatacgaagaacacctggggatcctggggcccatcatcagagccgaggtggacgatgtcatacaggtgagatttaaaaacctggcttctaggccttacagcctgcatgcccacggcctgagctatgaaaagagctcagagggaaagacatacgaggacgacagccctgagtggttcaaagaagacaacgccgtccagcctaactcaagttacacttatgtctggcatgctacagaaaggtcgggtcccgaaagcccagggagtgcatgtcgggcatgggcatactattctgccgtgaatccggagaaggacattcactctggcctgataggacctctgttaatatgtcagaagggaattcttcataaggattcaaatatgccaatggatatgcgcgaattcgtacttctctttatgaccttcgacgaaaagaaatcttggtactacgagaaaaaaagccgatctagctggaggctgacatcaagcgaaatgaaaaaaagccatgaattccatgcgatcaatggcatgatctacagcctgccaggtctgaagatgtacgaacaggaatgggttaggttgcatctcctcaacatcgggggctcgcaggatattcacgtcgtacactttcatggccagaccctcctggaaaacggtaacaaacaacaccaattgggcgtgtggccactgcttcccggctctttcaagactcttgaaatgaaagcaagcaagccagggtggtggcttcttaacaccgaggtgggagaaaaccaaagagcaggcatgcagacacctttccttattatggaccgcgactgcaggatgcctatgggactgtccactgggatcatttcagactctcagattaaggccagcgaatttctggggtactgggaaccccgtttggccagattgaataatggcggcagctacaacgcttggtctgtcgagaaactcgcagctgaatttgcatcgaagccctggatccaagttgacatgcaaaaggaagtcataatcacaggcatccagacacagggtgccaagcactacctgaaaagctgctataccaccgaattctacgtggcctacagtagcaaccaaatcaactggcaaatttttaaaggaaattcaaccaggaacgtcatgtattttaacggcaacagcgacgctagtacaatcaaggagaaccagtttgatcctcccatcgtagcccggtacatcaggatctcaccgactcgagcatacaacaggccaacccttagattagaattgcaggggtgtgaagtgaacggctgcagcacaccccttggtatggagaacggcaagatcgaaaacaagcagattaccgcatcctcttttaaaaagagctggtggggcgactactgggaaccttttcgggcacgtttgaacgcgcagggaagggtaaatgcttggcaggccaaggctaacaataataaacaatggcttgaaatcgatctgctaaagatcaagaaaattacagcaatcatcacgcagggctgcaagagccttagctccgaaatgtacgtgaaaagctacaccatacactacagcgagcagggtgttgagtggaaaccctatcggctgaagagcagcatggtggataaaattttcgaggggaacaccaatacaaagggacacgttaaaaatttttttaatcctccgatcatatcacgtttcatcagggtcatcccaaaaacttggaaccagagcattgctctgagacttgaactgttcggatgcgacatttat

SEQ ID NO: 2282 - DNA, 6672 bp, Artificial Sequence
  derived and/or modified sequence
atgtttcccggctgcccaaggctgtgggtgctggtggtccttgggacttcttgggtcggctgggggagtcagggcacggaggcagcgcagctgcgacagttttacgtcgccgcacagggtataagttggtcttaccggccagagcccacgaactcctcacttaatctttccgtgactagcttcaagaaaattgtatatagagagtacgagccatacttcaagaaagagaaaccccagtcaaccatttctggtttgctgggaccaactctctatgcagaggtgggggacattatcaaagtccactttaaaaacaaggcagacaaaccattgagcatccacccacaggggattcggtattccaaactttccgagggagcctcctatcttgaccacaccttcccggccgagaaaatggacgacgcagtggcacccgggcgcgagtatacatacgagtggtcgataagtgaggattccggacctactcatgacgaccccccttgtctcacgcacatctactactcccacgaaaatctgattgaggacttcaacagcggcctcatcggtcctctgctgatctgtaagaagggaaccctcacagagggcgggacacagaagacctttgataagcagatcgtcctgctttttgcggttttcgatgagtccaagagctggtctcagagttcctctctgatgtacacagttaacgggtacgtgaacggtactatgccggatatcacagtctgcgcccatgatcacatttcttggcatcttcttggaatgtctagcgggcctgagctatttagtatccatttcaacgggcaggttcttgagcagaatcaccataaggtgtccgcaataaccctggtgtccgctaccagtaccacggctaacatgacagtggggccagaaggtaaatggatcatttcttccctgacgcccaagcaccttcaagccgggatgcaggcatacatcgatattaagaactgccctaagaaaactcgtaatttaaagaagattaccagggaacagcgacggcacatgaaacggtgggagtactttatagcagcagaagaggtgatatgggattacgctccagttatacccgctaatatggacaagaagtacagatctcagcacctcgacaatttctccaaccaaatagggaaacattataaaaaagtaatgtatacacaatacgaagatgagtcctttacaaagcacaccgtcaatcccaatatgaaggaagacggcatactgggtccaataattcgggcacaagtgagagatacccttaagattgtcttcaagaatatggcctcccggccctatagcatatacccacatggagtgacctttagtccttatgaggatgaggttaatagctccttcaccagcgggcgaaacaacaccatgatccgggcagtacagcccggggaaacgtacacgtacaaatggaacatattagagttcgatgaacccaccgaaaatgacgcccagtgtttgaccaggccttactactccgatgtagacatcatgcgtgacatcgcaagcggcctcattgggctccttcttatctgcaaatcacgaagcttagaccgtcgagggattcaaagagccgctgacattgagcagcaagcagttttcgctgtttttgatgaaaataaaagttggtacctggaggacaatattaacaaattctgcgaaaatcccgacgaagtcaagcgcgacgatccaaagttttatgaatctaatatcatgtccacgattaatggctatgttccggaatctataacaactctgggattctgctttgatgacacagtacagtggcatttctgttctgtggggacccagaacgagatcttgactattcatttcacgggccactcttttatctatggcaaaaggcatgaagacacattgactctgtttccaatgaggggcgagagcgtgacagtgaccatggataacgtgggtacctggatgctaactagtatgaattcgtcaccgcggagtaagaagctacggctgaaatttagagacgttaaatgcatccctgacgacgacgaggattcatacgaaatcttcgagccacctgagtccactgtaatggcaacccggaagatgcacgacaggctcgagcccgaggatgaggaatctgacgcagattacgattaccagaacagactggctgccgcactgggtattcgtagctttaggaactcttcgttgaatcaggaggaagaggagttcaacctcactgctcttgctttggaaaatggcactgaatttgtgtcatccaacaccgatataatcgttggatcaaactacagttcaccctctaacatctccaaatttaccgtcaataacctggccgagccacagaaggcacctagccaccagcaggccaccaccgcggggtctcctctccggcatctgattggaaagaattccgttctgaactcctccactgccgaacactcatcaccgtacagcgaagatccaattgaagaccctctgcaaccggatgttacaggaattagacttctgtctcttggcgctggtgagttcaagtcacaggagcatgccaagcacaagggccctaaagtggagcgagaccaggcggccaaacatcgattttcatggatgaagttgctcgcccacaaggtcggtcgacacctgagtcaagacacaggttctccctctgggatgaggccctgggaagatttgccatcacaagacaccggcagcccttcaaggatgcgaccctggaaagacccaccttcggacctgctcctcctgaaacagtcaaattctagcaagattctagtaggtcggtggcacctagctagtgagaagggtagctatgagataatccaggatacagacgaagacaccgctgtgaataactggcttatctccccacaaaatgcctcacgcgcatggggggaaagtactcctttagcaaacaagcctggaaaacagagcggacaccccaagttcccacgggtaagacataaatctttgcaagtgagacaggatggggggaaatcccgactgaagaagtctcaatttctgattaagacaagaaagaaaaaaaaggagaagcacactcatcacgcaccattgtcaccaaggaccttccatcctcttagaagcgaggcatacaacaccttcagtgagagacgtctgaagcattcactggtgctgcataagtctaatgagacatccctccccaccgatctcaaccaaaccctgcctagtatggattttgggtggatcgcgagcctgcccgaccataatcaaaactcatcaaacgacacgggccaggcctcatgcccacctgggctctaccagaccgtgcctccggaggagcactaccagacgtttcctatccaggacccggaccagatgcacagcacaagcgatccatctcaccgatcctcctcccccgaattgtcggaaatgctggagtacgatagaagtcacaagtcatttccaacagatatttcacagatgtcaccttcctccgagcacgaagtgtggcagaccgtgatctctcccgatctttctcaagtgaccctcagcccggagctctcacagacaaacttgtcacctgacctatctcacactaccctcagcccagagctaattcagagaaatctttcccccgccctcggtcagatgccgatcagccctgatctgagtcacacaaccctatcacccgatctctcacataccaccctttcactcgatctgagtcagaccaatttgtcccccgaacttagccaaaccaacttgtcccctgcgctgggccaaatgcccctgtcacctgatctcagtcacacaacgctctcgctggacttctcccagaccaacttgtctccggagttatcgcacatgacactgtcccccgaactttcccaaactaatttgagcccagccctagggcagatgcctatatcccctgacttgtcccacactactctgtccctggacttctctcagaccaacctgtctccagaactatcccagactaacctgtccccggcactgggccagatgccattatcccccgacccaagtcacaccactctctccctggatctgtctcaaaccaacctcagccccgagctgagtcagacaaacctgagccccgacctgagtgagatgcctttgttcgccgacctgtcccagatccccctgacaccagatttggaccagatgaccctcagcccggacctgggggaaactgatctgtctccaaatttcgggcagatgtcacttagtccggacctgtcacaggttacattatcgcccgacatctctgataccactctgctgcctgacttatcacagatctcccccccccctgatctggatcagatcttttatccatcagagtcgagccagtcattgttgcttcaggagtttaacgagtcctttccttatccagacctggggcagatgcccagcccgagctccccaaccttaaacgatacattcctttctaaagaattcaatccactagtaatcgttggcctttccaaagatggtactgattacatcgaaatcattcctaaggaggaagtccagagttctgaggacgactatgcagaaatcgactatgtcccttatgatgacccgtacaaaactgatgtccgcaccaacatcaacagttccagagatccagacaacatcgctgcttggtacctccggtcaaacaacggaaaccgtaggaactactacatcgcggcggaagagatcagttgggattatagtgagttcgtgcagcgagaaacagacatcgaggattccgacgacatacctgaggatactacatacaaaaaggtcgtgtttaggaagtacctcgattcaaccttcacaaaaagggacccccggggtgagtacgaggaacacctgggcatattaggccctatcatccgggctgaagtagacgatgtgatccaggttcgattcaaaaatctagcgtctaggccttatagtcttcacgctcacgggttgagttacgagaagtctagcgaaggcaaaacgtacgaggatgacagccccgagtggttcaaggaagacaatgccgtgcagcccaattcgtcatacacgtacgtctggcatgctactgagcgatccggccctgaaagccccggtagtgcctgtagggcctgggcgtattacagcgcagtaaaccctgagaaagatatacattcaggcctcattggcccactgttaatttgccaaaagggaatcctgcataaagatagtaacatgcccatggatatgagggaattcgtcttgctgttcatgacctttgatgagaagaaaagttggtactacgagaaaaaaagccgatctagctggcgactcacatcgagcgagatgaaaaagtcgcacgagttccacgctatcaacggcatgatctactctttgcccggactgaagatgtacgaacaagagtgggtcaggctgcacctgctcaacattgggggttcccaggatattcatgtggtgcacttccacggccagacattacttgagaatggcaacaaacagcaccagctcggggtatggccattacttcccggtagcttcaagaccttggagatgaaggcctccaaacctggatggtggctgctgaacacagaggtgggagaaaaccagcgcgccggtatgcagactccctttctgattatggaccgagattgtcgcatgcccatgggactcagcacaggcatcatcagcgattcccaaatcaaggccagtgagtttctcgggtactgggagccccgcttggctcgtttaaacaatggcgggtcttacaacgcttggagcgttgagaagcttgctgccgagttcgccagtaaaccttggatacaggtagacatgcagaaggaagtaatcatcactggtatccagacgcagggagccaagcactatctcaaaagttgctacactaccgaattttatgtggcctactcaagtaaccaaatcaattggcagatcttcaaaggtaacagcacccgtaatgtgatgtatttcaacggcaattctgatgcatcaactatcaaggaaaatcagttcgacccaccaattgtcgcacggtatattagaatttcacctacaagagcttacaaccggcccacgctgcgactggagctccaaggttgcgaagtgaacggctgttctacaccactgggaatggaaaatggtaagattgaaaataaacagattacagctagcagctttaaaaagagctggtggggcgattattgggagcccttccgggccaggcttaacgcccaagggcgggtcaatgcctggcaagccaaggctaataacaataagcagtggttggagatcgacctactcaaaattaaaaaaattaccgccatcatcacccagggttgtaaatcactgagttcggagatgtacgtgaaatcttacacaatccactattccgagcagggagtcgagtggaaaccctacagactgaagtcatcgatggtggacaagatatttgagggcaacactaataccaaaggacatgtgaagaacttctttaaccctccaattatttcacggttcatacgggtaatccccaagacctggaaccaatccatcgcgcttagacttgaactttttgggtgcgacatttat

SEQ ID NO: 2283 - DNA, 6672 bp, Artificial Sequence
  derived and/or modified sequence
atgtttcctggatgcccccggctgtgggtgttggtcgtcctcggaacctcatgggtcggctggggatcacaaggtactgaggcagcccaacttagacaattctatgtcgcagcccaagggatctcgtggagctatagacctgagcctactaattcatccctcaacctgtcggtgacctcctttaagaagatagtataccgcgaatacgagccgtacttcaagaaagaaaagccgcaatcgacgatctccggactgctgggcccgactctctacgcggaggtgggagacatcattaaggttcatttcaagaacaaggccgataaaccgctgtctatccatccgcagggaatccgctactccaaactcagcgagggtgcatcttacctcgaccatactttccctgcagagaaaatggacgacgcagtggccccgggacgcgaatacacttacgaatggtccatcagcgaagattcaggaccgacgcatgacgaccctccctgcctgactcacatctactacagccatgagaacctgatcgaggacttcaactcaggactcatcgggccgctgttgatctgcaagaagggtaccttgactgagggagggacccaaaagacctttgataaacaaatcgtgttgctgttcgcggtgtttgatgagtccaagagctggtcgcagagcagcagcctgatgtacaccgtgaacggatacgtcaacggaactatgcctgacattactgtgtgcgcccacgaccacatctcctggcacctcttgggaatgagctccgggcccgagttgttctcgatccatttcaacggacaagtcctcgagcagaaccaccataaagtgtccgccattaccctggtgtccgccacgtcgactaccgcaaacatgacggtcggaccagagggcaaatggatcatcagctcacttaccccgaaacatctccaggcgggcatgcaggcttatatcgatatcaaaaactgccccaagaaaacccgcaatctcaaaaagatcacccgggaacagcggcggcacatgaagagatgggaatactttatcgcggccgaggaagtcatctgggactacgcgccagtcattccagccaacatggataagaagtaccggtcgcaacatctggataacttctcgaatcagatcggcaagcactataagaaggtcatgtacacccaatatgaggatgagagctttaccaaacacactgtgaatcccaatatgaaagaggacggaatcctgggcccgatcatccgggcccaggtgcgggatactctgaagattgtgttcaagaacatggcatccagaccctattccatttacccacacggagtgactttttccccgtacgaagatgaggtcaattcgtccttcacctcagggcgcaataacaccatgatccgggccgtgcagccgggggagacttatacttacaagtggaacattcttgagttcgacgaacctactgagaatgacgctcaatgcctcacccggccgtactacagcgatgtggacattatgagagacatcgcgagcggactcatcggactgctgctgatctgcaagtcacgctcactggatcgccgcggaatccagcgcgcagccgatatcgagcaacaggcggtgttcgccgtattcgatgaaaacaagtcatggtacctggaggacaatatcaacaaattctgtgagaacccggacgaagtgaagagggacgacccaaagttctacgagtcgaacattatgagcaccatcaatgggtacgtgccggagtcgatcacgaccctcggcttctgcttcgacgacactgttcaatggcatttctgtagcgttggaacccagaatgagatcctgactatccacttcactggccactcgttcatctacggaaagcgccatgaagatacgctgaccctgttcccaatgcggggagaatccgtgaccgtgaccatggataatgtgggaacctggatgctgacctcaatgaattcctcgccgcggtcgaaaaagctgcgcctgaagttcagggatgtgaagtgtatcccggacgatgatgaagattcttacgagatcttcgaaccgccggagtcgaccgtgatggccacccgtaagatgcacgaccggctggaaccggaagatgaggagtcagacgccgactacgactaccagaataggctggcagccgctctggggatcagatccttccgtaactcctcgttgaaccaggaagaggaggaattcaacctgaccgcgctcgcgcttgaaaatggaaccgaattcgtgtcctccaacactgatatcatcgtgggctccaactactcctcaccctccaacatctcaaagtttaccgtgaacaatcttgcagaacctcaaaaagcgccgtcgcatcaacaggcgaccactgccggatcaccgctgcgacacctgattggcaaaaactcagtcttgaacagcagcaccgccgaacactcgtccccgtacagcgaagatccgatcgaggaccctctgcaaccagatgtgactggcatccgcctgctgtcgctgggcgccggggaattcaaatcccaggagcacgccaaacacaagggcccaaaagtcgagagggaccaggctgcaaagcaccggttctcctggatgaagctccttgcacataaggtcggacgccacctgtcccaggacactggatccccctccggaatgaggccttgggaggatctgccgtcccaagatactggttcaccgtctcgcatgcgcccatggaaagaccccccgtcagacctgctgcttctcaagcagagcaatagcagtaagatcctggtcggacggtggcacctggcctctgagaagggatcctatgaaatcatccaggatactgacgaggacaccgccgtgaacaattggctgatctcgccgcagaacgcatcacgcgcctggggcgaatcaacgccgcttgcgaataagccgggaaagcagtccgggcacccgaagttcccgcgcgtgcgccacaagtcgctccaggttaggcaggacggcggcaagagccgtctcaagaagtcccaattcctgatcaagaccaggaagaaaaagaaggagaagcatactcaccacgctccgctgtcgcctcggactttccaccccctgaggtcagaggcgtacaatactttttctgaacggcgcttgaagcacagcctggtcctgcacaaatcgaacgagacttcgcttccgaccgacctcaatcagaccctgccaagcatggatttcgggtggatcgcctcactcccagaccataaccagaattcctccaatgacaccggccaggcctcgtgtcccccgggattgtaccagaccgtcccgccggaagagcattaccaaaccttcccaattcaggacccagaccagatgcattcgacctcggacccgagccacaggtcctcatcgccggaactgtcagagatgctggagtacgaccggtcgcataagtcattcccgaccgatatctcgcagatgtcgccgtcatcggaacatgaagtgtggcagacggtgatcagtcccgacttgtcacaagtgaccctttcgccagagctttcacagacgaatcttagcccagatttgtcacacactacgctgagccctgaattgattcagcggaacctttctccggccctcggacagatgccgatctccccggatcttagccatactactctctcccctgacctcagccacactaccttgtctctggatttgagccagaccaacctgagcccagaactctcgcagactaacctttcccccgcgcttggtcaaatgcccctgagtccggacctttcgcacaccaccctctcgctggacttctcccagaccaacttgtcacctgagctctcgcacatgactctctcacccgagctgagtcagacgaatttgtctcccgcccttggacagatgcccatctcgccggacttgagccacaccaccctttcgttggatttctctcagacgaacttgtcgcctgaactctctcaaaccaatctgagccccgcactgggccaaatgccgctgtccccagatccctcgcataccactctgtcgctcgacctctcccagacgaacctgtcacctgaactgtcccagactaacctctcgccggacctgagcgagatgccgctgttcgcagacctcagccagattccactgacccccgacttggatcaaatgacgctgtctcctgacctgggagaaaccgatctgtccccgaactttggacagatgtccctgtccccggacctgtcacaggtcaccctgtcgccggacatctctgataccactctgctgcctgacctgtcacaaatctcgcctccaccggatctcgaccagatcttttacccatccgaatcctcacagagtctgcttctccaagaattcaacgaatcatttccgtacccagatctcggccagatgccttcgccatcgagcccaacgctgaatgacactttcctgagcaaggagttcaacccactcgtcatcgtgggactgtcgaaggatggaactgactacatcgagatcattcctaaggaggaagtccagagctcggaggacgactacgcagagattgattacgtcccttatgacgacccatacaagactgatgtccgcaccaacatcaactcgagccgcgacccggataacatcgctgcgtggtacctgcggtcgaacaacggcaaccgccgcaactactacatcgccgctgaagaaatctcctgggactactcagaattcgtgcaacgggaaactgatatcgaagatagcgatgacataccggaggacaccacctacaaaaaagttgtgttcaggaagtacctggattcgactttcaccaagcgggatccgcggggtgagtacgaggagcacctgggaatcttgggaccgatcatcagggctgaagtcgacgacgtgatccaggtccgctttaagaacctggctagccgaccgtactccctccatgcccacggactgagctacgaaaaaagctccgaaggaaaaacttacgaggacgattcgccagagtggttcaaagaggacaacgcggtgcagccgaactcgtcctacacttacgtctggcacgccactgaacgctcgggcccagaatcgccaggctctgcatgccgggcgtgggcttactactcagccgtcaatcctgaaaaggacattcactccggattgatcggcccgcttctcatttgccagaaaggcattctgcacaaagattcgaacatgccaatggacatgagagaattcgtgcttctcttcatgaccttcgatgagaagaagtcgtggtactacgaaaagaaatcgcggtcaagctggagactgacgtcctccgaaatgaagaagagccatgagttccatgcgattaatggaatgatctacagcttgccgggccttaagatgtacgaacaggaatgggtgagactgcacctgctcaacatcggtggatcccaggacatccacgtggtccacttccatggacagactctgctggagaatggaaacaagcagcaccagctgggagtctggccgctgctgccgggctcattcaagactctggaaatgaaggcgtccaagccaggatggtggctgctgaacactgaagtgggagagaaccagcgcgcgggtatgcaaactccgttcctgatcatggacagagattgccgcatgccgatgggactcagcactgggatcatctctgattcacaaatcaaggcgtcggaattcctgggctattgggagccgaggctggcgcggctgaataacggaggatcgtacaatgcatggtccgtggaaaagctggcagcggaattcgcttcgaagccgtggatccaggtcgacatgcaaaaagaagtcattatcactggaatccagacccagggcgcaaagcattacctgaaatcctgctacaccaccgaattctacgtggcatactcctcgaaccagatcaactggcaaatcttcaaagggaactcgactcggaatgtgatgtactttaacgggaactcggacgcgtccactatcaaggaaaaccagtttgacccgcctatcgtggcgaggtacatccgcatctcacctaccagagcgtacaaccggcccactctgcgactcgaactgcaaggatgcgaggtgaacggatgctccacccctctgggaatggaaaacggtaagattgagaacaaacaaatcactgcaagctccttcaagaaaagctggtggggagattactgggaaccgttcagggcccgacttaacgcgcaggggcgcgttaatgcgtggcaggcaaaggcaaataacaacaaacaatggttggagatcgacctgctgaagatcaagaaaatcaccgccatcatcactcaaggatgcaaaagcctgtcctcggagatgtacgtgaaatcgtacaccatccattattccgaacagggagtggagtggaagccgtaccgcctcaagagctcgatggttgacaaaatcttcgagggcaatactaacaccaagggccatgtcaagaactttttcaacccgccgatcatcagcaggttcatccgcgtgatccctaaaacttggaaccagtcgattgctctgcggctcgaactgttcggatgtgacatctat

SEQ ID NO: 2284 - DNA, 6672 bp, Artificial Sequence
  derived and/or modified sequence
atgtttccaggatgtccaagactctgggtgcttgtcgtgcttgggacctcatgggtgggctggggctcgcaggggaccgaggccgcccagcttcggcagttttacgtggcggcacagggaatttcatggtcgtacagaccggaaccaaccaacagctcgctgaacctctcggtgacctcgtttaagaaaattgtgtaccgtgaatacgaaccgtacttcaaaaaggagaaacctcaatcaaccattagcggcctgctgggacccaccctctacgcagaggtgggagatatcattaaagtgcatttcaagaataaggccgataaacctctcagcatccaccctcaaggcattcgctactccaagctgtccgaaggagcatcgtacctggatcatactttcccagcggaaaagatggacgacgccgtggccccgggccgcgaatacacctacgaatggtcgattagcgaagatagcggtcctacgcatgacgatccaccttgtctgacccatatctactactcacatgagaatttgatagaggacttcaattccggactgattggtcctctgctcatctgtaagaagggaactctgactgagggaggaacccaaaagacttttgataaacaaatcgtgctgctttttgccgtgtttgatgagtcgaaaagctggtcccaatcctcctcccttatgtacaccgtgaacggctacgtcaacggcaccatgccggatattactgtctgcgcacatgaccatataagctggcatctgctgggtatgtcatcgggacctgaactgttctctattcatttcaatggtcaggtgctcgaacaaaaccaccacaaggtttccgccattactctcgtgtcggcaacctcgactactgcaaatatgacggtgggacctgaagggaagtggattatctcgtcacttacgcccaagcacctgcaagccggtatgcaggcgtacattgacattaagaattgcccaaagaaaactagaaacctgaagaaaatcacgagagaacagagaaggcacatgaagagatgggaatacttcatagcagcggaagaagtgatttgggattacgcacctgtgataccagcaaacatggataagaagtatagatcccagcacttggacaacttttcgaatcaaattgggaagcactacaagaaggttatgtacacgcagtacgaagatgaatcatttacgaagcacaccgtgaacccaaatatgaaggaggacggaattcttggacctattatcagagcacaggtccgtgatactctgaaaatcgtctttaagaatatggcttcccgtccatacagcatttaccctcacggcgtgaccttttcaccatacgaagatgaggtcaattcatcgtttaccagcggtcgcaataacacgatgattagggccgtgcagcctggtgaaacctacacttacaagtggaacattctcgaatttgacgaaccaaccgaaaatgatgcacagtgtctgacccgtccatactacagcgacgtggatatcatgcgcgatatagcatcaggtttgattggacttcttcttatctgtaaatcacgctcgctggatagacggggaatccaaagggcagcagatatcgagcagcaagcagttttcgcagtattcgatgaaaacaagagctggtatttggaagataacatcaacaagttttgtgagaatcctgacgaggtcaagagagacgatccaaagttttacgaatcaaacattatgagtacgataaatggttacgtgccggaaagcattaccaccctgggtttctgcttcgatgacactgttcagtggcatttttgctccgtcggcacccaaaatgaaatccttaccattcactttactggccattcgtttatctacgggaagcgccatgaggataccctcaccctctttccgatgagaggtgaatcggtcactgtgaccatggacaacgtggggacttggatgctgacttcgatgaactcttcgccaagatcaaagaaactcagactgaaattcagagacgtgaagtgcatcccagacgatgatgaagatagctacgagatattcgaacccccagaatccacggtgatggcgactaggaagatgcacgacagacttgaacctgaagatgaggagtccgacgctgactacgactaccagaatagactggcagcagcactgggcatccggagcttccggaactcctcgctgaatcaggaagaagaagaattcaatctcacggcccttgcgttggaaaacgggacggaattcgtctcctcgaataccgacattattgtcgggtccaattacagcagcccatcgaacattagcaaattcactgtgaacaacctggcagaacctcagaaagcaccctcacatcagcaggccactaccgcggggtcccctcttagacacctcatcggaaaaaactccgtgctgaactcgtccactgccgagcatagctccccatactccgaggatcctatagaagatccccttcagccagatgtgactggtatccgacttttgtccttgggggcaggcgaattcaaatcccaagaacatgcaaagcataagggtccaaaggtggaaagggaccaggctgcaaagcatcgtttctcgtggatgaagttgctcgcccataaggtgggtcggcatctgtcccaagatactggctccccttccggaatgcggccatgggaggacctcccatcccaagacactggatccccgtcccggatgcgaccctggaaggacccaccttctgacttgctgcttcttaagcaatccaattcctccaaaatcctcgtgggtagatggcaccttgcatcagaaaagggaagctacgagatcatccaggatactgacgaagatacggcagtcaacaactggcttatttctccccaaaatgcgtcgcgtgcttggggggaaagcactccgctggcaaacaagccaggcaagcagtcgggacaccctaagtttccgagggtgaggcacaagagcctgcaagtgcgtcaggatggaggtaaaagcaggttgaagaaatcgcagttcctgatcaagactagaaaaaagaagaaggaaaagcatacccaccacgcaccattgagtcctcggacctttcatccactgaggtcggaagcatacaacacctttagtgaacggcgactgaagcactcactggttctgcacaaatcaaatgaaacctcgctgcctaccgatctcaatcaaaccttgccttccatggacttcggctggatcgcatcactgcctgatcacaatcaaaattcgagcaatgatactggtcaagcctcgtgcccacctggcctctaccagactgtcccacctgaagaacattaccagacttttcctattcaagacccagaccaaatgcatagcactagcgatccatcgcaccgttcctcttcacctgagctgtccgaaatgcttgaatacgaccgaagccataagagctttcctactgatatctcgcaaatgtcgccctcctccgaacatgaagtgtggcaaactgtgatttcccctgacctgtcacaagtgactcttagcccggaactctcgcaaaccaacctttcgccggatctgtcccacactaccctgtcaccagagctcattcagcgcaaccttagccctgcacttggtcaaatgcctatttccccagatctctcgcacaccaccctgtctcctgatctcagccacactacgctgtccctcgatctttctcaaactaacctgtcgcccgaactgtcccagactaacctgtcccctgcactgggtcaaatgcccctgtcgccagatcttagccataccactctttctcttgatttttcacaaaccaatctttcccctgaactctctcacatgactttgtcaccagaactctctcagacgaacttgtcgcctgctctcggccagatgccaatttccccagacctttcacataccaccctctcgctggatttttcgcagacgaatctgagtcctgaacttagtcaaacgaatctgtcgcccgctcttgggcagatgccgcttagccccgatccctcgcatactactctgtccctcgacctgagccagactaatctctcaccagaacttagccaaactaacttgtcaccggatctttccgagatgcctctgtttgcagatctgtcccaaatacccctcacgccagatctcgaccagatgactctgtcgcctgacctgggagaaactgaccttagcccaaacttcggtcaaatgtcactgtcgccggatctcagccaagtcaccttgtcgcccgacatatccgataccactcttcttccagatctttcgcagatttcccctccgcccgatcttgatcagatattctacccttccgaaagctcccagtcgctcctgcttcaggagtttaacgaatcattcccatatcccgatttgggtcagatgccctcgccaagcagccccaccctcaacgacacttttctgagcaaggagttcaatccactggtgatcgtgggcctttccaaggacggtaccgactacattgagattatccctaaggaagaagtgcagtcgtcagaggacgattacgcggaaatcgactacgtcccttacgatgatccttacaagacggatgtcagaactaacattaactcgtcgcgcgatcctgataacattgccgcatggtacctccggtcaaacaatggaaacagaagaaattactacatcgcagccgaggaaatctcctgggattactcggaatttgtgcaaagggaaaccgacattgaggatagcgatgatataccagaggataccacctacaaaaaggtcgtgtttcgaaagtacctggatagcacctttactaaacgggacccacggggtgaatacgaagaacacctgggtatactgggaccaatcatccgagcagaagtcgacgatgtgattcaagtgcggtttaagaacttggcctcacgaccatactccctgcacgcacatggactgtcgtacgagaaaagcagcgagggcaagacctacgaagatgatagccctgaatggtttaaggaggataacgcagtgcagccaaacagctcatacacctacgtctggcatgccactgagcgaagcggccccgaatccccaggatccgcatgccgcgcgtgggcctactacagcgcagtgaaccctgagaaggacattcattcgggacttattggcccattgcttatttgtcaaaagggtatcttgcataaggactctaacatgcccatggatatgcgagaatttgtgctcctgtttatgaccttcgacgaaaagaaatcctggtactacgagaaaaagtcgcggagttcgtggcgcctgaccagcagcgagatgaagaaaagccacgagtttcacgccatcaacggtatgatctacagtctgcccggtctgaagatgtacgaacaagaatgggtgcgtctgcatttgctgaatattggtggcagccaggacattcatgtggttcatttccacggacagaccctgcttgaaaacggtaataagcaacatcagctgggtgtgtggccacttctgcctggatcattcaagacgctggaaatgaaggcctcgaagcctggctggtggctgctgaataccgaagtcggggaaaatcaaagagccggcatgcaaactccttttctgatcatggatcgggattgtcggatgccaatgggattgagcactgggatcatttcagatagccaaatcaaggcatcagagtttttgggctattgggaaccaagactggcaaggctgaacaacggcggtagctacaatgcatggtcggtcgagaagctcgcagccgagtttgcttcgaaaccttggattcaagtggatatgcaaaaggaggtgatcataaccggaatccagacgcaaggtgcaaagcattacctcaagagctgttatacgactgagttttacgtcgcatactcgagcaatcagataaactggcagatcttcaagggaaactcaactaggaacgtgatgtactttaacggtaattccgatgccagcaccatcaaagagaaccagttcgaccctcctatcgtggccagatacattcgcatttcaccaaccagggcgtataatcggcccaccttgcgccttgagcttcaagggtgcgaagtcaacggatgcagcactcccctgggaatggaaaacggcaagattgagaacaagcagatcacggcatcgtcgtttaagaagagctggtggggtgactattgggagccgtttagagcgcgccttaacgcccaaggtcgggtcaacgcgtggcaggccaaggcaaacaacaacaagcaatggctggagattgatcttttgaaaatcaaaaagatcactgccattatcactcaggggtgtaagagcctttcctccgagatgtacgtcaaatcctacactatacattactcggaacaaggtgtcgagtggaagccatacagacttaagtcctccatggtggataagatctttgaaggcaacaccaataccaagggacatgtgaagaacttctttaacccaccaataatctcccgctttatcagagtgattcctaaaacttggaatcaatcgattgcgctgagactggaactctttggttgcgatatctac

SEQ ID NO: 2285 - DNA, 6672 bp, Artificial Sequence
  derived and/or modified sequence
atgtttccgggttgtccgcgtttatgggttttagttgtattaggtacgtcgtgggtaggttggggttcgcaaggtacggaagcggcgcaactacgtcaattttatgttgcggcgcaaggtatatcgtggtcgtatcgtccggaaccgacgaattcgtcgttaaatctatcggtaacgtcgtttaaaaaaatagtttatcgtgaatatgaaccgtattttaaaaaagaaaaaccgcaatcgacgatatcgggtttactaggtccgacgctatatgcggaagtaggtgatataataaaagtacattttaaaaataaagcggataaaccgctatcgatacatccgcaaggtatacgttattcgaaattatcggaaggtgcgtcgtatttagatcatacgtttccggcggaaaaaatggatgatgcggtagcgccgggtcgtgaatatacgtatgaatggtcgatatcggaagattcgggtccgacgcatgatgatccgccgtgtctaacgcatatatattattcgcatgaaaatctaatagaagattttaattcgggtttaataggtccgttactaatatgtaaaaaaggtacgttaacggaaggtggtacgcaaaaaacgtttgataaacaaatagtattattatttgcggtttttgatgaatcgaaatcgtggtcgcaatcgtcgtcgctaatgtatacggttaatggttatgtaaatggtacgatgccggatataacggtttgtgcgcatgatcatatatcgtggcatttactaggtatgtcgtcgggtccggaattattttcgatacattttaatggtcaagttctagaacaaaatcatcataaagtatcggcgataacgttagtttcggcgacgtcgacgacggcgaatatgacggttggtccggaaggtaaatggataatatcgtcgctaacgccgaaacatttacaagcgggtatgcaagcgtatatagatataaaaaattgtccgaaaaaaacgcgaaatttaaaaaaaataacgcgtgaacaacgacgtcatatgaaacgttgggaatattttatagcggcggaagaagttatatgggattatgcgccggtaataccggcgaatatggataaaaaatatcgttcgcaacatttagataatttttcgaatcaaataggtaaacattataaaaaagttatgtatacgcaatatgaagatgaatcgtttacgaaacatacggtaaatccgaatatgaaagaagatggtatactaggtccgataatacgtgcgcaagtacgtgatacgctaaaaatagtatttaaaaatatggcgtcgcgaccgtattcgatatatccgcatggtgtaacgttttcgccgtatgaagatgaagtaaattcgtcgtttacgtcgggtcgtaataatacgatgatacgagcggtacaaccgggtgaaacgtatacgtataaatggaatatattagaatttgatgaaccgacggaaaatgatgcgcaatgtctaacgcgaccgtattattcggatgttgatataatgcgagatatagcgtcgggtctaataggtctattactaatatgtaaatcgcgttcgttagatcgtcgaggtatacaacgagcggcggatatagaacaacaagcggtttttgcggtttttgatgaaaataaatcgtggtatttagaagataatataaataaattttgtgaaaatccggatgaagttaaacgtgatgatccgaaattttatgaatcgaatataatgtcgacgataaatggttatgtaccggaatcgataacgacgctaggtttttgttttgatgatacggtacaatggcatttttgttcggtaggtacgcaaaatgaaatactaacgatacattttacgggtcattcgtttatatatggtaaacgacatgaagatacgctaacgttatttccgatgcgtggtgaatcggttacggtaacgatggataatgtaggtacgtggatgctaacgtcgatgaattcgtcgccgcgttcgaaaaaattacgtctaaaatttcgtgatgtaaaatgtataccggatgatgatgaagattcgtatgaaatatttgaaccgccggaatcgacggtaatggcgacgcgaaaaatgcatgatcgactagaaccggaagatgaagaatcggatgcggattatgattatcaaaatcgtttagcggcggcgttaggtatacgttcgtttcgaaattcgtcgctaaatcaagaagaagaagaatttaatttaacggcgttagcgttagaaaatggtacggaatttgtatcgtcgaatacggatataatagtaggttcgaattattcgtcgccgtcgaatatatcgaaatttacggtaaataatttagcggaaccgcaaaaagcgccgtcgcatcaacaagcgacgacggcgggttcgccgctacgtcatctaataggtaaaaattcggtattaaattcgtcgacggcggaacattcgtcgccgtattcggaagatccgatagaagatccgctacaaccggatgtaacgggtatacgtctactatcgttaggtgcgggtgaatttaaatcgcaagaacatgcgaaacataaaggtccgaaagtagaacgagatcaagcggcgaaacatcgattttcgtggatgaaattattagcgcataaagtaggtcgtcatttatcgcaagatacgggttcgccgtcgggtatgcgtccgtgggaagatttaccgtcgcaagatacgggttcgccgtcgcgaatgcgaccgtggaaagatccgccgtcggatctactattactaaaacaatcgaattcgtcgaaaatattagtaggtcgatggcatctagcgtcggaaaaaggttcgtatgaaataatacaagatacggatgaagatacggcggtaaataattggctaatatcgccgcaaaatgcgtcgcgtgcgtggggtgaatcgacgccgctagcgaataaaccgggtaaacaatcgggtcatccgaaatttccgcgtgtacgacataaatcgttacaagttcgacaagatggtggtaaatcgcgattaaaaaaatcgcaatttttaataaaaacgcgaaaaaaaaaaaaagaaaaacatacgcatcatgcgccgttatcgccgcgaacgtttcatccgttacgttcggaagcgtataatacgttttcggaacgacgtctaaaacattcgctagttttacataaatcgaatgaaacgtcgctaccgacggatttaaatcaaacgctaccgtcgatggattttggttggatagcgtcgttaccggatcataatcaaaattcgtcgaatgatacgggtcaagcgtcgtgtccgccgggtttatatcaaacggttccgccggaagaacattatcaaacgtttccgatacaagatccggatcaaatgcattcgacgtcggatccgtcgcatcgatcgtcgtcgccggaattatcggaaatgctagaatatgatcgttcgcataaatcgtttccgacggatatatcgcaaatgtcgccgtcgtcggaacatgaagtatggcaaacggttatatcgccggatttatcgcaagttacgctatcgccggaactatcgcaaacgaatttatcgccggatctatcgcatacgacgctatcgccggaattaatacaacgaaatctatcgccggcgttaggtcaaatgccgatatcgccggatttatcgcatacgacgttatcgccggatctatcgcatacgacgttatcgctagatttatcgcaaacgaatttatcgccggaattatcgcaaacgaatctatcgccggcgttaggtcaaatgccgctatcgccggatttatcgcatacgacgttatcgctagatttttcgcaaacgaatttatcgccggaactatcgcatatgacgttatcgccggaactatcgcaaacgaatttatcgccggcgttaggtcaaatgccgatatcgccggatttatcgcatacgacgttatcgctagatttttcgcaaacgaatttatcgccggaactatcgcaaacgaatttatcgccggcgctaggtcaaatgccgttatcgccggatccgtcgcatacgacgttatcgctagatttatcgcaaacgaatctatcgccggaattatcgcaaacgaatttatcgccggatctatcggaaatgccgctatttgcggatctatcgcaaataccgttaacgccggatctagatcaaatgacgctatcgccggatttaggtgaaacggatttatcgccgaattttggtcaaatgtcgctatcgccggatttatcgcaagttacgttatcgccggatatatcggatacgacgctattaccggatttatcgcaaatatcgccgccgccggatttagatcaaatattttatccgtcggaatcgtcgcaatcgttactactacaagaatttaatgaatcgtttccgtatccggatttaggtcaaatgccgtcgccgtcgtcgccgacgttaaatgatacgtttctatcgaaagaatttaatccgttagttatagttggtctatcgaaagatggtacggattatatagaaataataccgaaagaagaagtacaatcgtcggaagatgattatgcggaaatagattatgttccgtatgatgatccgtataaaacggatgtacgaacgaatataaattcgtcgcgagatccggataatatagcggcgtggtatttacgttcgaataatggtaatcgacgtaattattatatagcggcggaagaaatatcgtgggattattcggaatttgttcaacgtgaaacggatatagaagattcggatgatataccggaagatacgacgtataaaaaagtagtttttcgaaaatatttagattcgacgtttacgaaacgtgatccgcgtggtgaatatgaagaacatttaggtatattaggtccgataatacgagcggaagtagatgatgttatacaagtacgttttaaaaatctagcgtcgcgaccgtattcgctacatgcgcatggtctatcgtatgaaaaatcgtcggaaggtaaaacgtatgaagatgattcgccggaatggtttaaagaagataatgcggtacaaccgaattcgtcgtatacgtatgtatggcatgcgacggaacgatcgggtccggaatcgccgggttcggcgtgtcgagcgtgggcgtattattcggcggtaaatccggaaaaagatatacattcgggtctaataggtccgttattaatatgtcaaaaaggtatattacataaagattcgaatatgccgatggatatgcgtgaatttgttctattatttatgacgtttgatgaaaaaaaatcgtggtattatgaaaaaaaatcgcgatcgtcgtggcgtttaacgtcgtcggaaatgaaaaaatcgcatgaatttcatgcgataaatggtatgatatattcgttaccgggtttaaaaatgtatgaacaagaatgggtacgtttacatctattaaatataggtggttcgcaagatatacatgtagttcattttcatggtcaaacgctactagaaaatggtaataaacaacatcaactaggtgtatggccgttactaccgggttcgtttaaaacgctagaaatgaaagcgtcgaaaccgggttggtggttattaaatacggaagtaggtgaaaatcaacgtgcgggtatgcaaacgccgtttctaataatggatcgagattgtcgtatgccgatgggtttatcgacgggtataatatcggattcgcaaataaaagcgtcggaatttctaggttattgggaaccgcgtctagcgcgtttaaataatggtggttcgtataatgcgtggtcggtagaaaaattagcggcggaatttgcgtcgaaaccgtggatacaagtagatatgcaaaaagaagtaataataacgggtatacaaacgcaaggtgcgaaacattatctaaaatcgtgttatacgacggaattttatgttgcgtattcgtcgaatcaaataaattggcaaatatttaaaggtaattcgacgcgtaatgtaatgtattttaatggtaattcggatgcgtcgacgataaaagaaaatcaatttgatccgccgatagtagcgcgatatatacgaatatcgccgacgcgagcgtataatcgtccgacgttacgtttagaactacaaggttgtgaagtaaatggttgttcgacgccgttaggtatggaaaatggtaaaatagaaaataaacaaataacggcgtcgtcgtttaaaaaatcgtggtggggtgattattgggaaccgtttcgtgcgcgtctaaatgcgcaaggtcgtgtaaatgcgtggcaagcgaaagcgaataataataaacaatggctagaaatagatctattaaaaataaaaaaaataacggcgataataacgcaaggttgtaaatcgttatcgtcggaaatgtatgttaaatcgtatacgatacattattcggaacaaggtgtagaatggaaaccgtatcgtttaaaatcgtcgatggtagataaaatatttgaaggtaatacgaatacgaaaggtcatgtaaaaaatttttttaatccgccgataatatcgcgttttatacgtgtaataccgaaaacgtggaatcaatcgatagcgttacgtttagaattatttggttgtgatatatat

SEQ ID NO: 2286 - DNA, 6672 bp, Artificial Sequence
  derived and/or modified sequence
atgtttcccggttgccccagactctgggttctagtggtgttgggaaccagctgggtgggatggggatcacagggaaccgaggccgcacagctgcgacaattctatgttgctgcccagggtatcagctggtcttaccgccccgagccaactaattcctcactcaacctttccgttacttcgttcaaaaagattgtgtatcgggagtatgagccgtacttcaaaaaggaaaaaccccaaagcaccataagcggccttctgggacccaccctgtacgccgaggtaggggacatcatcaaggtgcattttaaaaacaaagccgataaaccgttgtctatccatccccaggggatcagatacagtaagctctccgagggagctagttatcttgatcacacctttccagccgagaagatggatgatgccgtggcacccggccgcgagtacacatacgaatggtctatcagtgaggatagcggtccaacacatgacgatccaccttgcctaacacacatatactacagccacgagaacctcatcgaagactttaatagtgggctcatcgggcccctgctgatttgcaagaaaggaaccttaaccgagggggggacgcagaagactttcgacaaacagatcgtcctgctgtttgcagtctttgatgaatccaaaagttggtcacaatcaagtagtctgatgtatactgttaatggctatgtgaatgggacgatgccggatatcaccgtctgcgcccacgaccacatctcctggcacctgctgggaatgtccagcggccccgaactcttcagcatccattttaacggccaggtgctcgaacagaatcaccacaaggtgtccgccattaccttggtgagtgccactagcaccaccgctaatatgacggtgggccctgaggggaagtggattatttcttccttgacacccaagcaccttcaggcaggaatgcaggcctatattgacatcaagaactgcccaaaaaagaccaggaatttgaagaaaataacgagggaacaacgccgccacatgaagcggtgggaatacttcatcgcggctgaagaggtgatttgggactacgcccctgtcattcccgccaacatggacaagaaatatcgctctcagcatcttgacaacttttctaaccagattggcaagcactataaaaaggtaatgtacacccagtacgaggacgagtctttcactaaacacacagttaacccaaacatgaaggaggacggtatactcggccctatcatacgggcccaggttagggacactttaaaaatagtgtttaagaatatggcttcgcgcccatacagcatctacccgcacggggttaccttttctccctacgaggacgaggttaacagctcttttacctcagggcggaataacactatgattagggctgttcaacctggcgagacttacacctacaaatggaacattttggaatttgacgaaccaactgaaaatgacgcgcagtgccttacacgcccgtattacagtgacgtggatattatgcgggatatcgcgtccggcttgatcggcttgctgctgatttgtaaaagcaggagcctggataggcgcggaatccagagagccgccgacatcgaacagcaggctgtcttcgctgttttcgatgaaaataaatcctggtacttggaggacaacatcaataagttctgcgaaaaccctgacgaggtcaagcgggacgatcccaaattctatgagtcaaatattatgagcacaattaacggatacgttccagagtccattaccactcttggattctgtttcgatgacaccgtccagtggcatttctgctcagtgggtacacaaaacgaaatcctgaccattcactttacaggccacagctttatatatggtaaaaggcatgaagataccttgacgctctttcccatgcgaggggagtctgtgaccgttacaatggacaacgtcggtacatggatgctgacaagtatgaattcctctccacgcagcaagaagctgcgcttaaaatttcgggatgtcaagtgcattcctgatgacgacgaagactcttacgagatcttcgaaccgccagaatctactgtgatggcaacaagaaagatgcatgaccgcctcgaaccagaggatgaggagtccgatgctgactatgactaccaaaatcgactcgccgccgctctgggtattaggtccttccgtaattcttctcttaatcaggaggaggaagagttcaacctaacagctctcgcattagagaatgggacagaatttgtttcatctaacaccgacatcatagtggggtcaaactactcttcccccagcaatataagcaagttcacagtcaacaatctagcagagccacaaaaggctcccagccatcagcaggctactacggccggctcccctctacgccacctcatcggcaaaaatagcgtactgaattcctctacagccgaacattcctctccttactcagaggatccaatcgaagatcctttgcagcctgacgtaacaggcatcaggctactgtctctgggcgcaggagagtttaagtctcaggagcacgccaagcataaggggcccaaagtcgaaagggaccaagccgcaaaacacagattttcctggatgaagctgttagctcataaggtaggccgtcatttgtcccaggataccggatcccccagtggcatgaggccgtgggaagatctcccaagccaggataccggcagtccaagcaggatgcgcccctggaaggatccacctagtgacctccttttactcaagcaatccaattcatctaagatactggtcggtcgttggcacctggcctccgagaagggatcgtacgaaattatccaagatacagacgaggacaccgccgtcaataactggctgatatcaccccagaatgccagccgagcatggggggagtcaactcccttggccaataaacctggcaagcagtcaggtcacccgaagttccccagggtgaggcataagagcctacaggtacgacaggatggcggtaaaagccgcctcaagaagagccagtttctgatcaagacgaggaagaagaaaaaagaaaaacacacccatcacgcccctctgagcccaaggacctttcatcctctaagaagcgaggcctacaatacctttagtgaaagacggctgaagcattccctggtgttgcataaatctaatgagactagtttaccgacagatcttaatcagaccctaccaagcatggattttggttggatcgcgtctctccccgatcataatcaaaatagctcaaacgatacagggcaggcctcctgtcctccaggcttgtaccagactgtcccgccagaggagcattatcagactttccctatccaagacccagaccagatgcacagtacatcagacccctcccacaggtcaagctctcctgagctgtcagagatgctcgaatatgatagatcccacaaatcttttcctaccgacattagccagatgtcgccgagcagtgaacacgaagtatggcagacagttatttcacctgatctctctcaggtaaccctttcgccagaattgagtcagactaacctctcccccgatctgtcacacacaaccttgtcgcccgagttgatccagcgcaatctcagtcccgccctaggccaaatgcctattagccccgacttgtctcacactaccctttccccagatctgtcccacactacactgagtctagacctaagtcagactaacctgtctccggagctgagtcagactaatctgtctcctgctttggggcaaatgcctttaagtcccgatttatctcacaccacactgagcctggatttttcacagactaacctgtcccctgaactgtctcatatgactctcagcccggagctatcccagacaaacttgtcccccgctcttggtcagatgcccatctcccctgacctttcccataccacattgtccttggacttttcccagaccaatttaagtcccgagttgtcccagacaaatctctcacccgcattgggacagatgcctttgtcccccgacccaagtcacacaactttgagtctggacctgtcgcaaaccaacctgagtcccgagttgtcccagacaaatctttcacctgatctgtcagagatgcccttattcgctgatctgtctcagattccattaactccagatttggaccagatgacactttctcccgacctgggcgagactgacctttctcccaacttcggccagatgagtctgagcccggacctgtcccaagttaccttaagtccagacatttctgatacaacacttctgcctgatctgtcccagatttctcccccaccagacttagaccagattttctacccttcagagtcaagccagtccctgttgcttcaggaattcaatgagtcattcccttatccggatctgggccagatgccaagcccgtccagtcctaccttgaacgatacatttctgagcaaggagtttaaccccttagtaattgttggcctctccaaggacgggaccgactatatcgaaattataccaaaggaggaagtgcaatctagcgaggatgactacgcagaaatcgattacgttccatacgacgacccttacaagacggatgtgaggacaaacattaactctagccgcgaccctgacaatatcgcagcttggtacctgagatccaacaatgggaatcggagaaactactatattgcagcagaagaaatctcgtgggactattctgagttcgtccaaagagagactgacatcgaggattcggacgatattcctgaggacaccacctataagaaggtcgtgtttaggaagtacctggatagcacatttactaagagagaccctagaggagaatatgaagagcatcttggcattttaggacccatcatccgtgctgaggtcgacgatgtgatccaggtccgattcaagaacctagcaagtcgaccctattctctacacgcacatggcctgagctacgaaaagagtagcgagggcaaaacgtatgaggatgattcgcccgagtggttcaaagaggataatgcagtccagccaaactcgtcctacacatacgtatggcacgcaacggaacgctctggacccgagtctccagggagtgcgtgccgggcctgggcatactactcagcagtgaaccctgagaaggacatccacagcggactcattggtccactactcatctgccagaagggcatcctacataaggattccaacatgcccatggatatgagggagttcgtgctgctgttcatgaccttcgatgaaaagaagtcatggtattacgagaaaaaaagcagaagcagctggagactgaccagtagcgaaatgaagaagtcacacgagtttcacgcaatcaacgggatgatttattccctgcccggcctgaagatgtatgaacaggagtgggttcgtctgcacttgcttaatattggcggatctcaggacatccacgttgttcatttccacggccagactctcttggagaatggcaacaaacagcatcaattgggggtgtggccactgctccctggctcattcaaaacacttgagatgaaagcttccaagcccggctggtggttgctgaataccgaggtgggagagaatcagagggccggcatgcaaactcccttcctgatcatggatcgagactgtcgaatgcccatgggcctgtctacagggatcatctctgacagtcagatcaaggcctcagagttcttaggatactgggaaccccgcttagctcgactgaataacggaggctcatataatgcctggagtgtcgagaaactggctgccgaattcgcctccaagccatggattcaggtggacatgcagaaagaggtcattatcaccgggatacaaacgcagggcgccaagcactatctgaagtcttgttatacaacagagttctacgttgcctactctagtaaccaaataaattggcagatttttaaggggaacagcaccaggaacgtgatgtattttaatggaaatagtgacgcttccaccatcaaggagaaccagtttgatccccccattgtcgcacggtacatccgcatcagccctactcgggcctataaccgccctactttgaggctcgaattacagggctgtgaggttaacggttgttctacccccttaggaatggaaaatggaaagatcgaaaacaagcagatcactgcctccagtttcaaaaagtcctggtggggcgattattgggagcctttcagagccagacttaacgcccagggccgcgtgaatgcatggcaggccaaagctaacaataacaaacagtggctcgaaatagatttattaaaaatcaaaaaaattacagccataatcactcaggggtgcaaaagtctcagtagcgagatgtatgtgaagtcgtataccatacactacagtgaacaaggggttgagtggaagccctatcggcttaaaagctcaatggtagataaaattttcgaagggaataccaacaccaagggtcacgtcaagaatttttttaaccctcccatcatctcacgctttattagagttatccctaagacctggaatcagtcaatcgccctgaggctggagttattcggttgcgacatctac

SEQ ID NO: 2287 - DNA, 6672 bp, Artificial Sequence
  derived and/or modified sequence
atgtttccagggtgccctaggctctgggtgttggtggtgttgggtacgtcgtgggtgggctggggctcccaaggcaccgaggccgcacagctgaggcagttctatgtggccgcgcaaggtatttcctggtcataccgccctgagcctacgaattcgtcccttaacttgtccgtcactagcttcaagaagatcgtgtaccgcgaatacgaaccctacttcaaaaaggaaaaaccccagtcgaccatttccggactcctgggacccaccctttacgctgaagtcggagacatcattaaagtgcatttcaagaataaggcagataagccgctgtcgattcatccgcagggtatccggtactcaaaactttccgaaggtgcctcgtatctcgatcacacctttccggctgaaaagatggatgatgccgtggcacctggacgggaatacacttacgaatggagcattagcgaggattcgggtcctacgcatgatgacccaccctgtctcactcatatctactacagccatgagaacctgatcgaggacttcaactccggcctgattggccctctccttatttgtaagaagggaacccttaccgagggtggaacccaaaagactttcgataagcagatcgtcctgctgttcgcagttttcgacgaatcaaagtcatggtcgcagtcatccagcttgatgtacacggttaatggttacgtcaacggcaccatgccagatattactgtgtgtgcccacgatcatatctcctggcatctgctgggtatgtccagtggtccagagttgttttcgattcactttaacggccaggtcctcgagcaaaatcatcataaagtctcggcaatcaccctggtcagcgcaacctcgaccaccgccaacatgaccgtcggacccgagggcaagtggatcatctctagcctgactccgaagcatctgcaagcaggaatgcaagcctacattgacatcaaaaactgtccaaaaaagacccgaaatcttaagaaaatcacccgtgaacagagacgacacatgaagagatgggaatactttattgccgcggaagaagttatttgggattacgcgcctgtgataccagctaatatggacaagaaataccgctcccaacatcttgacaacttctcgaaccagatcggtaagcattacaagaaagtgatgtacactcagtacgaagatgagtcgtttactaagcacactgttaaccccaacatgaaggaagatggaatcttgggtcctatcattcgcgcgcaagtgagagatactctgaagattgtctttaagaacatggcgtcacgcccttactcgatttacccacacggcgtcaccttttccccctatgaagatgaagtcaattcctcgttcacgtcgggaagaaacaacaccatgatccgagcagtgcaaccaggcgagacttacacgtacaagtggaacattcttgagtttgatgaaccgactgaaaatgatgcacaatgtctcacccgcccttactacagcgatgtcgatatcatgagagatattgcaagcggactgattggactgctcttgatctgcaagtcgcggtcgctcgaccgcaggggaatccagcgggcagcagacattgagcagcaggcagtgtttgcagtctttgacgagaataagagctggtacctggaggacaatatcaacaaattctgtgaaaaccctgatgaggtgaagagggacgaccctaagttttacgaatccaacattatgagcacgataaacggatacgtcccggaatcgattacgaccctgggattttgctttgacgataccgtgcaatggcacttctgctcggtgggaacccaaaacgagatccttacgatccactttactggtcactcctttatctacggtaagcgccatgaggatactcttacccttttccctatgcggggtgaatccgtgaccgtcactatggataacgtgggaacttggatgctgacctccatgaattcctcaccacggagcaaaaaactgagactgaaatttcgagatgtgaagtgcattccagatgacgatgaagattcctacgagatctttgaacctccagagtcaactgtcatggcaacgagaaagatgcatgatcggctggaacctgaagatgaagaatcggacgccgactacgattaccagaacagactcgccgccgcgcttgggattaggagctttcgcaattcctcgctgaaccaagaagaggaggagtttaaccttactgccctcgcacttgagaacggaaccgaatttgtgtcgtccaacaccgatatcattgtcggatccaactactccagcccatcgaacatctcaaagtttactgtgaacaaccttgcggagccgcagaaggccccaagccaccaacaggctaccaccgctgggtcacccctccggcatcttatcggaaagaactctgttcttaattcgtcaaccgcggaacatagcagcccctacagcgaggatccgattgaagatccactgcagccggatgtgactggtattcggcttctgtcgctgggagccggggaattcaaatcccaagaacacgcaaaacacaaaggacctaaggtggagcgggaccaggcggcgaagcatagattctcatggatgaaacttctcgcacacaaagtcggtcgtcaccttagccaggatactggttcgccttccggaatgcggccttgggaggacttgccatcacaggacaccggcagcccttcaagaatgcggccgtggaaggatcctcctagtgacctcctgcttctgaagcaaagcaattcgtcgaagatccttgtgggtcgctggcaccttgcatcggaaaagggaagctatgagattattcaagacaccgatgaggacactgcagtgaataactggttgatttccccacaaaacgcctcgagggcctggggagagagcacccctcttgccaacaaaccaggcaagcaatctggccacccgaaatttcccagggtgagacacaagtcactccaagtgcgccaggatggtggtaagtcgcgcctcaagaagtcgcagtttctgattaagaccagaaaaaagaagaaggaaaagcacacgcatcacgcgcctctcagccccaggacttttcatcctctgcgcagcgaagcgtacaatacctttagcgagagacgtcttaagcattctcttgtgcttcataagagcaatgaaacctcacttccaactgatctgaaccagactctgccttccatggatttcggttggattgcgtcgcttcctgatcataaccaaaactcctcgaatgacactggacaagcatcctgtccacccggcctctaccaaaccgtgccaccagaggaacattaccagacctttcctatacaggatcctgatcaaatgcattccacttccgaccctagccaccggagctcgtcccccgaactctcagagatgctcgaatatgatcgctctcacaaatcgttcccaaccgacatctcgcaaatgtccccaagctcggaacacgaagtgtggcaaactgtcatcagcccggacctttcacaagtgactctttcgccggagctgtcgcagacgaacctcagccccgacctctcccatactaccctgagcccagaattgatccaacgtaacctctcgcctgccctgggacagatgccaatttcacccgatctgtcccatactacgctctcgcccgatctgtcacacaccaccctgagccttgacctgtcgcagaccaatctctctccagaactctcccaaactaacctttcccccgcactcggccagatgccgctttcaccagatctgagccataccaccctttcgctcgatttttcacagactaatcttagtccagagctgtcgcacatgactctgtcgcctgagctttcacagaccaacctgagcccagcactgggacaaatgcctatatcgcccgatctttcgcataccactctgtcgctggacttctcgcaaaccaatctttcccctgaactctcccagaccaatctttcgccagcacttggccaaatgccgctcagcccagacccttcgcacactaccttgtcacttgacctgagccaaaccaatctgtcaccagaactttcgcaaaccaacttgtctcccgatctcagtgaaatgcctctgtttgctgatctgagccagattcctctcacgcctgacttggatcagatgactcttagccctgacctgggagaaaccgacctgtcccctaatttcggacagatgtccctgtcgcctgacttgtcccaagtcacccttagcccagatatcagcgatactacccttcttccggatctctcccagattagcccaccacccgacctggatcagattttctacccatcggaatcctcgcagtcgttgcttcttcaggagttcaacgagagctttccttaccctgatctcggtcagatgcctagccctagctcacctactctgaacgacacttttctcagcaaagagttcaaccctctggtgattgtgggtctgtccaaagacgggaccgactacatagagattattcccaaggaggaagtgcaatcctccgaggacgattacgccgagatcgattacgtcccatacgatgatccctacaagactgacgtgagaactaacattaactcctcacgcgacccagacaacatagcggcctggtacctgcgttcgaacaacggaaacaggaggaactactacatagcagctgaggagatctcatgggattactccgagtttgtccagagggaaactgatattgaagattccgatgacatccctgaagatactacctataagaaggtggtgtttaggaaatacctggattcgactttcactaagagagatcctagaggagaatacgaagagcatctcggtatcctgggaccaattatccgagctgaggtggacgacgtcatacaggtcagattcaaaaacctcgcatcacgcccatactccttgcacgcacatggactctcctacgaaaagtcctcggagggtaaaacttacgaggatgactcgccagagtggtttaaggaggataacgcagtgcaacccaattcgtcgtatacttacgtgtggcacgctaccgagcgctccggaccagaaagtcccggatccgcatgtagagcctgggcgtactactcggcagtgaatcctgagaaggatatacattccggacttatcggacctctgctgatctgccaaaagggcattctgcacaaggattccaacatgccaatggatatgagagaattcgtgctgcttttcatgaccttcgacgaaaagaaatcctggtactacgaaaagaagtcacggagctcctggcggttgacctcatcggaaatgaagaaaagccacgaattccatgcgattaacggtatgatctacagccttccaggactgaagatgtatgaacaagagtgggtgcgccttcaccttctcaacataggaggatcgcaggatatccacgtggtgcattttcatgggcagaccctgctcgagaacggtaataagcagcatcaactgggcgtgtggcctctgcttccgggatccttcaaaaccctggaaatgaaagcatccaagcctggatggtggctgcttaataccgaggtgggcgagaaccagcgggccgggatgcagacgccttttctcataatggatagagattgtcggatgccgatggggctgagtactggcattatctcggattctcagattaaggcgtccgaatttcttgggtactgggaacctcgacttgcaagactgaataacggaggttcgtacaacgcctggtccgtggagaagctggcagcagaattcgcctccaagccgtggattcaagtggacatgcaaaaggaagtcattatcactggcattcaaacccaaggggcaaagcattacctgaagagctgttataccaccgagttttacgtggcctactcgtctaaccagatcaactggcaaatcttcaagggaaacagcaccagaaacgtgatgtacttcaacggaaactcggatgcgtcgactattaaggagaaccaatttgatccacctattgtggcacggtacatccgcatctcccctaccagagcatacaatcggccaaccctgcgccttgagctgcaagggtgtgaagtgaacgggtgttcgacccccctgggcatggaaaatggtaagattgaaaacaagcaaattaccgcctcgtcatttaagaaatcgtggtggggagattactgggagcccttccgtgctcggcttaatgcccagggtcgcgtcaatgcttggcaagcaaaggccaacaacaacaagcagtggcttgaaatcgacttgcttaagatcaaaaagataaccgccataatcactcaaggttgtaaatctctttcatccgagatgtacgtgaaaagctacactattcattactcagagcagggcgtggaatggaagccgtaccggctcaagtcctcgatggtcgacaagattttcgaaggtaacaccaatactaagggacatgtcaagaactttttcaatcctccgatcatttccaggttcatccgggtcattcctaaaacctggaaccaatcaatcgctctgagactggaactctttgggtgtgatatctac

SEQ ID NO: 2288 - DNA, 6672 bp, Artificial Sequence
  derived and/or modified sequence
atgtttcctggttgcccgagactttgggtcctggtggtcctgggcacttcatgggtgggttggggatcgcaaggaacggaggcggcccaacttaggcaattctacgtcgcagcccaaggtatttcctggtcataccgcccggagccaaccaattcaagcctgaatctgtcggtgaccagctttaagaaaattgtgtaccgcgagtacgaaccctactttaagaaagagaagccacaatcgactatctccggacttcttggacctaccctttacgcagaagtgggggatatcatcaaggtccactttaagaataaggcagacaagcctctttcgattcatccacagggaatccgctactcgaaactgtccgagggcgcatcgtaccttgatcatacctttcccgccgagaagatggatgacgcagttgcacctggtagagaatacacctacgaatggtcgattagcgaagattcgggaccaacgcatgacgatccaccatgtctgacccacatctactactcacacgaaaatctgatcgaggacttcaattcaggactgatcggccctcttttgatttgtaagaagggaactctgactgaaggaggaactcaaaagacctttgataagcagattgtcctgcttttcgccgtgtttgatgaaagcaagagctggtcgcaaagctcatcgctcatgtacaccgtgaacggatacgtgaatggaaccatgcccgatatcacggtctgcgcccacgatcatatttcctggcatttgctcggcatgtcatcgggtcctgaactcttctcaatccactttaacggtcaagttctggagcaaaatcatcataaagtgtcagccattactcttgtctcggccaccagcactaccgcaaacatgactgtgggtcctgaaggaaagtggatcatttcctccttgactccaaagcatttgcaggcgggtatgcaagcatacatcgatatcaagaattgcccaaaaaagacgcgtaacctgaaaaagatcaccagagaacagcgcagacatatgaaacggtgggagtactttatagccgcagaagaagtcatttgggattacgcacccgtgatccctgcaaatatggataagaagtaccgtagccagcatctggataacttttccaatcaaattggtaagcactacaagaaggtgatgtacacccagtacgaggatgaatcgttcaccaagcatactgtgaatcctaatatgaaggaggatgggatccttggacccataatccgggcacaagttcgcgatacccttaagatcgtgtttaagaacatggctagccgcccatactcgatttatcctcacggagtgactttctcaccttacgaggacgaggttaattcctcctttacgtcagggagaaacaacaccatgattagagcagtgcaacctggagaaacttacacctacaaatggaatatcctggagttcgacgagccaactgaaaacgatgcccagtgtctcacccgtccgtactacagcgatgtcgacattatgagagacatcgcctccggactgattgggcttctgctgatttgtaagtccagatccctggaccgtaggggaatccaaagggccgccgatattgaacagcaagcggtgttcgcagtctttgacgaaaacaaatcatggtacctggaggataacatcaataagttttgtgaaaaccccgatgaagttaagagagatgatccgaaattctacgaaagcaacattatgtccactattaacgggtacgtgcctgaatccattactactctgggattctgcttcgatgacaccgtccaatggcacttttgctccgtgggtactcaaaacgagattcttacgatccatttcactgggcattcattcatatacgggaagagacacgaggataccctgacccttttccctatgcggggagagtcggtcaccgtgaccatggacaacgtgggaacttggatgctgacttctatgaactcgtcccctaggtcgaagaaacttaggcttaagtttagagacgtgaagtgtattccagacgatgacgaggatagctacgagattttcgaaccccccgagtcgaccgtcatggccactaggaaaatgcatgatagacttgaacctgaagatgaagaatccgacgcagattacgattaccaaaatcgccttgcggctgcacttggaattagatcctttagaaatagctcgctcaaccaggaggaagaagaattcaatctgaccgccctcgcacttgagaacggaaccgagttcgtctcatcgaacactgacattattgtgggatcgaactacagcagcccgagcaacattagcaagtttacggtgaataacctcgccgagcctcaaaaggctccatcccatcaacaggccaccactgccggatcccctcttcgtcatctcattgggaagaactccgtcctgaactcctcaactgcagagcatagctccccttactccgaagatcctattgaagatccactgcagccagatgtgaccggtattagactgctctcgttgggagcaggagagtttaagagccaagagcatgcaaagcataagggacctaaggtcgaaagagatcaagcagccaagcaccgattttcctggatgaagctgcttgcacataaagtcggaaggcacctttcgcaagataccggctccccttcgggaatgcgcccctgggaggaccttcccagccaggacaccggatcaccatcacgcatgcgtccttggaaggatcctccctctgatctgctccttcttaaacaatcaaatagctcgaagattctggtggggcgatggcatctggcatccgagaaggggagctacgaaatcattcaggatacggatgaggacaccgccgtgaacaactggcttatttctccacagaacgcatcaagagcatggggtgaaagcactcctctcgccaacaaacctgggaagcagtcaggccatccaaagtttcctcgcgtcagacacaaatcgctgcaggtgcggcaggatggaggtaagtcgcgcctgaagaagtcgcagtttcttatcaaaactagaaagaagaagaaggagaagcatactcatcatgcgcctctttcaccgcgcacgtttcacccactgcggtcggaggcatacaatacttttagcgaaagacgattgaagcatagcctggtccttcacaagtcaaacgaaacctcgcttcctactgatctgaaccaaactctgccatcgatggacttcggttggattgcaagccttccagatcataaccagaattcgtcgaatgacaccggtcaggcatcgtgccctccaggcctctaccaaactgtgccacccgaagaacactaccaaacctttcctattcaagatccagaccaaatgcattcaacctccgatcctagccaccgtagctcgtcccccgaattgtcggaaatgctggagtacgatcggtcgcacaagagctttccaacggatatctcgcaaatgtccccgtcatcggaacacgaggtgtggcaaactgtgatctctcctgaccttagtcaagtcaccctgagcccagagctgtcacaaactaatctttcgcccgacctctcacacactactttgtcaccagagcttattcagcgcaacctcagcccagcactgggacaaatgccgatttcacccgatctttcccatactacgctctcccccgacctttctcataccactctgtccctggacctcagccagacgaacttgagccccgaactgtcccaaaccaacctttctcctgcgctgggtcagatgccgctttcccctgacctttcacatacgactctctcgctggacttttctcagacgaaccttagcccagagcttagccatatgactctgtccccggaattgagccagaccaacctgagccccgcgctcggccaaatgccaattagcccagacctttcgcacaccactttgagcctcgatttctcgcaaactaacttgtcgcccgaactttcccaaacgaatttgtcgcctgcgcttggccaaatgcccctgagcccggatcctagccataccaccctgtcgctggatctctctcaaactaacctgtccccagagctgagccaaacgaatctgtcgccagacctgtctgaaatgcctctcttcgcagatctcagccaaattcctctcacccctgacctggaccaaatgactctctcacctgatcttggcgaaaccgatctgtcccctaacttcggacagatgagcctttcgcctgatctgagccaggtcactctttcaccggacatatctgacactaccctcctcccggacttgagccagatttcgcccccaccagatctggatcagatcttctacccctccgaatcgtcgcaatcactgctgcttcaggaattcaatgaatcctttccttaccctgatcttggacaaatgccatccccatcctcccctaccctgaatgacacgttcctttccaaggaattcaatcctctggtgattgtgggactttcgaaggatggaaccgattacatcgagattattcccaaggaggaagtgcaatccagcgaagatgactacgcggaaatcgattacgtgccttacgatgacccctacaagaccgacgtccggaccaacataaactcatcgcgggatccagataacattgcagcgtggtatctgcgctcgaataacgggaaccggcggaactactacattgcagctgaggaaatctcgtgggactactcagaatttgtgcagcgggagactgatatagaggacagcgacgacatccctgaggataccacctacaaaaaggtagtctttcgaaagtacctggacagcactttcaccaaacgggatccgagaggggagtacgaagaacacctgggaatactgggtcctatcattcgggctgaagtggatgacgtgatccaagtgcggttcaagaacctggcatcacgcccttattcgctgcatgcacatggtctttcgtatgagaagtcctcggagggtaagacctacgaagatgactcccctgaatggttcaaggaagataacgcagtccaacctaactcctcctacacctacgtctggcatgcaaccgaaagatcgggaccagaatccccaggttccgcgtgtagagcctgggcatattactcggcagtgaacccagagaaggacatccactccggcctgattggtcctttgctcatatgtcaaaagggaatcttgcataaggactcgaacatgcctatggatatgagagaatttgtgcttttgtttatgaccttcgatgagaagaaaagctggtactacgagaaaaagtcgcgatcaagctggcgtcttacgagctcagaaatgaagaagtcccacgaatttcacgcgattaatggaatgatctactccctgccaggtctgaagatgtacgaacaggaatgggtgcggcttcacctcctgaacatcggtggctcccaagatattcatgtggtgcacttccacggacaaacgctgctcgaaaacggtaacaagcaacatcagctcggggtgtggcctctcttgcctggatcgtttaagacccttgaaatgaaggcctcgaagccgggttggtggcttcttaacactgaggttggtgagaaccagagggcaggtatgcaaaccccattcctcatcatggatcgggattgtagaatgcctatgggactcagtaccggaatcatatcggattcgcagatcaaggcttcagagtttcttgggtactgggagccacggctggccagacttaacaacggagggtcctacaacgcatggtcagtcgagaagttggcagcagaattcgcctcgaagccttggatacaggtggatatgcagaaagaagtcatcattaccggaattcaaacccagggagcaaagcattacctcaagagctgttacaccaccgagttttacgtcgcatactcctcgaaccagatcaattggcaaatctttaaaggaaattccactagaaacgtcatgtactttaacggcaactcagatgcctcaacgatcaaggaaaaccaatttgatccgccaattgtggctcgctacatccgtatcagccccaccagagcatacaacaggccaaccctgaggcttgaactgcaggggtgtgaggtcaacggatgctcaactcccctgggtatggaaaacggaaagattgaaaacaagcaaattaccgcatcgtcttttaagaagtcctggtggggggattactgggagccctttagagcccgtcttaacgcacaaggacgagttaatgcatggcaggcaaaggcaaataacaacaagcagtggcttgaaattgatctcttgaaaatcaaaaagatcacggcaatcattactcagggttgtaaatcgctgtcctcagaaatgtacgtgaaatcatacactattcattacagcgagcaaggggtcgagtggaagccgtaccgcctgaaaagcagcatggtcgataagatcttcgagggaaacaccaacaccaagggacacgtcaaaaacttctttaaccctccgatcatcagccgctttatccgagtgattcctaagacttggaatcagagcatagcccttaggctggagcttttcgggtgcgacatatac

SEQ ID NO: 2289 - DNA, 6672 bp, Artificial Sequence
  derived and/or modified sequence
atgtttcccggctgcccgaggctgtgggtcctggtggtgctgggcacaagttgggtgggctgggggtcccagggaaccgaggctgctcagctgaggcagttctacgtggcagcccagggcataagctggagttatcgcccggaaccgactaattccagcttgaatcttagcgtgacatccttcaaaaagatcgtgtacagggagtatgagccatactttaaaaaagagaaaccacaatcaaccatcagtggcctcctgggaccaaccctgtatgcagaagtgggtgacataataaaagttcattttaaaaacaaagcggacaagccacttagtattcatccacaggggatccgctactcaaagctcagcgagggggcctcatacttagaccatacatttcccgctgagaaaatggacgacgctgtggctcccgggagggaatacacctacgaatggtctatcagcgaggactcaggtccaactcatgacgaccccccatgtctaacgcatatttattactcacatgaaaatctgatagaggacttcaattcagggctcattggccccctgcttatctgcaagaaaggcactctgaccgaaggcggtacccagaagacctttgataagcaaattgtgctgctgttcgcggtcttcgacgaatctaagtcttggagccagtcatcctcacttatgtacacggtgaatggttacgtgaatggcaccatgccggatattacagtatgcgcccacgaccacatcagttggcatctcctgggaatgagcagcggtccagagcttttctccattcatttcaatggtcaggtgctggagcagaatcatcacaaagtgtctgccattaccctcgtgtcagccacttccaccaccgcgaatatgacagtcggccctgaaggcaagtggataataagcagcttaactcccaaacacttgcaggcaggcatgcaggcgtatatcgacatcaaaaattgtcccaagaaaacgagaaacctgaaaaaaatcacccgtgagcagagaagacacatgaagcgctgggaatattttatagctgctgaggaagtgatctgggactacgctcctgtgatccctgcaaacatggataagaagtatcgttctcagcatttagataacttttctaatcaaatcggtaaacattacaagaaggtcatgtacacgcaatatgaggacgaatcgtttacaaagcacaccgttaacccaaatatgaaagaagatggcattctggggccaattataagagcacaagtgagagacaccctgaaaattgtcttcaagaacatggcttctaggccctactcaatctacccccacggggttaccttctccccttacgaagatgaggttaacagctcttttacgtccggacggaataacactatgattagggctgtgcagccaggagagacttacacttacaagtggaatattctggagttcgatgagccaacagaaaatgacgcgcagtgcttgacccggccatactactccgatgtggacatcatgcgggacatcgcttcagggctgattggcctgttactgatttgtaaatctaggagcctggacaggcgtggcatccagagagcagcagatatagaacagcaggccgttttcgccgtattcgatgaaaacaagtcctggtatctggaagacaatatcaacaaattttgtgagaacccagacgaggttaaaagggacgatccgaaattttacgaatcaaacatcatgtccacaataaatgggtatgttcctgagtcgatcaccaccttgggcttctgttttgacgacacagtccagtggcacttctgttccgtggggacccaaaacgagatcctgactattcactttacggggcatagtttcatctatggtaagagacacgaagacaccctgacactgttcccaatgcgaggagaatccgtgacagtaaccatggataatgtgggcacttggatgctaacgtccatgaatagctctccgaggtccaagaagctccgtttaaagtttcgggacgttaaatgcattcccgatgatgatgaagactcttacgagatcttcgaacctcctgaatcaactgtgatggcgactaggaagatgcacgacagactggaacccgaggacgaggaaagcgacgcggactacgactaccagaacagactagctgccgccctggggatacggtcttttcgaaacagctcactgaatcaagaggaggaggagtttaatctgactgccttagcactcgagaatggaaccgaatttgttagttcgaatacagatataatagtggggtctaactactcaagtccaagcaatattagtaaatttaccgttaacaacctggccgaacctcagaaggctcccagccaccaacaggctacgacggccggatcccccctgcgacacctgattggcaagaattccgtgctgaactcttcaactgccgagcactcttctccttacagcgaggatccgattgaggatccactgcagccagacgtgactggaattagattgttaagtttgggagccggagagttcaaatcccaggaacatgccaagcacaagggccccaaggtcgagcgggatcaagctgccaagcaccggttcagctggatgaagcttctggcccataaagtgggcaggcatctttctcaagatacaggttcgccttccgggatgcggccctgggaggatctgccctcccaggacactggatcaccttctagaatgcggccttggaaggatcccccctctgacttgctgttgcttaaacagagcaattcctctaaaatccttgtggggcgttggcacctggccagtgagaagggctcctacgagataattcaagacacggacgaggatactgccgtgaacaattggcttataagtccacaaaatgcttctcgggcatggggagagagtacccccctcgcaaataagccgggtaaacagagtggacatccgaagttcccacgggttaggcacaagtctttacaggtacgtcaggacggcgggaagtcacggttaaagaagtcacaattcctcatcaagacaagaaaaaaaaaaaaagagaaacatacccaccatgctcctttgagtccacgtaccttccatcccttgcggtcagaggcctataatacgttctccgagcggagactgaaacactctctggtgctgcataaatctaatgaaacgagcttacccaccgatcttaatcagaccctgcctagcatggacttcgggtggatcgccagcctgcccgaccacaaccagaatagttctaatgatactggacaagccagctgcccccccgggctgtaccaaacggtgcctcccgaagaacactaccagaccttccccatccaggaccctgaccaaatgcatagcacaagtgacccaagtcatcggtccagtagccccgagttgtctgagatgctggagtacgaccgatctcacaaatcattccctacagatatatcccaaatgagtccctcctccgaacatgaggtgtggcagacagtgatcagccccgatcttagtcaggtcacactgtccccagagttgtctcagaccaacttgtctcctgatctctctcacaccaccttgtctccagagcttattcagcgaaatctttcccccgcgctcggccagatgcccattagccccgatctttctcatacgactctttcacccgacctatcgcacacaacgctatcgctggacctgtcccagaccaacctgagtccggaactctctcaaaccaatctgtcacctgcactgggacagatgccattgtccccagacttgagtcacacaacactgagcctggactttagtcagactaatttgagccccgaactttctcatatgacgctgtctcctgaactgagccagacaaacctctcgccagcccttggccaaatgccgatcagcccagatctctcccatacgactctgtccctggacttttcccagacaaatctgtcccctgaactgtcccagaccaatttatcccccgccctggggcagatgcctctgtcaccagacccatcccataccaccctgtcccttgacctgagccaaactaacctgagccctgagctgagccagactaaccttagtccagacctgagcgagatgcccttattcgcggacctgtcacagatccccttaacccctgatctcgaccagatgactctatcaccagacctgggggagaccgacctgtcacccaactttggtcagatgtccctaagccccgacctgtcacaggtcacgcttagccccgatatttcggacaccacattgctacccgatcttagtcaaatctccccacctcctgacctggatcagatattttatcctagtgaatcgtctcagagcctacttctgcaagaatttaatgagtcattcccttatcccgatctgggacagatgccatcaccttcatcgcccaccctgaacgacacttttttgtcaaaggagtttaatccccttgttatcgttgggctctctaaggacgggaccgactacattgaaattattcccaaagaagaagttcagagctcagaggatgattacgctgaaattgattacgtcccttacgatgatccctacaaaactgacgtgcgtaccaatataaacagttctcgcgatcctgataacatcgcagcttggtacttgcgttcgaataacggcaataggagaaactactacatcgcagccgaggagattagttgggattactctgaattcgtccagcgggagaccgatatcgaggactccgacgatattcccgaagatacaacatacaagaaggtggtattccgaaaatatctggactccacattcaccaagagagatccaagaggtgagtatgaggaacacttaggaatactagggcccattattagggctgaagtggatgatgtcatccaggttcgcttcaaaaatctggcatcccgcccatactccctgcatgcccacggcctctcatacgagaagagttcggagggaaaaacctatgaagatgacagtccagagtggttcaaggaggacaatgcagtccagccaaactcaagctacacctacgtttggcacgccacggaacgttctggacctgaaagcccaggcagcgcctgtcgagcttgggcctattatagtgcagttaatcccgagaaagacatccactcgggtctaatcgggcccttgttgatctgtcagaaaggcattctccacaaggattccaacatgccaatggatatgagggagtttgtgctcctgtttatgacgttcgacgagaagaaatcttggtactacgagaagaagtcaagatcctcctggaggctcactagttcagaaatgaagaagtcacatgagtttcatgccataaatggcatgatctacagccttcccggactgaagatgtacgaacaggaatgggtgcgactccacttattgaatatcgggggcagccaggacatacatgtggtgcactttcacggtcagacgctgctcgagaacggcaacaaacaacatcagctgggcgtgtggcctctgcttcccgggtcattcaagaccctggaaatgaaggctagtaagcctggttggtggttactcaatactgaggtgggcgagaaccagcgggcagggatgcagacaccttttcttattatggaccgcgactgcaggatgcccatggggctctcaacggggattattagcgatagccagatcaaggccagcgagtttctgggatactgggaacctcgactagcccgactgaacaacggaggaagttacaatgcttggtccgtggagaagcttgccgccgaatttgcctctaagccttggatccaggtggacatgcagaaggaggtcatcatcacaggcatccagactcagggggcaaagcattacttgaaatcctgctataccacagagttctatgtcgcttatagcagcaaccagataaattggcagatattcaagggcaattctactcgcaacgttatgtatttcaatggcaactcagatgccagtacgattaaggagaaccagttcgaccctccaatcgtggctaggtacatccgaatcagtcccacccgggcctataaccggcccacattaaggctcgagctacagggttgcgaagtcaatggctgctccaccccgctgggcatggagaacggaaaaatcgagaacaagcagatcactgcaagctcattcaaaaagagttggtggggggactattgggaaccgttcagagctaggctgaacgctcagggaagagtgaacgcttggcaggccaaggcaaataacaataagcagtggcttgaaatcgatctgttgaagatcaagaagataaccgctattatcacccaggggtgcaagtccctctcctccgaaatgtatgtgaaaagctacaccatccattacagcgaacagggcgtggaatggaagccctacagactgaagtcctcaatggttgacaaaattttcgagggaaacacaaacacaaagggccacgtgaagaattttttcaatcccccgattatatctaggttcatcagagtcatcccgaaaacatggaaccagagcattgccctccgactcgagttgttcggctgcgacatctac

SEQ ID NO: 2290 - DNA, 6672 bp, Artificial Sequence
  derived and/or modified sequence
atgttccccggctgtccacgcctttgggtgcttgtggtgctgggtacgtcgtgggtaggatggggttcgcaaggcaccgaagcagctcagctccgccagttttatgtggcggcacaagggattagctggtcatatagacctgaacccactaacagttcgttgaacctcagcgtgacgagctttaagaagattgtgtacagggaatacgaaccttactttaagaaagaaaaaccacaatcgaccatttcaggactgcttggaccaactctttacgctgaagtgggagacattatcaaggtgcactttaagaataaggcggacaaacctctctcgattcatccacaaggcatacgatactccaagctgagcgagggagcctcatacctggaccacactttccctgcagaaaagatggatgacgcagtcgcaccgggcagagaatacacgtacgaatggtcaatatccgaggattctggaccaacgcatgacgatcctccttgtctgacgcacatctactactctcatgaaaatcttattgaagatttcaattcgggtctgataggcccattgcttatttgcaaaaaaggaacccttactgaggggggaacccaaaagacgtttgataagcagatcgtgctcctgttcgcagtctttgatgagtccaaatcctggagccaaagctccagccttatgtacactgtgaatggttatgtgaacggaactatgccagatattactgtttgtgcgcatgatcacatttcttggcaccttcttgggatgtcatcaggccctgaactgttctcgattcacttcaatgggcaggtgctggaacagaaccaccataaggtgtcggccatcactcttgtgtcagccacttcaactaccgcaaacatgaccgtcgggcccgagggtaagtggattatctcgagtctcacgccgaagcatcttcaggcaggtatgcaagcctacatcgacatcaaaaactgtcctaaaaagacgagaaacttgaagaaaatcacgcgtgaacaacggcgccacatgaagcgctgggagtactttattgcagcggaggaagtgatttgggattacgcccctgtcatccccgccaatatggacaaaaagtaccgctcccaacatttggacaactttagcaaccaaattggaaagcactacaagaaggtgatgtacacgcagtacgaagatgaatcgtttactaaacatactgtgaaccctaacatgaaagaggacggtatccttggccctatcattagagctcaagtgagggacaccctgaaaattgtgtttaagaacatggctagccgcccctacagcatctaccctcacggagtgacgtttagcccctacgaggacgaggttaattcctcattcacctcgggacgtaacaacacgatgattagagctgttcaaccaggagaaacttatacctacaagtggaacattctggagtttgatgaaccaaccgagaacgacgcgcagtgtcttactagaccttactactcggatgtggacattatgcgtgacatagcatctggactgataggccttctgctgatctgtaaatcgcgctccctcgaccggagaggaattcaacgcgccgcagatatagagcaacaggcagtgtttgcagtctttgacgaaaacaagtcctggtaccttgaggacaacattaacaagttttgtgaaaacccagatgaagtgaagagagatgatcccaaattctacgaaagcaatatcatgagcactatcaatgggtacgtgccagaatcaattaccactctcggattctgttttgatgatactgtgcaatggcatttttgctcggtgggcactcaaaatgaaatcctgactattcatttcactggacattcgtttatctacggcaaaagacatgaagatactttgaccctctttccaatgcggggtgaatccgtcaccgtcacgatggataacgtcggaacctggatgctgacttccatgaacagcagtcctcgcagcaaaaagctgcggcttaagttcagagacgtgaagtgcattcctgatgatgatgaggactcctacgagatatttgaaccacctgagtcgaccgtgatggcaactagaaagatgcatgatcgtctcgaaccagaggacgaagaaagcgatgcagattacgattaccagaatcggctggcggctgctctcggaataagatctttccgcaactcatcgcttaaccaagaagaagaagaattcaacctgacggcgcttgcactcgagaacgggaccgagtttgtcagcagcaacacggatatcatcgtgggatcgaattactcaagcccatctaacatctcgaagtttaccgtgaataatctggcagaaccccaaaaggcaccatcccatcaacaggcgacgaccgccggatcccctcttcgccatcttatcggaaagaatagcgtgcttaactcatcaaccgcagaacactcctccccgtactcggaagatccaattgaagatccactccagccagatgtgaccggcattcgcctgctgtctcttggcgccggcgaattcaagtcccaagaacacgcaaagcataagggtccaaaggtggaacgagatcaagcagcgaagcatcgatttagctggatgaagctgcttgcacataaggtcgggaggcacttgtcccaagacaccggctctccgtccggtatgcgcccttgggaggaccttccgtcacaagataccggttctccatcgcgaatgaggccttggaaggacccgccgtcagacttgctgcttctcaaacagtcgaattcatcgaagattctcgtgggtagatggcacctggcctccgagaaggggtcatacgaaatcatccaggacactgatgaagatactgcagtcaacaattggcttattagcccacagaatgcatcccgggcatggggcgagtcgacccctttggccaacaaacccggaaagcagagcggacatcctaagtttccaagagtgagacataaatcccttcaagtccggcaagatggggggaagtcgcggctgaagaaaagccagtttctgattaagacgagaaagaagaagaaagaaaagcacacccatcatgcgcctctgtcgccgagaaccttccatcctcttcgttcggaagcctacaacaccttctcggaaaggagactgaaacactcgctggtgctgcataagagcaatgagactagccttcccaccgatctgaatcaaactctgccatcgatggatttcggttggatcgcatcgctcccggatcataaccaaaattcttcaaacgacaccggacaagcctcatgtcctcctggactctaccagactgtccccccggaagagcactaccaaacttttcctattcaagatccagaccaaatgcacagcacctccgacccgtcccatcgttcgagctcacctgaactctcagagatgctggagtacgacaggtcccataagagcttccccactgacatatcgcagatgtccccgagctccgaacatgaagtgtggcagaccgtgatctcgcccgacctgtcgcaagtgacgctgtcgccagaactcagccaaaccaacctctcaccggacctgtcccataccactttgtcaccagaattgatccagcgtaacctgtcgccagcacttggccagatgcccatttcaccagatctgagccataccactctgtctcctgatctcagccataccaccctctccctggatctttctcaaaccaaccttagcccagaactctcacagaccaatctgtcaccggcactggggcaaatgccgctttcgcccgatctctcacacactaccctgagccttgacttttcgcaaaccaacctgtccccagagctgagccatatgaccctcagccctgagctttcacaaaccaatttgtccccagcactcggacagatgccaatatcaccagacctgagtcataccaccctttcgcttgattttagtcaaactaatctctccccggaattgtcgcaaaccaatctctcacctgcactgggccagatgcctctcagccctgatccttctcatactactctgtcgttggatctcagccagaccaacctttcacctgagctgagccagaccaatcttagcccggacttgagcgagatgccgctgtttgctgaccttagccagattccccttacccctgaccttgatcagatgaccttgagccctgatctgggtgaaaccgacctttcccccaactttggacaaatgtccttgtcacctgatctttcgcaggtgaccctgtctccagacattagcgacaccactttgctgcccgatctgtcgcagatttcccctccgccagatctcgatcagatcttttacccttccgaatcttcacaatcgctgcttcttcaggagtttaacgaatcatttccctacccggatcttggccaaatgcctagcccctcgtcgcctactcttaacgacacttttctttcgaaggagttcaacccactcgtcattgtaggactcagcaaggacggaaccgactacattgaaatcattccaaaggaagaagtccaatcctcggaagatgattacgcagaaatagattacgtcccatacgatgatccgtataagactgatgtgcgcactaacattaactcaagcagagatcccgacaacattgccgcatggtaccttcggtccaacaacggaaataggcgaaattactacatagccgccgaggaaataagctgggactactccgagtttgtgcaacgggagacggacatcgaggattcggatgacattcctgaggataccacttacaagaaagtggtgtttcggaagtacctggatagcacgtttaccaaacgggatcccagaggggaatacgaagaacatctgggcatccttggtcctataatcagagcggaagtcgatgacgtgatacaagtgcgctttaagaacctcgcaagccggccctattcgctgcacgcacatggtttgtcgtacgagaagtctagtgaaggaaagacttacgaagatgattcgcctgaatggttcaaagaagataacgcagttcaacccaatagcagctacacttacgtttggcatgcaaccgagaggtctggtcctgagtcacctgggagcgcttgtagggcgtgggcttactactcagcagtcaatcctgagaaggacattcattcgggactgattggtcctcttcttatctgccaaaaaggaatcctccataaggactcgaatatgcctatggatatgagagagttcgttcttctgtttatgacttttgatgaaaagaaatcgtggtactacgagaagaagtcgagatcctcctggcgcctgacttcctccgaaatgaagaagtctcacgagttccacgccattaacgggatgatttactcgcttccaggtctgaaaatgtacgaacaggaatgggtccgtctccaccttctgaatattggtggcagccaggatattcacgtggtccattttcatggacagactctgctggaaaatggaaacaaacaacaccagcttggtgtgtggccacttctcccgggttcattcaagactcttgaaatgaaggcaagcaagcccgggtggtggcttctgaataccgaagtaggtgagaatcagagagcggggatgcagaccccttttctgatcatggatcgtgactgcaggatgccaatgggtctgtccaccgggatcatttccgacagccagattaaagcctctgaattccttggatattgggaaccccgccttgcacgactcaacaatggaggttcatacaacgcctggtcagtggaaaagctcgcagccgaatttgcatctaaaccttggattcaggtcgatatgcaaaaggaggtgattatcactggtatacaaactcagggcgccaaacattatcttaagagctgctataccactgaattctacgttgcgtactcatccaaccagatcaattggcagatattcaaggggaatagcactaggaatgtgatgtatttcaatgggaactccgatgcttcaaccattaaagagaaccagtttgaccctccaattgtggcacgatacattagaatctcaccaacccgggcctataaccgtccaactctgaggctcgagcttcaaggttgtgaggtcaacggatgtagcacccccctgggcatggaaaacgggaagatcgagaacaagcaaattaccgcgtccagcttcaagaaatcatggtggggagattactgggaaccttttagagcacggctcaacgcccagggtcgggtcaatgcatggcaggccaaagcaaataacaacaagcagtggcttgaaatagatcttcttaagataaagaaaatcactgcaatcatcactcaaggttgcaaatcactgtccagcgaaatgtacgtgaagtcttataccattcactactcggagcaaggagtggaatggaagccataccggctgaaatcttcgatggtcgataagatctttgagggaaacaccaacactaaaggacatgttaagaactttttcaaccctcccatcattagcagattcataagagtgattcctaagacttggaaccagtccattgcactgcgtctcgagttgtttggatgcgatatctac

SEQ ID NO: 2291 - DNA, 6672 bp, Artificial Sequence
  derived and/or modified sequence
atgtttcctggttgtccaagattatgggtattagttgttttaggtactagttgggttggatggggtagtcaaggaacagaagcagctcaattaagacaattttatgttgcagcacagggaatttcatggtcatatcgaccagaaccaacaaattcatcattaaatttatcagtaacttcatttaaaaaaattgtttatagagaatacgaaccatatttcaaaaaagaaaaaccacaaagtactatttctgggttacttggacctacattatatgctgaagttggtgatattattaaagtccattttaaaaacaaagccgataaaccattatctatacacccacaaggaattagatatagtaaattatctgagggagctagttatttagatcatactttcccagcagaaaaaatggatgatgccgtcgcacctggtcgtgaatatacttatgaatggtcaattagtgaagatagtggacctactcatgatgatccaccatgtttaacacatatatattattcacatgaaaatttaatcgaagattttaattcaggattaatcggaccattacttatttgtaaaaaaggaacgttaacggaaggtggaactcaaaaaacattcgataaacaaattgttttgctttttgcagtttttgacgaatctaaaagttggtctcaatctagtagtttaatgtatactgttaatggttatgttaatggtactatgccagatattactgtttgtgctcacgatcacattagttggcatttattaggaatgtcttcaggtccagaattattctcaatacatttcaatggacaagtattagaacaaaatcatcataaagtttcagctattacattggtatctgcaacatctaccactgcaaacatgactgttggaccagaaggaaaatggattattagttcattaacacctaaacatttacaagctggtatgcaagcttacattgacataaagaattgtccaaaaaaaacaagaaatttgaagaaaattactagagaacaacgtagacatatgaaaagatgggaatactttattgcagctgaagaagttatttgggactatgctcctgtaattccagctaatatggataaaaaatatagaagtcaacatcttgacaattttagtaatcaaattgggaagcattataaaaaagttatgtatacacaatatgaagatgaatcttttactaaacatacagttaatccaaatatgaaagaagatggaattttgggaccaattataagggctcaagttagagatacacttaaaattgttttcaaaaatatggcatcaagaccatactcaatttatccacatggagtaactttttctccatatgaggatgaagtaaattcatcattcacttctggaagaaacaatactatgataagagctgtacaaccaggagaaacttatacatataaatggaatattttagaatttgatgaaccaacagaaaatgatgctcaatgtttaacaagaccatattattcagatgttgacattatgagagatattgcatctggattaattggacttcttttaatttgtaaaagtcgatcattagatagaagaggtattcaaagagctgcagatatcgagcaacaggcagtttttgcagtttttgatgagaacaagagttggtatttagaagataatattaacaaattctgtgaaaatccagatgaagttaaaagagatgatccaaaattttatgaaagtaatattatgtctactattaacggatatgttcctgaaagtattactactttaggattctgttttgatgatactgtgcaatggcatttttgtagtgtaggaactcaaaacgagatacttactattcatttcactggacattcatttatttatggaaaacgtcatgaagatactttgacgcttttcccaatgagaggtgaatctgtaactgttactatggacaatgtaggaacttggatgcttactagtatgaatagttctccaagatcaaaaaagcttagacttaaatttagagatgttaaatgtatccctgacgatgatgaagattcttatgaaattttcgaacctcctgaatctacagttatggctacaaggaaaatgcatgatagactagaaccagaagatgaagaatcagatgcagattatgattatcaaaatagattagcagctgcattaggaattagatcatttagaaattcttcattaaatcaagaagaagaagaatttaatcttactgcactagcacttgaaaatggaacagaatttgtttcttcaaatacagatattattgttggttctaattattcatctccatcaaacatttcaaagttcactgtaaataatttagcagaaccacaaaaagctccaagtcatcaacaagccactacagctggatcaccattaagacacttaattggtaaaaattcagttcttaactcatcaacagctgagcattcatcaccatattcagaggatccaattgaagatcctttacaaccagatgttactggaattcgtttattatctttaggggctggagaattcaaatcacaagaacatgctaaacataaaggtccaaaggtagaaagagatcaagctgctaaacatagattctcatggatgaagttattagcacataaagtcggtagacacttaagtcaagatactggttcaccatcaggaatgagaccttgggaagacttgccaagtcaagatactggatcacctagtcgtatgagaccatggaaagatccaccaagcgatttattattattaaagcaaagtaatagttctaagattctcgttggaagatggcatcttgcaagtgaaaaaggaagttatgaaataattcaggatacagatgaagatacagcagtaaataattggttaatatcaccacaaaatgctagtagagcatggggtgaatctactccattagcaaataaacctggaaaacaatctggacatccaaaatttccaagagttagacataaatctcttcaagttagacaagacggtggaaaaagtagattaaaaaaatctcaatttttaattaaaacaagaaaaaaaaagaaagaaaaacatacacatcatgctccactttcaccaagaacatttcatccattaagatcagaggcatataatacattttctgaaagaagattaaagcattctcttgttctacataaaagcaacgaaacatctcttccaactgatcttaatcaaacattaccttctatggattttgggtggattgcatcacttccagatcataatcaaaattctagtaatgatacaggacaagcttcatgtcctcctggactttatcaaactgttccaccagaagaacattatcaaacttttccaattcaagatcctgatcaaatgcattcgactagtgatccttctcatcgtagttcatcaccagaattgagtgaaatgcttgaatatgatagatcacacaagtcatttccaactgatatttcacaaatgagtccaagctcagaacatgaagtttggcaaactgttatttctccagatttatcacaagttacattatctccagaactctcacaaacaaatttatctccagatttaagtcatacaactctttctccagaacttattcaaagaaatctttcaccagctttaggacaaatgccaatttcaccagacctttctcatacaactttatcaccagatttaagtcatacaactctttctttagatttgtcacaaactaatctttcacctgaattatcacagactaatttatcacctgcacttggacaaatgccattatcgccagatctatctcatacaaccttaagtttagatttctctcaaactaatttatcaccagaactttcacatatgacactttccccagaattatcacaaacaaatctttcaccagcattaggtcaaatgcctataagtccagatctttctcatacaacattaagtttagatttttcacaaacaaatttatccccagaacttagtcaaacaaatcttagtccagctttaggacaaatgcctttatcaccagatccatcacatacaactcttagtcttgatttaagtcaaactaatttatcaccagaacttagtcaaaccaatctttctccagacttatctgaaatgccattatttgctgatcttagtcaaattccattaactccagaccttgatcaaatgactttatcacctgatttaggtgaaactgatttatccccaaattttgggcaaatgagtctcagccctgatttaagtcaggttacactttctccagatatttcagatacaactcttcttccagacctttctcaaatttctcctccacctgaccttgatcaaattttttacccttcagaatcatctcaatcattattattacaagaatttaatgaatctttcccttatccagatcttggtcaaatgccaagtccaagttctccaacacttaatgacacttttctttcaaaagaatttaatcctcttgtcattgtaggacttagcaaagatggaactgattatattgaaattattccaaaagaagaagttcaatcaagtgaagatgattatgctgaaattgattatgtcccatatgacgatccttataaaacagatgtaagaacaaatattaattcttcaagagacccagataatattgcagcatggtatttaagaagtaataatggtaatagaagaaactattatattgcagcagaagaaatttcatgggattattctgaattcgtacaaagagaaacagatattgaagattctgatgatattcctgaagatacaacatataaaaaagttgtttttcgtaaatatttagattcaacttttacaaaaagagatcctagaggagaatatgaagaacatcttggtattttaggtcctattattagagctgaagttgatgacgttattcaagttagatttaagaatttagcatcaagaccatattcacttcatgctcatggactatcatatgagaaatcatctgaaggaaagacctatgaagacgattcaccagaatggtttaaagaagataacgctgttcaacctaatagttcatatacatatgtttggcacgcaactgaaagaagcggaccagaaagtcctggaagtgcatgtagagcttgggcatattatagtgctgttaacccagaaaaagatattcactcaggacttattggaccattattaatttgtcaaaaaggaatacttcacaaagattctaatatgccaatggatatgagagagttcgttcttttgtttatgactttcgatgaaaaaaaatcatggtattacgaaaaaaaatcacgaagtagttggagattaacttcatcagaaatgaaaaaaagtcatgaattccatgctattaatggaatgatttatagtctacctggattaaagatgtatgaacaagaatgggttagacttcacttattaaatattggaggaagtcaagatattcatgttgttcattttcatggacaaacattattagaaaatggaaataaacaacatcaacttggtgtatggcctttattaccaggatcttttaaaacattggagatgaaagcttcaaaaccaggttggtggctacttaataccgaagttggtgaaaatcaaagagcaggaatgcaaactcctttcttaattatggatagagattgtagaatgcctatgggtcttagtacaggaataattagtgattctcaaataaaggcttctgaatttttaggttattgggagcctagattagctagattaaataatggaggttcttataatgcttggtcagttgaaaaattagctgcagaatttgcatcaaaaccttggattcaagttgatatgcaaaaggaagttattattactgggattcaaacacaaggtgctaaacactatttaaaatcatgttatacaactgaattctatgttgcttattcatcgaatcaaattaattggcaaattttcaagggtaacagtactcgaaatgttatgtatttcaatgggaattcagatgcatcaacaataaaagaaaatcaatttgatccaccaattgttgctcgatatattagaatttctccaacaagagcttataatagaccaactcttcgattagaattacaaggttgtgaggtaaacggatgttcaactcctcttggaatggaaaatggaaaaattgagaataaacaaattacagcatctagtttcaagaaatcatggtggggagattattgggaaccatttcgtgccagacttaatgcacaaggtagagttaacgcttggcaagcaaaagcaaataataataagcaatggttagaaattgatcttttaaaaattaaaaaaattactgctattattactcaagggtgtaagtctttatcaagtgaaatgtatgttaaatcttatacaattcattactcagaacaaggtgttgaatggaaaccatatagacttaaaagttctatggttgataaaatttttgaaggaaatactaatactaaaggacatgttaaaaatttttttaatccaccaattatttcacgatttattagagttattccaaaaacttggaatcaatcaatagcattaagactagaactttttggttgtgatatatat

SEQ ID NO: 2292 - DNA, 6672 bp, Artificial Sequence
  derived and/or modified sequence
atgtttcctggatgcccgcggctctgggtcctggtggtcctgggcacttcgtgggttgggtgggggtcacagggcactgaagccgcccaactgagacagttctacgtggctgcacagggcatctcatggtcataccggccggaaccaactaactcatccctgaatctgtccgtcactagctttaagaaaatcgtgtacagagagtacgaaccctacttcaaaaaagagaagccccagtccactatctccggactgctgggtcctaccctgtacgccgaggtcggagatatcatcaaggttcatttcaagaacaaggccgacaagcctctcagcattcacccacagggaatccggtacagcaagctgtcggaaggagcctcgtacctcgatcatactttcccagctgaaaagatggacgacgccgtggcgccgggacgggagtacacctacgaatggtcaatctcagaggactcaggacctacgcatgacgatcctccttgcctgacccacatctactattcgcacgagaacctcattgaggacttcaattccggattgatcggtccgctgttgatttgcaaaaaggggactctcacggagggcggtacccaaaagacgttcgacaagcagatcgtgctgttgttcgcggtctttgatgaatcgaaaagctggtcgcagtcgtcatcgttgatgtacacggtgaacggttacgtgaacggtaccatgccggacatcaccgtctgcgcgcatgaccatatttcatggcacctgctgggcatgtcctcaggaccggaattgttctcgatccactttaacggccaggtgctggaacagaatcaccataaagtgtcggcgatcactcttgtgtcagccacttcaactactgccaacatgaccgtcggtccggaaggaaagtggattatctcatcgttgactccgaagcacctgcaggccggtatgcaagcctacatcgatatcaaaaactgcccgaagaaaaccagaaacctcaagaaaatcactcgggaacagaggagacatatgaaacggtgggagtacttcatcgccgcggaggaagtaatctgggactacgctcccgtgatcccggcaaatatggacaagaaatacagatctcaacacctggacaatttcagcaatcagatcggcaagcattacaagaaggtgatgtacactcagtacgaagatgagtcgttcactaagcacaccgtgaacccaaacatgaaggaggatggaatcctcggtcctatcatcagggcccaggtgcgcgacacgctcaagatcgttttcaagaacatggcttcgcggccgtactcaatctacccgcacggagtgaccttctccccgtacgaggacgaggtgaattcctcgttcacgtcaggacgaaataacacgatgattcgcgccgtgcagccgggagaaacctacacttacaagtggaacatcctcgagttcgatgagcctactgaaaacgacgcccagtgtctgactagaccgtactacagcgacgtggatatcatgcgcgatatcgcctcaggactgattggactcttgctgatttgtaaatcgagatctctggataggcgcgggatccaaagggcggccgatattgagcaacaagccgtctttgccgtgttcgacgaaaacaaatcgtggtacctcgaggacaacattaacaagttctgcgagaatccggacgaagtcaaaagagatgatccgaagttttacgaaagcaacataatgtcgactatcaacggatatgtcccggagtctatcaccaccctggggttctgcttcgacgatacggtgcaatggcatttttgtagcgtcggaacccagaacgagatcctgactatccatttcaccggccactcctttatctacggtaagcgccacgaagataccctgactctcttccctatgcggggtgagtccgtcaccgtcactatggacaatgtgggcacctggatgctgacttcgatgaactcgtctcctcggtccaagaaactgcgcctcaagtttcgtgatgtgaagtgcatcccagacgatgatgaggactcatacgaaatctttgaacctcctgagagcaccgtgatggcaactaggaagatgcacgatcgtctggagccggaagatgaagagtcggacgcggactacgactaccaaaaccggctggcggcagctctgggaatccgctcattccgcaatagctcgctcaatcaggaagaagaagagtttaacctgacggctctcgcgctcgagaatggaactgagttcgtgtcatccaacaccgacatcatcgtcgggtccaattactcaagcccaagcaacatttccaagttcactgtgaacaatctggcagaaccccaaaaagcgccatcgcatcaacaagcgacgactgccggttcccctctgcggcacctcattggaaaaaactcggtgttgaattcgtcgaccgcggagcactcatccccatacagcgaagatcctatcgaggacccgctgcaaccggacgtcactggaatcaggctgctctcgcttggcgcaggcgagttcaaatcccaggagcatgctaaacacaagggaccgaaggtggagcgagatcaagctgcaaagcacagattctcatggatgaagctgctggctcacaaagtgggacggcacctttcacaggacactggaagcccgtccgggatgcggccatgggaggacctcccatcgcaggatacgggtagcccatctcgtatgcgtccttggaaagatccccccagcgacctgctgctcctcaagcagtcgaacagttcaaagatcctcgtcggacgatggcaccttgcttcagaaaaaggatcctacgagatcatccaggacacggacgaggacaccgctgtcaataactggctgatttcccctcagaatgcctcgcgcgcgtggggagaatcaacccccctggctaacaaacctggaaagcagtcaggccaccccaagttcccgcgggtgcggcataagagcctccaggtccggcaagacggaggaaagtccagactgaagaaatcacagtttctgattaagactcgcaagaaaaagaaggagaaacacacccatcacgcgcccctgagccctcggacctttcacccgctgcggagcgaagcgtataacaccttctcagagcggagacttaagcactctctcgtgctccataagagtaacgaaaccagcctcccaaccgacctgaaccagactctgccctcgatggacttcggatggattgcctcattgcctgaccacaaccaaaactcctccaacgataccggacaagcatcctgcccaccggggctctaccagacggtgccaccggaagaacactaccagactttcccgatccaagacccggaccagatgcacagcacctccgacccgtcgcaccgaagctcaagcccagagttgagcgagatgttggaatatgacaggtcgcataagagcttcccaactgacatctcccagatgtcaccgtcatcagaacatgaggtgtggcaaaccgtcatctccccagacctttcgcaggtcactctttcgccggaattgtcccaaaccaacctttcgcctgatctgtcgcatactacgctgtcgccagaattgatccagcgaaatctgtcgccggcattgggtcagatgcctatctcgcctgatctcagccataccactctgtcaccggacctcagtcatactaccctcagcctggatctgagccaaactaacctctccccagagttgtcacagactaacctgtcgcctgcattgggccagatgcccctgagtccagatctctcgcatacgactctctcgctggacttcagccaaaccaatcttagccccgaactgagccacatgaccttgtcgcctgagcttagccaaacgaacttgtcgcccgcgctgggacagatgcccattagccccgacctgtctcacacgactctctctctcgatttttcacagactaatctgtcgcccgaactgtcccaaactaatctcagcccagccctgggacaaatgccactgagccccgacccatcgcacaccaccctgagccttgacctgtcacagacgaatttgtccccggagctctcccagaccaatctctcgcctgacctctcagagatgccactgttcgcagaccttagccagatcccgctcacccctgatctcgatcaaatgactctgtcgccagacctgggagaaaccgacctgtcgccaaactttggtcaaatgtccctgtcacctgacctttctcaggtgacgctctcgcccgacatctcagataccacgctgctgccagatctgtctcagatttcgccaccaccagatctggaccagatcttctacccttcagagtcctcccagtccctgctgctccaggaattcaatgagtccttcccgtaccccgacctgggccaaatgccctccccgtcgtcccccactctgaatgacactttcctgtccaaagagttcaatcctctcgtcatcgtgggactgtccaaggacggaaccgactacatcgagatcatcccaaaggaagaagtccagtcgtccgaggacgactacgctgagatcgactacgttccctacgacgacccttacaagaccgatgtgcggactaacatcaactcatcccgggatccggacaatattgcggcctggtacctgcggtcaaacaatggaaatcggagaaattactacatcgccgcagaagaaatctcgtgggactactcggagttcgtgcagcgggagacggatatcgaggactcagacgacatcccggaagatactacttacaaaaaggtggtgtttagaaagtatctcgatagcactttcaccaaacgcgacccgagaggagagtacgaagagcacctgggaatcctcggaccaatcatccgcgccgaagtggatgatgtgattcaagtgcgctttaagaacctggcgtcgcggccctattcgctgcatgcccatggcctgagctacgagaaatcctcggagggaaagacctacgaggatgactccccggaatggttcaaggaggacaacgccgtccagcctaactcgtcctatacttacgtgtggcatgcaactgaacggtcaggaccggagagcccgggatcggcctgcagggcgtgggcttactactccgccgtcaaccctgaaaaggatattcacagcggactgatcggaccgcttctcatttgccaaaagggaattctgcacaaagattcgaacatgcctatggacatgcgcgaatttgtgctgctgttcatgacctttgacgagaaaaagtcttggtattacgagaagaagtcgcggtcctcctggcgccttacttccagcgaaatgaaaaagtcccatgaattccacgccatcaacggcatgatctacagcctgccgggtctgaaaatgtacgaacaggaatgggtccgcctccacctgctgaacatcgggggatcccaggacatccacgtggtccacttccatggtcaaactctgctggaaaacggaaacaaacagcatcagttgggcgtgtggcccctgctcccaggctccttcaagaccctggaaatgaaggcctccaagccgggatggtggctgcttaatactgaagtgggagagaaccagagagccggaatgcagactcctttcctcatcatggaccgggactgccgcatgccgatgggactgtcgaccggaatcatctccgattcccagattaaggcgtcagaattcctcggctattgggaaccccgcctggccagactgaataatggtggctcctacaatgcctggtccgtggagaagttggcagccgaattcgcatcgaagccgtggatacaggtcgacatgcagaaggaagtgatcattaccggtatccagacccaaggcgccaagcactacttgaagtcatgctacaccaccgagttttacgtggcctacagtagcaaccagattaactggcaaatcttcaaagggaatagcactagaaacgtgatgtacttcaacggaaactccgacgcctcaaccatcaaggaaaatcagtttgatccgcctatcgtcgctagatacattcgcatctccccgactcgggcatacaaccggcccactctgcggctggagctccaaggttgcgaggtgaacgggtgcagcacgccactgggtatggaaaatggaaagatcgaaaacaaacagattactgcgtccagcttcaagaagagctggtggggtgattattgggaacctttccgcgcgcggcttaacgcgcagggccgcgtgaacgcctggcaggccaaagctaataacaacaagcagtggctcgaaattgacctgctgaagattaagaagatcacggctattatcacccaggggtgcaagtcgttgagctctgaaatgtacgtgaagtcgtacactatccattacagcgaacaaggcgtggaatggaaaccataccggctcaaatcgtccatggtggataagattttcgagggaaacactaacaccaaaggacatgtaaagaacttcttcaatccgccaatcatttcaagatttatccgcgtgattcctaagacttggaaccagtctatcgcgctccgccttgaactcttcggatgcgacatctac

SEQ ID NO: 2293 - DNA, 6672 bp, Artificial Sequence
  derived and/or modified sequence
atgtttccaggctgtccgcgtctgtgggtcctggtggtccttggaacctcctgggttggatggggatcccaaggtactgaagcagcacaactcagacagttttatgtggctgcccaaggtatttcctggagctacagaccagaacctaccaatagctcgctgaacctgtccgtgacctcctttaagaagattgtgtaccgggagtacgagccatacttcaagaaagaaaagcctcagtccaccatttccggactgttgggtcccactctctacgcagaagtgggtgatatcataaaagtgcacttcaagaataaggcagataagcccctgtcgatccacccccaaggcattcgttacagcaagttgtcggaaggtgcctcctacctcgatcacacttttcccgcggaaaagatggatgacgctgtagccccaggaagagaatacacttacgaatggagcatttctgaagatagcggacctacgcacgatgaccccccttgtctgactcacatatactactcgcatgaaaaccttattgaggacttcaattcggggctgataggccctctcctgatctgtaagaaaggcaccctgacggagggtggtacgcagaaaaccttcgataaacaaattgtgcttctgtttgcagtgttcgacgaaagcaagtcgtggagccagagttcaagcctcatgtacactgtgaatggttacgtgaatggaacgatgcccgatatcactgtgtgtgcccacgatcacatctcgtggcacctgcttgggatgtcctccggacctgaactgttttcgatccactttaatggacaagttctggaacaaaatcatcacaaggttagcgcaatcactcttgtctccgcaacctcaacgaccgctaatatgactgtgggacccgaaggtaaatggatcataagctccctcaccccaaagcacctccaggctgggatgcaggcgtacattgatatcaaaaactgtccaaaaaagactcgaaatctgaagaagataacgcgcgagcaacgcagacacatgaagagatgggaatactttatcgctgcagaagaggtcatctgggattacgcgccagtgattcctgcaaatatggacaagaagtaccgatcccagcatctggataacttttctaaccaaatcggaaaacactataagaaggttatgtacactcaatacgaggacgagtcgttcactaagcataccgtgaatccaaatatgaaggaagatggcatcctgggtcccattatcagagcacaagtcagagacacccttaagattgttttcaagaatatggccagcaggccatactcaatttaccctcatggagtgactttttctccgtacgaagatgaagtcaattcctcatttacctcaggccgcaacaatactatgattcgcgcggtccagccgggagaaacttacacctacaagtggaatattctggaattcgatgagcccaccgaaaacgacgcccaatgccttaccaggccgtattacagcgatgtggacattatgcgagacatcgcaagtggccttatcggcctccttctcatttgtaagtcccgttcgctggatagacgtggtattcaacgcgcggcagatattgaacaacaggcagtgttcgcagtctttgatgagaacaaatcgtggtatctggaagataacattaacaaattctgtgaaaatcctgacgaagtgaagcgagacgaccctaagttttacgaatccaacattatgagcaccatcaatggatacgtgccggaatccattacgactctcggtttttgttttgatgacactgtgcagtggcacttttgtagcgtggggacgcaaaatgaaatactgactatccacttcaccggtcattcatttatctacggcaagcggcatgaggacactcttaccctcttcccaatgcgaggagagtccgtgactgtcactatggataatgtagggacctggatgctgacctccatgaactcatcgccccgctcgaagaaacttagactgaaatttcgggatgtgaagtgtataccagatgatgacgaggatagctatgagattttcgagccacccgaatcaaccgtcatggcaactagaaagatgcatgataggcttgagcctgaggacgaagaatctgacgcagactacgattaccagaaccgcttggcagcagcacttggaatccgctcttttcgtaactcgtcactgaaccaggaagaggaggagttcaaccttacggctcttgcacttgagaatggtaccgaattcgtgtcatcaaataccgacattatcgtgggtagcaactactcgtcaccaagcaatatctcaaagtttacggtcaataatctcgccgaacctcaaaaagcgccttcgcatcagcaggcaacgactgccgggagcccactgcgccacctcattggaaagaatagcgtcctgaatagctcgaccgcagaacactcctcgccttactccgaggatccaatcgaggacccccttcaaccggatgtgaccggcatacggcttttgagcctgggagcaggggagttcaaatcccaagaacatgcgaagcacaagggacccaaggtggaaagagatcaagccgctaaacacagattttcctggatgaaacttctggctcataaagtcggacgtcacctgagccaagataccggcagcccttccgggatgcggccctgggaggaccttccttcgcaggatactgggtcaccctcgaggatgcgtccttggaaggatcctccttccgatcttcttctgctgaagcagtcgaactcgtccaagattctggtcgggagatggcacctggcatcagagaaaggatcctacgagattattcaggataccgacgaagataccgcagtgaataactggctgatctcgcctcagaatgcctcgcgggcctggggagagagcactccgctggctaataagccaggtaagcaaagcggacatcctaagtttccaagagtgagacataagtcccttcaggtgcgacaggatggggggaagagtagacttaagaaatcccaattcttgattaagacccgcaagaagaaaaaggaaaagcacactcaccatgcacctctgtcgccacgaaccttccatccactgagatccgaggcatacaatacttttagcgaaagacggctgaaacattcacttgtcctccacaagtccaacgaaacctcgctccctactgatctcaaccaaacccttccttccatggatttcggatggattgcctcgcttcctgatcataatcaaaactcttcaaacgataccggccaagcgtcgtgtcctcctggcctctaccagaccgtgcctccggaagaacactaccagacctttccaattcaagacccagaccagatgcattccacttccgacccttcccacagatcctccagcccagaactctcagagatgctcgagtacgatagaagccacaaatcattccccaccgatatcagccagatgagtccttcctcagaacatgaagtctggcagactgtgatcagccctgacctttcacaagtcacgctctcgccagaactgtcgcagacgaacctcagccccgatcttagccatactaccctctcgccagagcttatacaaagaaatctctcgcccgcattgggacaaatgccaatttcgccagacctgtcgcataccaccctgtcacccgacctgtcgcacactaccctgtcgctggacctctcgcaaactaatctgtcccctgaactgagtcaaactaacttgtccccagcgcttggccagatgcctctcagcccagatctctcccataccaccttgtccctcgatttttcgcaaacgaacctctccccagagctgtcgcacatgactctcagccctgaactttcccagacgaacctgtcgcccgcacttggccaaatgcctatctcacctgacctgtctcacaccaccctgtcgctcgacttttctcagaccaacttgagccctgaactgtcacaaactaatctttcccctgcgctggggcagatgcccctttccccagatcctagccacaccactttgtcgctcgacctttcacagaccaacctgtcgcctgaactctcacaaaccaacttgtcgcccgatctgtcagagatgccattgttcgcagatctttcccaaattccacttacccctgacctggatcaaatgacccttagccctgatctgggagaaaccgatctgtcgcctaactttgggcaaatgagcctcagtcctgatcttagccaagtcaccttgtctcctgacatttcggatacgactctgctgcctgacttgagccaaatttcgccaccaccagaccttgaccagatattctatccttcggaaagctcccagtcgctcctgcttcaagagtttaacgagtcctttccttaccccgatctgggacagatgccttcgccatcgtcaccaactctgaacgatacttttttgtccaaggaattcaacccactggtcattgtcggtctgagcaaagacggaaccgactacatcgaaatcattccgaaagaagaagtgcaatcgagcgaggatgattatgctgagattgactacgtgccttacgacgatccctacaagacggatgtgcggaccaacataaactcctcacgtgaccctgacaacattgctgcatggtacctgcgatcaaacaacggaaatcggcgaaactactacattgcggcagaggaaataagctgggactactcggagttcgtgcaacgggaaactgatattgaagattcggatgatattcctgaagatactacctacaagaaagtggtgttcagaaaatacctggactcaacttttaccaagcgggatccccggggtgagtatgaagaacaccttggaattctgggtccaataatccgcgcagaagtggatgatgtgatccaagtcaggtttaagaacctggcatcacgaccttactcacttcatgcacatggtctgtcctacgaaaagtcctccgagggaaagacctacgaagatgattcgccagaatggttcaaagaggacaacgcagtgcaacccaacagcagctatacctacgtctggcacgctaccgaacggagcggaccagaatcccctggttcagcatgtcgagcttgggcatattactccgctgtgaaccctgaaaaggatattcattccggacttatcggacctctcctcatatgtcagaagggaattcttcacaaggattccaatatgcctatggatatgcgggaatttgtgctccttttcatgacttttgacgaaaagaagagctggtactacgaaaagaagtccagatcgtcttggaggcttacctcctcagagatgaagaaatcgcacgaatttcatgcaataaacggcatgatttactcccttcccggtctgaagatgtacgaacaagaatgggtcagactgcatctgctgaatatcggggggagccaagatatccacgtcgtccattttcatggtcagacccttctggagaatggtaataagcaacaccagcttggagtgtggcctctcctcccgggcagcttcaaaaccttggaaatgaaggcatcaaagcccggatggtggctccttaacactgaagtgggagagaaccaacgagcaggaatgcagacgccattcctcattatggatcgagattgtaggatgccgatgggactgtccaccggtattatctccgactcccagattaaggccagcgagtttcttggttattgggaaccaaggcttgctaggttgaataacggaggttcgtacaatgcatggtcagtcgagaagctggcggccgagtttgcatcgaagccatggattcaagtggatatgcaaaaagaagtgatcattacgggaatccaaacccaaggcgccaagcattacctgaaatcgtgttacacgaccgagttctacgtggcgtactccagcaaccagattaactggcagatctttaaaggtaactccactcgcaacgtgatgtactttaacgggaactccgacgcatccaccattaaggagaaccagtttgaccctcctattgttgcaagatacatacgcatctcccctacccgcgcttacaatcggccaaccctccgtctggaactccaaggctgtgaggtgaatggttgctcaactcctctgggcatggaaaatggaaagatagagaacaagcaaattaccgcatccagcttcaagaaatcctggtggggtgattactgggagccattccgcgccaggctgaacgcccaagggagagtgaatgcgtggcaagcgaaggccaacaacaacaagcagtggctggaaattgatcttttgaaaatcaaaaagattaccgcaatcattacccaagggtgtaagagcctgtcatccgaaatgtacgtgaaatcttacaccattcattactcggaacaaggggtggaatggaaaccataccgcctgaagagctcgatggtggacaagattttcgaagggaacactaacactaaggggcacgtgaaaaacttctttaatcctccaatcatctctcgtttcattcgtgtcatacccaagacctggaaccaatcaatcgcgcttcgcctcgagctttttggatgcgacatctac

SEQ ID NO: 2294 - DNA, 6672 bp, Artificial Sequence
  derived and/or modified sequence
atgttcccgggatgtccccgtttgtgggtcctcgtagtccttggaacctcatgggtcggttggggatcccaaggaacagaggccgcacagctgaggcagttttatgttgctgctcaaggaatctcgtggagctatcgtccagaacctacaaattcgtccctgaacctcagcgtcacttcgttcaaaaagatcgtttaccgagaatatgaaccctattttaaaaaggaaaagcctcagtctaccatctccggtctattgggtccaaccctatatgccgaagtgggggatataatcaaagtgcacttcaagaataaggcggataaacctttgtcgattcacccacaaggaatacgttattctaagctgagcgaaggagcatcgtacctcgatcacacattccccgctgagaagatggatgatgccgttgccccaggtcgcgagtacacttatgaatggagtataagtgaggattctggaccaacccacgacgatccgccgtgtttgacccatatctactacagtcatgagaatctgattgaggattttaacagtggcctcataggtcctcttctgatttgcaaaaaaggtactttgacggagggaggaactcagaaaactttcgataaacagatcgtcctcctttttgccgtctttgacgaaagcaagtcttggagccaaagctccagcctaatgtatactgtcaacggatacgtcaatggtactatgcctgacattaccgtttgcgcgcatgatcacatctcttggcatctcctaggcatgtcgtcaggtcccgagctgtttagcattcatttcaatggacaggtccttgagcaaaaccaccataaggtctctgccattacccttgttagcgcgacttccaccaccgcaaacatgactgtcggtccggagggcaagtggataatcagttcactcacacccaaacacctccaggccggcatgcaggcgtacatcgatattaagaactgcccgaaaaaaacacgaaaccttaagaaaatcacgcgtgaacagcgacgacatatgaagagatgggaatatttcatcgccgctgaggaagttatctgggattacgctccggtcattcctgcaaatatggacaagaagtaccgttcccagcatttagataacttctcaaatcagatcggaaagcactataaaaaagtcatgtacactcagtacgaggatgaatctttcactaaacatacggtgaatccaaacatgaaggaagatggcatactaggtccaatcatcagagcgcaggtccgcgacacgctcaagattgtcttcaagaatatggcctcaagaccttatagtatctaccctcatggtgtgactttctcgccttacgaggacgaagtgaactcaagtttcacatctgggagaaataatacaatgatccgagctgtgcaacctggggagacatacacctataagtggaacatactcgagttcgacgagcctacagagaacgatgcccaatgtttaacacgaccatattattccgacgtcgacattatgcgcgacatcgcatctggtcttattggcctgctgctcatctgtaaatcgcgcagtctcgaccgaagaggaatccagcgcgctgccgacatagagcagcaggcagtgttcgcggtcttcgacgagaacaagagttggtacctggaggataacattaacaaattttgcgagaacccggatgaggttaagagagacgatcccaaattctatgagtccaatatcatgtctacgatcaacggttacgtccctgagtccatcaccactctcggcttctgcttcgatgatactgtgcaatggcacttctgcagcgtggggacacaaaacgagatactaaccatccattttacaggacattccttcatctatggcaagaggcacgaagacacgctcactctttttcccatgcggggggaatctgttacggtcactatggataacgttggaacatggatgctgacgtccatgaattcgtcgccgcgatctaagaagcttcgacttaagtttcgggacgtcaagtgtatcccagatgacgatgaggacagttatgagatctttgagcccccggagtccacagtgatggccacaagaaagatgcacgataggctggagccggaggatgaggagtctgacgctgattacgattaccagaacaggctcgccgcggccttaggaatacggtcgttccggaactcctcgttgaatcaagaggaggaggagtttaatctcacggccctcgcccttgagaacggcacggagttcgtgagctcgaacactgatatcatagtggggagcaactacagctcaccctctaatatctccaaattcacggtaaataacctcgctgaacctcagaaggcgccttcgcatcagcaggccaccaccgcaggtagtccgctcaggcacctcatcggcaaaaattctgtcttgaatagctccaccgctgagcatagctctccgtattccgaagacccgattgaagatccgcttcaaccagatgttactggtatacgattgctgtcgctgggcgctggtgagtttaagtcgcaggaacacgccaaacataaaggaccaaaggttgaaagggatcaggctgctaagcataggttttcctggatgaagcttctcgcgcacaaagtcgggcgccatctctctcaggatacgggttcaccatcaggtatgagaccgtgggaggaccttccatcgcaggacacagggtccccttcccgcatgcgtccctggaaggatccgccgtcagatctcctgcttctgaaacaaagcaattcctcgaagatcttggtgggccgctggcaccttgcgagcgagaaaggctcctacgaaatcatacaggacaccgacgaggatactgcagttaacaattggctaatttcgcctcaaaatgcaagtcgggcttggggagagtcgactcctctggccaacaagcccggtaaacagtccgggcatccgaaattcccacgggttcgacataaatctctccaggtgcggcaggacggagggaagtcccgactaaagaagtctcagttccttatcaaaactcgcaagaaaaaaaaggagaaacatacgcaccatgctccgcttagtccgagaacctttcatcctcttcgctctgaggcttataatacattttcggagcggcgcctgaagcattctctagtgttgcataaatccaatgaaacctccttgcccaccgacttgaaccaaacacttccttcgatggactttgggtggatcgccagtctccccgatcataatcagaattcgtcgaatgataccggccaggcatcctgtcctcctggcctgtatcaaaccgtgccacctgaagagcactaccaaacgttcccaatacaagaccccgaccagatgcattccacatccgatccgtcgcacagatcgtcttccccagagctctcggaaatgctcgagtatgatcggagccacaagtctttccccacggacatctcgcaaatgtctccctcgtccgaacacgaggtgtggcagactgtaatcagcccagatctctcacaggttaccctatcgccggagctgtcacagaccaacctatccccggatctgtcccacacgacacttagcccggaactgatacagcgcaacctctcacctgcgttgggtcaaatgcccattagtcccgatttgtcacacactaccctaagccccgatctatcccatacgacattaagtctagacctttcccagactaacctgtcgccggagttgtcccagaccaaccttagcccggctcttgggcagatgcccctttctccagatctgtctcatacaacgctgtcactggatttttcgcaaaccaatctctcgccggagttgtctcatatgaccctttcacctgaactctctcagacaaatctgtcacccgctttgggtcaaatgccaatctcgcctgatctatcccacaccacactaagtcttgacttctcccagaccaatctgtccccggagctttctcaaactaacctgagtccggcactgggtcaaatgcctttgagtcccgacccaagtcataccacactgagtctggacctgtcgcagactaatctttctcccgagctatcccaaaccaatttgagtcccgacctttccgagatgcccctcttcgctgatctttcacagatccctctgactcctgacctcgaccagatgaccctttctcctgatctcggcgaaacggacttgtctccaaacttcggtcagatgtcgttgagtcctgatctgtcccaagtcactctttccccagatatctccgatacaaccttacttccagatctctcgcagatttcacccccacctgatctggaccagattttctatccgagtgagtcatcccagtcactgcttttgcaggaattcaatgaatcttttccctatcctgatctcggacaaatgccgtctccgagcagccctacactgaacgacacctttctttccaaggaattcaacccactagtcatagtgggcttatcgaaagacggcacggattacatagagattattccgaaagaggaagtgcagtcgtcggaggatgactacgctgagattgattacgttccttatgatgatccgtataagacggatgtccggactaatataaactcctcgagagaccctgacaacatcgcagcctggtacctccggtcgaacaacggcaatcggcgtaactattatattgcggcagaagagatttcctgggactattccgagtttgttcaacgagaaaccgacatcgaagacagcgatgacatcccggaagataccacgtacaagaaggtggtatttcgcaagtacctcgactcgacctttactaagcgtgatccccgtggcgaatacgaagaacacctcggaatcctcgggccgatcatcagggccgaagtggacgacgtcatccaagtacggtttaaaaacttggcgtctcgtccttatagcctccacgctcacggcctttcttacgagaagtcttcagaaggaaagacgtacgaagatgattcgcctgagtggtttaaggaagataacgccgtgcagccgaactcctcgtacacatatgtttggcacgctacggagagaagtggccccgagagtccgggctccgcctgccgcgcttgggcgtactatagtgcggtcaacccggaaaaggatatccattccggtcttatcggcccgctcctgatctgtcagaagggaattttgcataaagactcaaatatgccgatggacatgcgagagtttgtgctcctattcatgaccttcgacgaaaaaaagtcctggtattacgaaaaaaaatctcgttcttcctggcgccttacctctagcgagatgaaaaaatcacacgagtttcacgccattaacggaatgatttattcgttacccggacttaaaatgtatgagcaagagtgggtcaggttgcatcttctgaacataggtgggtcacaagatattcacgtcgtacacttccatgggcagactttgctcgaaaatggcaacaagcagcatcaattgggcgtttggccgctccttccaggtagcttcaaaacactggagatgaaggcttcaaagcccggatggtggctcctcaatacagaagtcggtgaaaaccaacgcgctggtatgcaaacgccttttctcattatggatagagactgcagaatgcccatgggactcagtaccgggatcatcagcgatagccagatcaaggccagtgagtttcttggatactgggagccacgacttgcccgcttaaacaatggcggcagttacaatgcttggtccgtggagaagctggccgctgaatttgcgtcgaaaccctggattcaggtcgacatgcagaaagaggtcattataaccgggatccaaactcagggcgctaagcactatttgaaatcctgttatactaccgaattctatgtcgcttactcaagtaaccagattaactggcaaatcttcaaggggaatagtacacgaaacgtgatgtacttcaatgggaactccgacgcatccacgatcaaagaaaaccaattcgatccccccatcgtcgcccgttacatcaggatttctcctactcgtgcttacaacaggcccactcttcgcctagaactccaggggtgtgaggtgaacggctgcagtacacctttgggcatggagaatggcaaaatagagaataaacaaatcactgcgtcgtcttttaagaaatcatggtggggggactattgggagccgttcagagcacgcctaaacgcgcagggccgggtcaacgcttggcaggcgaaagcgaacaacaataaacaatggctggagatcgacttgcttaaaattaagaaaatcacagctatcattacccagggctgtaagtctttaagcagtgagatgtacgttaagtcatacacaatccattactctgaacaaggtgtcgaatggaaaccctaccgactgaagtcgtctatggtcgataaaatctttgaggggaacacaaacacgaaagggcatgttaagaattttttcaatcctccgatcatctctcgttttatacgtgtaatcccgaagacctggaaccagtcaatcgcattgaggttggagctcttcggatgtgacatatac

SEQ ID NO: 2295 - DNA, 6672 bp, Artificial Sequence
  derived and/or modified sequence
atgttccctggttgccctcgtctctgggtgcttgtagtgctcggcactagctgggtgggctggggatctcagggcaccgaggccgcccagctccgtcagttctacgtggctgctcagggaatctcctggtcttaccggccagagccaaccaatagcagtttgaatctctccgtcaccagctttaaaaaaatcgtgtaccgggagtatgagccatacttcaaaaaagagaagccccagtccacaatttctgggctgttgggtcctaccctgtacgccgaagtcggagacatcattaaggttcactttaaaaataaggccgataaaccacttagcatccatccacagggcatacggtactcaaaactctccgaaggagcttcttatctggaccacacattccctgccgagaaaatggacgacgctgtggcccctgggagggaatatacgtatgagtggtctatctcggaagactctggacctacccatgacgacccaccatgcttgacgcatatatactactctcacgaaaacctgatcgaggatttcaacagcggcctgattggtcccctactgatctgtaagaagggcactctgactgaaggagggacccagaaaactttcgacaaacagatcgtcctgctttttgcagtcttcgatgaatccaagagctggagtcagagctcttcactgatgtacactgtaaacggttacgtcaacggcaccatgcccgacattaccgtctgcgcccacgatcacattagttggcacctgttgggtatgtcttcagggccagagctcttttcgattcatttcaatggccaggtcttggaacagaatcaccacaaggtttcagcaataactctcgtgtctgcaaccagcaccactgccaatatgaccgtgggcccggaaggaaagtggatcatctcctccctcaccccaaaacacttgcaggcaggcatgcaggcctatattgatatcaagaattgccctaagaagacacggaacctgaagaagatcaccagagagcagcgacggcatatgaaaaggtgggagtacttcatcgctgccgaggaagtgatctgggactatgcccccgtcattccagctaacatggacaagaaatacagatcccagcacctggacaatttctcgaatcagattggaaagcattataaaaaagtcatgtacacacagtacgaggacgagtcattcactaaacacacggttaaccctaacatgaaggaagatggcatcctgggacccatcatccgtgcgcaggtccgcgacacacttaagatcgtttttaagaatatggctagccggccctattcaatctacccacacggtgtcacattcagcccttacgaggatgaagtgaattcatcgttcacaagcggccgaaacaacaccatgatccgcgcagtgcagccgggagaaacctatacatataagtggaacatactagagttcgatgagccaacagagaacgatgctcagtgccttacgcgcccttactactctgatgtcgacattatgcgcgacatcgcttccggcctgatcggcctgctccttatttgcaagagcaggtccctcgaccgtaggggtattcaacgggctgccgatattgagcagcaggccgttttcgccgttttcgacgagaacaaatcctggtacctggaagacaatatcaataagttttgcgaaaacccagatgaggtaaagcgagatgaccccaaattttacgaaagcaatattatgtccactataaatggctacgttcctgaatccattactacgcttgggttttgttttgacgacactgtgcagtggcatttttgcagcgtgggtacacaaaacgagatcctgacaattcattttactggacactcctttatttatggcaaacggcacgaggatacactcacactcttccccatgagaggcgaatccgtcaccgttacgatggacaacgttggaacgtggatgctcacatccatgaattcaagtccaaggtccaaaaagctacgcctaaagtttcgagacgtgaagtgcatccctgacgatgatgaggactcatatgaaattttcgagcctcccgagagcactgtgatggccacccgaaagatgcacgatcggctcgagcctgaggacgaggaatctgatgctgattatgattatcaaaacagactggcggccgccctagggatccgatcttttcggaacagctcattgaaccaagaagaagaagaattcaacctgacagccctggcccttgaaaacggcaccgaatttgtaagctcgaacactgatattatcgttgggagcaattactccagcccctctaacatctccaagttcaccgttaacaatcttgcagaaccgcagaaagctccatcccatcagcaggcaacgaccgccgggtccccgctgaggcacctaattggtaagaacagtgtcttgaactcgtccactgcagaacactcctccccctacagcgaggaccccattgaggaccccctccagcccgacgtcaccggcattcgtcttctgtcactcggggccggagaattcaaatcgcaagaacatgccaaacataagggaccgaaagtggagcgtgatcaggccgccaagcatagattcagctggatgaaattgctggctcataaagtgggccggcatcttagccaggacaccggttcaccctcaggtatgcggccatgggaggacctgccaagccaggacacaggatctccaagccgcatgagaccttggaaggatccaccatccgacctcctactcctaaagcagagtaactcctccaagatcttggtaggacgatggcaccttgcttcagagaaaggatcttatgagattatacaggacactgatgaggacactgccgtgaacaattggcttatcagcccacaaaacgccagtcgcgcctggggcgaaagcacccccctggccaataagccgggcaaacagtccggacaccctaaatttcctcgcgtccgccacaagtcgctgcaagtgcgccaggacggtggcaaaagcaggctgaagaaaagccagtttttgattaagactcgtaagaagaagaaggagaagcacacccaccacgctcccttgagccctcggactttccacccactgagatctgaagcatataatactttttctgaacgccgcctgaagcattctctcgttcttcacaagagcaacgaaaccagtcttccgaccgatctcaaccagacactgcccagcatggatttcgggtggatcgcctcactgccagatcacaaccaaaactcatcaaacgatacgggccaggcctcctgcccacctggactgtatcaaacggtccccccggaagagcactaccagacatttccaatccaggaccccgaccaaatgcacagtacctcagatccctctcatcgatctagctcgccggagctcagtgagatgctcgaatacgacaggtcccacaagtccttccctacggatatttctcagatgtccccctcgtctgagcatgaagtctggcagaccgtgatttctcctgacctttcacaggtgactctgagccctgagttgtcccaaacaaacctaagcccggacttgtctcatactaccctgtcaccggagctaatccagcgcaaccttagtcccgcactcggtcagatgcccatctctcccgatctcagccatacaacgctctcgcccgacttgagccatacaaccctatccctggacttgagccagacgaacctgagtccagagctttctcaaactaacttgagcccggctctgggacagatgccactcagtcccgacctttcgcacaccactctaagcctcgatttttcccaaaccaatctcagtccggaactgtcacacatgacattgtctcctgaactaagccagactaatctgtcacctgccctcggccagatgccaattagccccgacctttcccacaccactttgtcccttgactttagtcagaccaatctgagtccagagctgtcacagacaaatctatcccccgcacttgggcagatgccgctgagtcccgacccttcacacactactctgagcctagacctgagccagacaaatctgagccccgagttatctcagacaaacctgtctcccgacctgtcagagatgcccttgtttgccgacctgtctcaaatcccgttgacccccgacctggaccaaatgactctgtctccggatctgggcgagaccgatctgagccctaacttcggccaaatgtcactttcccccgacctctcacaggtaacactctcccccgatatatccgataccaccctgctgcccgacttgagccagatttcccctccacccgaccttgatcagatattttatccaagtgagtcatcccagtcactcctacttcaggagttcaatgaaagtttcccctatcccgacttggggcagatgccatccccaagttcacccacgctgaatgataccttcctctcaaaggagtttaacccgcttgtgatcgtggggctttccaaggatggcaccgattacattgaaatcatccctaaggaggaggtgcagtcctctgaggatgattatgcagagatcgactacgtgccttatgacgacccttataaaaccgatgtgagaactaacataaactcgtccagggatcccgacaacatcgctgcctggtacctgaggtccaacaatggcaatcgccggaattactatattgctgccgaggaaatcagctgggactatagcgagttcgtgcagagggagacagatattgaagattccgacgacatccctgaagacaccacttataagaaagtcgttttcagaaaatatctggattccacctttactaaacgagatccgagaggtgaatatgaggaacaccttggcatcctgggtcctatcatacgcgcggaagtcgatgacgtaatccaagtccggttcaaaaacctggcttctcggccgtatagtctccacgctcatgggctgtcttacgagaaaagtagcgaaggaaagacctacgaggatgacagccccgagtggttcaaagaagacaacgcggtgcaacccaactcctcttacacctatgtctggcacgcaaccgagcgatctggtccagaaagtcctgggtccgcctgtcgggcctgggcctactacagcgccgtcaatccagagaaggacatacattcaggcctgatcgggcccttactgatttgtcaaaaggggatcctgcacaaggactcaaatatgcccatggatatgcgggagtttgtattgctgttcatgacgtttgacgaaaagaaaagttggtactatgaaaagaaaagccgatcgagttggcgcctgaccagttccgaaatgaagaagagccatgagttccacgcaatcaacggaatgatctactcacttccgggcctgaagatgtacgagcaggagtgggtgcggctgcatcttctcaatatcggagggtcccaggatattcatgtagttcattttcacggacaaacacttctcgagaacgggaacaagcaacaccagctgggcgtgtggcccctcctgccgggcagtttcaagaccctggaaatgaaggctagtaagccagggtggtggctgcttaacaccgaggtgggggagaatcagagggctgggatgcagaccccttttctgattatggatcgggattgccgcatgccaatggggctgtctacaggcatcatcagcgatagtcagatcaaagcatccgagtttctgggttactgggagccaaggctcgcaagactgaacaatggaggcagttataacgcctggtccgttgagaagttggcagctgaattcgcgtccaagccttggattcaagtcgatatgcagaaagaagtcatcatcaccggcattcagacacagggagccaagcactatcttaaatcctgttatactactgaattttacgttgcctactcctcaaaccaaattaactggcaaatctttaagggaaacagtactcggaacgtaatgtacttcaatgggaactctgacgcatccacgatcaaggagaatcagttcgacccacccatagtggcacggtacatacgtatcagcccaacccgcgcttataatcggcctacccttcgcctggaactccagggctgcgaagttaacgggtgctcaactccactgggtatggaaaatggaaaaatagaaaacaagcagattacagccagttcgttcaagaagtcctggtggggggattactgggagcccttcagagcccgactgaatgcccagggaagggtcaatgcctggcaggccaaggcaaacaacaacaagcagtggctggagattgacctgctgaagattaagaagataaccgcgattattacacagggctgcaagtcactgtcctccgagatgtatgttaaatcttatacgatacactatagcgaacagggtgtcgagtggaagccctatagactcaaaagctccatggtggacaagatattcgagggaaacaccaacacaaaggggcatgtaaaaaacttttttaatcctcctatcatctcacggttcattcgtgtaattcctaaaacgtggaaccagtcaatcgctctccgcctggagttgttcggctgcgatatctac

SEQ ID NO: 2296 - DNA, 6672 bp, Artificial Sequence
  derived and/or modified sequence
atgttccctgggtgccctcggttgtgggttctggtcgtcctggggacctcctgggtgggctggggctctcagggtactgaggccgcccagcttcggcaattctatgttgcagcccaagggatcagctggagttaccgccctgaacctaccaactctagcctgaacctgtctgtcacttcattcaaaaagatagtgtatcgagaatatgagccctactttaagaaggagaagccgcagtccacaatatcagggctcctgggacccactttgtatgccgaggtgggcgatatcatcaaggtgcactttaagaacaaagctgataaaccactgagcatccacccccagggaatccgttattctaaactgtccgagggggcctcctatctggatcataccttccccgcagagaagatggatgatgctgtcgctcccgggcgcgaatacacatacgagtggtccatcagcgaagactcagggcctacgcacgacgatccaccgtgcctgacccacatatattacagccacgagaatttgattgaagatttcaactccgggctgatagggccgctgctgatctgcaagaaaggcacattgaccgaggggggcactcagaaaactttcgacaagcagattgtgttgctgttcgcagtctttgatgagtcaaagtcttggtcccaatcaagtagcctcatgtataccgtgaatggctacgtgaacggaacgatgcccgatatcaccgtgtgcgctcatgatcacattagttggcatctgttggggatgtcgtcaggccccgagctgtttagtattcactttaacggtcaggtgctggagcagaaccatcacaaggtgagtgcaatcaccttggtcagtgcgacaagtacaaccgctaatatgaccgtcgggcccgaaggcaagtggatcattagcagtctcacaccaaagcatctgcaggcaggtatgcaggcttacattgatatcaagaattgtcccaagaaaactcgcaaccttaagaagataacacgtgagcagcggcgccacatgaagaggtgggagtatttcatagctgctgaggaagtgatctgggattatgccccagtgatccccgctaatatggacaagaagtacaggagccagcatctggataatttctccaatcagatcggcaagcactacaaaaaagtgatgtacacccagtacgaggatgagtctttcacaaagcacacagtgaaccccaacatgaaggaagatgggatcctggggcccataatacgcgcccaggttcgcgacacactcaagattgttttcaagaatatggcgagtagaccctattctatataccctcacggcgtcacattttccccctatgaagatgaggtgaacagctcgttcacctccggtaggaataacaccatgattagggccgtgcaacctggggagacatatacctacaaatggaacattctcgagtttgacgaaccaacagaaaatgacgcccagtgcctgacaaggccttactactctgacgtggatatcatgcgggatatagccagcggactgattggtctgttgttaatctgtaagagcaggtcgttggacagaagaggtatacagcgcgccgccgatatagagcaacaagcagtgtttgctgtcttcgacgagaataagtcatggtatctcgaagataacataaacaaattttgcgagaaccccgatgaggttaagagagatgaccctaaattttacgagtccaatattatgtctacaatcaatgggtacgtccctgagtccatcacaaccctggggttttgcttcgacgatacagtgcaatggcacttctgctcagtgggtactcagaacgagattttgacgatccacttcacaggccatagctttatttacggcaaacggcatgaagacacgctgacactttttcccatgcgcggcgaatcagtcaccgtgacgatggacaatgtaggaacttggatgctgacctcaatgaactcttcaccaaggtcaaaaaagctgcgcctgaagttcagggatgtgaaatgcatacctgacgatgacgaggatagttatgagatatttgagccaccagagagcacagtgatggccacgagaaaaatgcacgataggctggagcctgaggatgaagagtcagacgcagattacgactaccagaaccggctggctgcagcactggggatacgctctttcaggaattcatcgttaaaccaggaggaggaggagttcaacttgacggctctggcgctagaaaacgggaccgaattcgtctccagcaatactgacatcattgttggctcgaactacagctctcccagcaatattagcaagtttacagtgaacaacctggccgaacctcagaaagcgcccagccatcagcaagctacaacagcgggctctccgctgagacacctcatcggcaagaacagcgtgctgaattcctcaactgctgaacattcgtctccctatagcgaggaccccattgaggatccgttacaaccagatgtgacaggaattaggctgctcagtctcggtgccggagagttcaaatcacaggaacacgccaaacacaaagggccaaaggtcgaaagagatcaagcggcaaagcatcggttctcttggatgaagcttcttgcgcacaaagtcggtagacacctatcccaggatacaggaagcccatctggcatgagaccctgggaagacctaccctctcaggatacagggtctcctagtaggatgagaccctggaaggatccccccagtgacctgctcctcctcaaacagagcaattcttccaagatactcgttggacgctggcacctcgcatcagagaagggctcttacgagattatccaggacactgacgaggacaccgccgtgaacaattggctaatttcacctcaaaacgccagccgtgcttggggggaatccacgccactggccaataaaccgggaaagcagtcagggcaccccaagtttcccagagtaaggcataagagcctgcaagtgaggcaggatgggggaaagagccggcttaaaaagagccagttccttatcaaaacaagaaagaagaaaaaggagaaacatactcatcacgcccctctgtctccccgcacgtttcatccactcaggtccgaggcttacaatacattcagtgagcggagacttaagcattctctagtgctacataagagcaatgaaacttcactgccaaccgacctaaatcagacccttcctagcatggactttggttggatcgcatcgctgccagaccataaccaaaattcttctaatgacacgggtcaagcatcatgcccacctggcctgtaccagacagttcctccggaggaacactatcagacgttcccgatccaggacccagaccagatgcactctactagtgatcccagccaccggagtagtagcccagagctgagcgaaatgttggagtatgaccggagccacaagagcttccctacggatatttctcagatgtcgccaagcagtgagcacgaggtttggcagacggtcatttcacccgaccttagccaggtgactcttagccccgaattgtcacagacaaacttaagtcccgatctgtcacacaccactttatccccagagttgatacaacggaacctttcccccgccctggggcagatgcctatttctccggatctcagtcacactacactctctcctgaccttagtcacacaacgttgagcctggatttgagtcagactaacctgagccccgagctgtcgcagaccaacctgtcccctgccctgggacaaatgccattgtctcccgatctgtcacacaccaccttatccctcgacttctcccagactaatctgtctcccgaactatcccatatgacgcttagtcccgagttgagccagacaaatctgtcgcccgcgcttggccagatgccaatctcccctgatctatctcataccactttatcccttgatttctcccagaccaatctgtctcctgaactcagtcaaactaacctgtccccggctctcggtcagatgccgctctccccagatccctctcacacgactttgagtctggacctgtcacagaccaacctctctcccgagctgagccagacaaatctatccccagatttatccgagatgcctctgttcgctgacctgtcgcagatccctctgaccccggatctggaccagatgaccctcagccccgacctcggagaaacggatctgagtccaaacttcgggcagatgtctctgtctcctgacctatcccaggtgaccctcagcccagacatttctgatacgacattgttacctgatctatctcagatctcgccacccccggacttggatcaaattttctacccatccgaatcttcccagtcattacttctccaggagtttaacgaatcattcccataccctgacctaggccagatgccctcccctagctcgcctaccctaaacgatacattcctttctaaggagtttaacccacttgtgatcgtggggttatcgaaggatggcacagactacatcgagattattcccaaagaagaggtgcagtcaagcgaggatgattacgccgagattgattacgtgccctatgacgacccgtacaagaccgatgtgcgaacaaatattaatagtagtcgtgatccggataacattgctgcttggtacctgaggtccaacaatgggaacagacgaaactactacattgctgctgaggagatcagctgggactactcagagtttgtgcagcgcgagacagacatcgaagattccgatgatatcccagaggataccacctacaaaaaggtagtcttcaggaagtacttggactctactttcactaaacgcgatccacgaggagaatacgaggaacatctcggcatcctgggcccaattattcgtgcagaggtggatgatgtgatccaggtcagattcaagaacctggcctcccgcccgtacagtctacacgctcacggcctttcttacgagaaaagctctgagggcaaaacttatgaggatgacagccccgagtggtttaaagaagataacgcggtgcagccaaacagctcctatacctacgtgtggcacgctacggagagatcaggcccagagtcccccgggtccgcctgtcgtgcttgggcttattattctgcagtcaatccggagaaagacatccattcagggttgataggaccactgctcatctgccagaagggaatccttcacaaagactcaaacatgcccatggatatgcgcgagttcgtcctgctgtttatgacttttgacgaaaagaaatcctggtattacgaaaagaaaagcagatctagctggaggctgacaagctccgagatgaagaagtcccatgaatttcacgccataaatggtatgatctacagtctgcctggacttaagatgtacgaacaggagtgggttcgcctgcacctcctgaatatcggggggtcacaagatatccacgttgtacacttccatggccagacacttctggagaatggaaacaagcagcaccaattgggtgtctggcctttgctgcccgggtcgtttaaaacgctggaaatgaaagcctccaaaccaggttggtggctccttaacacggaggtaggggagaaccagagggctgggatgcagacgccatttttgattatggaccgagactgtcgcatgcctatggggctctcaactggaattataagtgattcccagatcaaagcctcagagttcctgggatattgggaacctcgtctcgcccgcttaaacaacggtgggtcctataatgcatggtcggtcgaaaagttagctgccgagttcgcaagcaaaccgtggatccaggttgatatgcagaaagaggtaattatcaccggaatccagacacagggcgccaagcattacttgaaaagttgttatacgacagaattctacgtggcctacagctctaaccagattaattggcagatttttaagggcaactccactagaaatgtgatgtattttaacgggaactctgacgcgtcaaccataaaagaaaatcagtttgacccaccgatcgtcgcccgttacatccgtattagccccacgagagcttataacagaccaacactacgccttgagttgcaaggctgtgaagtgaacggttgctctacgccattgggaatggaaaatggtaagatagaaaataagcagataacagctagttccttcaagaagtcctggtggggggattactgggagccgttccgagcgcgcctgaatgcacaggggcgcgtgaatgcctggcaggccaaagccaacaacaataaacaatggctggagatcgatcttctgaaaatcaagaaaatcaccgcaattatcacccagggatgcaagagtctgtcgtctgaaatgtacgtgaagagttacactattcattacagcgagcaaggggtggagtggaaaccttatcgtctgaaatcatctatggtcgataaaattttcgagggcaacaccaatactaagggccacgttaaaaatttctttaacccccctataatatctcggtttattcgcgttatccctaagacatggaatcagtcgatagccctgagactggaactgttcggttgcgacatttat

SEQ ID NO: 2297 - DNA, 6672 bp, Artificial Sequence
  derived and/or modified sequence
atgttccccgggtgcccccgtctgtgggtgctggtcgttctcggcacaagttgggttgggtggggtagtcagggaaccgaagccgcccaacttagacagttctatgtggccgcccagggaataagctggtcctatagaccagagcctacgaatagttccttgaacctttccgtgacttccttcaagaagatcgtctatcgtgaatatgagccctactttaagaaggagaaaccccagtctactatcagcggcctgctgggtcctacactgtacgccgaagtgggggacatcatcaaagtgcactttaagaataaagctgataaacccctgtcaatccaccctcaaggtattcgctattccaagctgagcgagggcgctagctacttagatcacaccttccccgcggagaagatggacgatgcagtggctcccggccgcgaatacacttatgagtggtcaatctctgaggacagcggccctacacatgatgaccctccttgcctgactcacatttattattctcatgaaaatctgatcgaagattttaattccggactaattgggccccttctgatctgcaaaaagggaaccctcacagaggggggaacacagaagactttcgacaaacagatagtcctgttattcgccgtattcgacgagagcaagagctggagccagtcaagttccttgatgtataccgtgaacggctacgtgaatggaacgatgcctgatatcacagtctgcgctcacgaccatatcagctggcacctgctcggcatgtcatccgggcccgagctcttttcaatccatttcaacggacaggttctggaacaaaaccaccataaggtgtcggcgatcaccctcgtctctgccacgtccaccactgcaaatatgacagtcggcccagaaggtaagtggataatatcctcacttacacctaaacacctccaagcgggcatgcaggcctatatcgatattaagaactgtccaaagaagacccggaaccttaagaagatcacccgcgagcagcgacggcatatgaaaaggtgggaatacttcatcgcagctgaggaggtgatctgggactatgccccagtgatccccgcgaatatggataagaaatatagatcacagcacttagataatttctctaatcagatcggcaaacactacaaaaaggttatgtatactcagtatgaagatgaatctttcacaaagcataccgtgaaccctaatatgaaggaggatggaattctgggtcctattattcgagcgcaagtgcgtgatactctaaagatcgtattcaaaaatatggccagcaggccttactccatctaccctcatggtgttaccttttccccgtacgaagacgaggttaacagttcatttacaagcgggcgaaacaacactatgattcgagcagtccagcccggcgagacatatacctacaagtggaacatacttgaattcgatgagccaactgagaatgacgcgcagtgcttgacccgaccatattacagtgacgtggatattatgagggacattgcaagcgggttgatcggcctcctcctaatctgtaagtcgagatctttagaccggcggggaatccagcgagcagcggacatagagcaacaggcggtgttcgctgtctttgatgaaaacaaatcctggtatcttgaggacaacatcaacaagttttgcgaaaaccctgatgaagtcaagcgcgacgaccctaagttctatgagagcaatataatgagtacaattaatggatacgtacccgaaagtatcaccactctgggattttgctttgacgataccgtacagtggcatttttgctctgtcggaactcagaacgaaatactgaccatccacttcaccgggcacagcttcatctacggtaaacgacatgaagacacactgacactttttccaatgcgcggtgaatctgtgacagtgaccatggacaacgtcggaacgtggatgctgaccagcatgaactcgagtccccgatccaaaaaactgaggcttaagtttcgggatgtaaagtgcatccctgatgacgatgaagactcctacgaaatcttcgagcccccagagagcaccgttatggccacacgcaaaatgcacgaccggttggaacctgaagacgaggagagcgatgccgattacgactaccagaatcgccttgctgctgctctgggcattcggtctttcagaaacagctctttaaaccaggaagaggaggagtttaacttaactgccctcgctctggagaacggtaccgagttcgtgtcatcgaacaccgacataatagtcggcagcaattattctagcccctcaaatatctcgaaattcaccgtaaacaatctggcagaacctcagaaggcgccttctcaccaacaggcaacaactgccggatctcctctacgccatttaatagggaagaatagtgtgcttaattcttctactgccgagcattcgtcaccatacagcgaggaccctatagaggaccctctgcagcctgacgtcacaggcatccgcctgctgtctctaggagcaggggaattcaaatcccaagaacatgctaagcacaagggacccaaagttgaacgtgatcaggcggccaagcatcgatttagctggatgaaactgctggcccataaggtcggcaggcacctgtctcaggacaccggaagtccttccggtatgaggccatgggaggacctgccatctcaagatacaggatcaccgtcccggatgcgcccatggaaggaccctccatcagacctcctgctgctgaaacagtccaacagctcaaagatcctggtgggtagatggcaccttgcatccgagaaaggtagttatgaaataattcaggatactgacgaagatacagcagtgaataactggctcatatccccacaaaatgcatctcgcgcctggggggaatccacccctctggctaataagccaggcaagcagagcggccatcccaagttcccccgggttaggcataaaagcctgcaggtccgtcaagacggagggaaatcaaggctgaagaagtctcaattcctgatcaaaacccgcaaaaaaaagaaagagaaacatacccaccacgctcctctttcaccacggacgttccacccactccgctcagaagcgtacaatactttcagcgaaaggagattgaaacatagtcttgtgctccataaatccaatgagacgagcctgccgactgatttgaaccagactctgccctccatggattttgggtggatcgcttctctacccgaccataaccagaactcatcaaacgacaccggccaggcctcgtgcccgcctggactgtaccagactgtaccaccagaagagcattatcagacctttcccatccaggatccagaccagatgcactccacaagtgaccctagccacagatcaagtagccccgaattgtcagagatgctcgagtacgaccgcagtcataagagcttcccaacagacatctcacaaatgtccccatcttccgagcacgaggtttggcagacggtgatcagtcccgatttgagtcaggttactttatctccagagctcagccagaccaatctttcccctgacctatctcacaccaccctgagtccagagctcatccagagaaacctgagccccgcattgggtcagatgcccatcagccccgatctgagtcacacaacgttgtcccctgatctgtcacatacgaccctgtctcttgatctgagccagactaatcttagtcccgaattgtcgcaaacgaacttatcccctgcactagggcagatgccactttcacccgacctctcacacacgaccctcagcttagacttcagtcagaccaaccttagtcccgaactctctcacatgacgctaagccctgagctgtcccagactaatctgtctcccgctcttggacagatgcccatctcccccgatttaagccataccacactgtccttggatttttcacagacaaacctgtcaccagaactcagccaaacaaatttgtccccagctctggggcaaatgccgctcagcccagatccgagtcatacgacattatctttggacctcagtcaaacaaatttaagccccgaactgtcacagaccaatctgtctcctgacctttcagagatgcctctgtttgctgatctgagtcagattcccttaacacctgacctcgaccaaatgactctaagtcctgatctgggagagacagatttgtctccgaacttcgggcagatgtccctgtctcccgatctctcccaggtgactctctccccggacatcagtgacaccaccctgctccctgacctctcacagatttcaccacccccagacttggatcagatattctaccccagcgagagcagtcagagcctgcttctgcaggaatttaacgagagctttccatatcccgatttagggcagatgccatctccctctagcccaacactcaacgatactttcctgtccaaagagtttaaccccctggttatcgtgggcctgagcaaagatggcacagactacatagaaatcatacctaaggaagaagttcagagtagtgaagacgattatgccgagatcgattacgtgccatatgatgacccttacaagacagatgtccggaccaacattaacagctcgagggatcccgataacatcgccgcctggtatctcaggagtaacaatggcaatcgacgtaattattatatcgctgccgaggaaataagctgggactacagcgagttcgtccaaagggagacggacattgaggactcggatgatattcctgaggacacaacctacaagaaggttgtgtttcgaaagtacctcgatagcacgttcaccaaaagggatcctagaggagaatatgaggagcacctaggtatccttggcccaatcatcagagccgaggtggatgacgtgattcaggtacggttcaaaaacctggctagccggccctactcccttcacgcccacggtttatcctacgaaaaatcctccgaggggaaaacctacgaggacgattccccagagtggttcaaagaggataatgcggtccagcctaattcctcatacacttatgtttggcacgccaccgaaaggtcaggacctgaatcaccgggttccgcttgccgcgcctgggcatactattccgctgtgaacccagagaaagacatccattccgggctgatcggtcccttgctgatctgtcagaagggtatactccataaagactccaacatgcctatggatatgcgcgagttcgtcctgctgtttatgaccttcgacgagaaaaagtcctggtactacgaaaagaagagccgctcctcatggcgtctgacttcttccgaaatgaaaaagagtcatgaatttcacgctatcaatggaatgatctactcattgcctggactcaaaatgtatgaacaggaatgggtccgtttgcatctactgaacataggaggctcccaggatatccacgtcgttcacttccacggccaaaccctcctggaaaacggcaataagcagcatcaactgggggtctggccattgctgccgggcagctttaagacactggaaatgaaagctagcaaacctggttggtggcttctcaacaccgaagttggagaaaaccagcgcgccggtatgcagacacctttcctcataatggatagagattgccgtatgcctatggggctcagcaccggaatcattagcgatagccagattaaagcctcagagtttctgggatactgggagccaagactggcacggctgaacaatggtggaagttataatgcctggagcgttgagaaactggctgctgagttcgcatcaaagccctggatccaggtggatatgcagaaagaggtgatcatcactggaatacagacgcagggcgccaaacattatctgaagagctgttacacgacggagttttacgtagcatattcaagcaaccaaatcaactggcagattttcaagggcaatagcaccagaaacgtcatgtatttcaacggcaactcagacgccagcactattaaggagaaccagttcgaccctcctattgtggccagatacataaggatcagtccaactcgcgcatacaatcgaccaacactgcgccttgagctgcagggttgcgaggtaaatggttgttccactcccctggggatggagaacggaaaaatcgaaaacaagcagatcacagctagctcgtttaagaaaagttggtggggcgattattgggagccatttcgcgctcggctgaatgctcaggggcgcgtgaacgcctggcaggccaaggccaacaataacaaacagtggctcgagattgacctcctgaaaattaagaagattaccgctattattacccagggctgcaagtcgctgtcctcagagatgtatgtgaagagctatacgatccactattcagagcaaggcgtggaatggaagccttataggctgaagagctccatggtggataagatattcgaaggcaataccaacaccaagggacatgtgaaaaacttttttaatccgcctattataagcaggttcatacgcgttattcctaaaacttggaaccagtcgattgctttacgactcgagctctttgggtgtgacatatac

SEQ ID NO: 2298 - DNA, 6672 bp, Artificial Sequence
  derived and/or modified sequence
atgttcccaggttgccccagactttgggttctggtcgtgctgggtacctcctgggtgggttggggaagccaggggactgaggcagcacaactgcggcagttttatgtggcggcgcagggcatatcgtggtcctaccgtcctgaacccactaattcctcgctcaatctgtcggtgacttcgttcaagaaaatcgtgtatcgagaatatgaaccatactttaagaaggaaaaacctcagtcaaccatctcaggcttgctgggacctaccctttacgcagaggtgggcgatatcattaaagtgcatttcaaaaacaaggcagacaaacctctttccatccacccgcagggcatcagatactcaaagctgtcggagggagcatcttaccttgatcacacctttccagcagaaaagatggacgacgcagtcgccccgggcagagagtacacttacgaatggtcgatatcagaggactccggcccaactcatgatgaccccccttgtctgacccatatctactactctcatgaaaatcttatcgaagatttcaactcgggtttgatcggacctctgttgatttgtaagaaagggaccctgactgaaggtggaactcagaaaactttcgacaagcaaatagtcctcctgtttgccgtgtttgatgaatcgaagtcgtggtcccagtccagctcattgatgtacactgttaatgggtacgttaacggtactatgccagatataaccgtctgtgcacatgaccatatttcatggcatctcctggggatgtcgagtggacccgagctcttttcaattcatttcaatggccaggttctcgaacagaaccatcataaagtgtccgccataactttggtgtcggcgaccagcaccaccgctaacatgactgtcggtccagaaggaaaatggatcatatctagcctgactcccaagcacctccaagcaggtatgcaagcctacatcgacataaagaactgccctaagaaaactaggaacttgaagaagatcactcgtgagcaaaggagacatatgaaacggtgggagtactttattgcagcagaggaagtgatctgggattacgcccctgtaattcctgcaaatatggataagaagtatagatcacaacatctcgataacttctccaatcagattggaaaacattacaaaaaggtgatgtacactcaatacgaagatgaatcatttacgaagcacactgtgaacccaaatatgaaggaagatggaatcttgggtcccattatccgcgcgcaagtccgggataccctgaagatcgtctttaagaacatggcgtcgaggccttactccatttatcctcatggtgttaccttctccccttacgaggacgaggtgaactcgagcttcaccagcggacggaacaatacgatgattagagccgtgcaaccaggtgaaacctacacttacaagtggaatattctggagttcgacgaacctaccgagaatgacgcacagtgtcttacccgcccatactacagcgacgtcgacattatgcgggacattgcaagcggcttgattggactccttctcatctgcaaatcccgcagccttgatagaaggggaattcagagagcggcggatatagagcagcaagcagtctttgcagtgttcgacgagaacaagagctggtaccttgaggacaacatcaataagttttgcgaaaaccccgatgaggtgaagcgcgacgacccgaagttctacgaaagcaacattatgagcaccattaacggttacgtgcccgaatcgattaccactctgggattttgttttgatgataccgtgcagtggcatttctgttcagtgggcacgcagaatgaaatactcaccatccacttcaccggtcattccttcatttacggtaagcgccacgaagatactctgactctgttccctatgcgaggagaatcagtcaccgtgactatggataacgtggggacctggatgctgacttccatgaactcgtcaccaagatcgaagaagttgagacttaagttcagggatgtcaagtgcatccccgatgacgatgaggatagctacgagatctttgaaccccctgagtcaaccgtgatggcaacgcgtaagatgcatgaccgactggaacctgaggatgaggaatcagatgcagactacgattaccaaaaccggctggctgcagcgcttggcattcgatcttttcgcaatagctcgctgaaccaagaggaagaagagtttaaccttactgcactggcactggaaaacggaactgaattcgtctcatctaacactgacattattgtcgggtcaaactattcgtcaccaagcaacatttcgaagtttacggtgaataacttggcagagcctcagaaagcccctagccaccaacaagcaaccaccgcaggaagccccctgcgacacctgattggcaagaacagcgtccttaacagctccaccgccgaacattcaagcccatactcggaggatcccattgaagatccacttcagcctgacgtgacgggtattaggttgctctccctgggtgcaggggaattcaaatcgcaagagcatgcaaagcacaaaggacctaaggtggagagagatcaagccgcaaagcacagattctcgtggatgaagctgctggcgcataaggtgggccggcatctgtcacaggataccggtagcccatccggtatgcgtccttgggaagatctcccttcccaggatactggaagcccatctcgaatgcggccatggaaggacccgccatcggatctgctgcttctgaagcaatcaaacagctcgaagatccttgtcggcaggtggcatcttgcgagcgaaaagggctcatacgagattatccaagataccgatgaggatactgcggtgaacaactggctcataagcccccaaaacgcatcgagagcctggggtgaatcaactcccctggccaacaaacctggcaagcaatcgggccatcctaagtttccaagagtcagacacaagtcactgcaagtgagacaggatgggggaaaaagccgcctgaaaaagtcgcaattcctgattaagactagaaagaaaaagaaggaaaagcacacccaccatgcacccctgtcccctagaacttttcaccctctgagatctgaagcctacaacacttttagcgaaaggagacttaagcattctctggtcctgcacaaatccaacgaaacttcactccctacggatcttaaccaaactctcccgtccatggattttggttggatagcgtcgctgcctgaccacaatcaaaactcgtcaaacgatactggtcaagcctcctgtcccccaggcctttaccagaccgtgcctcctgaagaacattaccaaactttcccgatccaagaccctgaccagatgcattccacctcagatccttcacaccggagctccagcccagagctttcggaaatgctcgaatacgacagatcacacaaatccttcccgacggacattagccaaatgtccccaagctccgaacatgaggtgtggcagaccgttatctcgccagatctcagccaagtcaccctctcgcctgaactctcccaaacgaacctttcacctgatctcagccacaccaccctcagccctgaattgattcaaagaaacctgtcgcccgcacttgggcaaatgcctatttcaccggatctttcacataccacccttagcccggatctttctcacacgacgcttagcttggatctttcccaaactaatctctcccctgaactgtcccagactaatctgagcccggcacttggacagatgccactctcccctgacctgtcgcacacgaccttgtccttggacttctcacaaacgaatctctcaccagagctgtcacatatgaccctcagccccgaactgagtcagacgaacctttcccctgcacttgggcagatgcccatttccccagatctctcgcataccacgttgtcccttgattttagccagaccaatctttcaccagaattgtcccagaccaacctgtcaccagcacttggtcagatgcccctttcgcctgatccttctcatacgacgctttcacttgacttgtctcaaaccaacctctccccagagctcagtcagaccaacttgtccccggaccttagcgagatgcctctgtttgccgacctgagccaaataccgttgacccctgatctggaccagatgactctcagccccgatctgggggaaactgatctgtcacctaatttcgggcaaatgagcctctcccccgacctttcccaggtgacgctctcaccggacatctcggacacgaccctgttgcctgatttgtcgcaaatcagcccgcctccagatctcgatcaaatcttctacccatctgagtcgtcacagtcactcctcttgcaggagtttaatgagtcgtttccctaccctgatctgggtcaaatgcctagcccttcctcaccaacgcttaatgataccttcctgtcgaaagagttcaacccgcttgtgatcgtcggactctccaaggatgggactgattacattgagataattcctaaagaggaagtgcaatcatccgaggatgactacgcggaaatcgattacgtgccgtacgacgatccgtacaagactgatgtcagaactaacattaacagcagccgagatcccgataacatcgcggcatggtacctccggagcaataatgggaatcgtaggaactactatatcgcggctgaagaaatttcgtgggattactccgagtttgtgcagcgcgaaaccgatattgaagattccgatgatatcccagaggatactacgtacaagaaggtcgtgttccggaaatacttggacagcacctttactaaaagagatccccgcggagaatacgaggagcaccttgggattctgggacccattatccgggcagaagtcgatgatgtgattcaggtgcgctttaagaatctcgcttcccgtccatattcactgcatgctcacggtctttcctacgagaagtcgtccgaaggaaagacttacgaggatgattcccctgaatggtttaaggaagataacgcagtgcagcccaattcgtcctacacttacgtctggcatgcaaccgaaagatcaggacccgaatcgccagggtcggcgtgtagggcctgggcgtactactcggctgtgaaccctgaaaaggacattcacagcggactcatcggaccacttctcatatgtcagaagggtatcctgcacaaggattcaaatatgcctatggatatgagggagtttgtccttctgtttatgaccttcgacgaaaagaagtcctggtactacgagaaaaagtcgaggtcgtcatggagacttacttcatccgaaatgaaaaagagccatgagtttcatgcaattaacggtatgatttactcacttcccggactcaaaatgtacgaacaggagtgggtgcgactgcatctgcttaacatcggtggcagccaagatatccatgtggtgcattttcatggccaaaccctgctcgagaacggaaacaagcaacaccagctgggagtgtggccactccttccagggagctttaagactcttgaaatgaaggcatcgaagccaggctggtggctgctgaatactgaagtgggagagaaccaacgtgcaggaatgcaaactccatttctgattatggatagagattgcaggatgcctatgggactgtcaactgggattatcagcgactcacaaatcaaggcaagcgagtttcttggatactgggagcctcgtctcgcgaggctgaacaatggtggttcgtacaatgcgtggagcgtggagaaacttgcggctgaattcgccagcaagccatggatccaagtggacatgcagaaggaggtcatcattaccggtattcaaacccaaggagctaaacattaccttaaaagctgctacaccactgaattctacgtggcatacagcagcaatcagattaactggcagattttcaaaggaaactcgactcgcaacgtgatgtactttaacgggaactccgatgcaagcaccataaaggaaaaccagtttgacccaccgatcgtggcaagatacattcgcatctcacctaccagagcatacaatcggcctacgctccggctcgaacttcagggatgtgaagtgaacggttgctcaaccccgctgggtatggagaacggaaagattgagaataagcagattaccgcatcgtccttcaaaaagtcctggtggggtgattattgggaaccattcagagcgagactgaatgcgcaaggaagagtgaatgcatggcaggctaaggctaataacaataagcagtggctggaaatcgatctgctgaaaatcaaaaagatcaccgctatcatcactcaagggtgtaagtccctgtccagcgaaatgtacgtgaaatcttacaccattcattactccgagcaaggagtggaatggaagccgtatagactgaaatcatcaatggtggacaaaatctttgaaggaaatactaataccaaaggtcacgtgaagaactttttcaacccccctattatctcacgcttcatacgagtcattcctaaaacttggaatcagagcattgccctgaggcttgagctctttggctgtgacatttac

SEQ ID NO: 2299 - DNA, 6672 bp, Artificial Sequence
  derived and/or modified sequence
atgtttccgggctgcccacgcctgtgggtgctcgtcgtcctggggacttcttgggtcgggtgggggtcgcagggtaccgaggctgctcagctcaggcagttctatgtcgctgcgcaaggcatctcctggtcgtaccggccagaacctactaattcctccctcaacctctcggtgaccagcttcaagaagatcgtgtacagagaatacgagccgtacttcaagaaggaaaagccgcagagcaccatcagcggactgctgggaccaactctgtacgcagaggtgggagacatcatcaaggtccatttcaagaacaaggccgacaagccattgtcgatccacccgcagggcatcagatactcgaaactctccgagggagcatcctatctcgaccacactttcccggccgagaagatggacgacgcagtggcaccaggacgggagtacacctacgagtggtccatctcggaagattcaggcccgactcatgatgatccaccgtgcctgacccatatctactactcacacgaaaatctcatcgaagacttcaactccggcttgatcgggccactcctcatctgtaagaagggaaccttgaccgagggaggaactcagaagactttcgacaagcagatcgtcctgctgtttgccgtttttgacgagtcaaagtcctggtcgcagtcgtcatcactgatgtatacggtgaacggttacgtgaatgggactatgcctgacattaccgtgtgtgctcatgaccacatcagctggcacctcctcggaatgtcatcggggcctgaacttttcagcatccacttcaacggacaagtgctcgaacagaatcaccacaaagtgtccgctatcacccttgtctcagcaacttcgactaccgcaaacatgactgtgggccctgagggcaaatggattatctcaagcctcacgccaaagcacttgcaggccggaatgcaagcgtacatcgacatcaaaaactgtccgaagaaaactcgcaatttgaagaaaatcaccagagaacagcgccggcacatgaagcggtgggaatactttattgctgccgaagaggtgatctgggactacgcgcctgtcatcccggccaacatggacaagaagtacaggtcgcagcacctcgacaatttctcaaatcaaatcggaaagcactacaaaaaagtgatgtacactcagtacgaagatgagagcttcaccaaacataccgtcaaccctaatatgaaggaagacggcatcctgggcccgattatccgggcccaggtgcgcgacactctgaagattgtcttcaagaatatggcctcccggccatacagcatctacccgcacggcgtgaccttctccccatacgaggacgaggtcaatagctcgttcacctcaggcaggaacaacaccatgatcagggcagtgcaacctggcgaaacgtacacttacaagtggaacatcctcgaattcgacgaaccgaccgaaaatgatgcacaatgcctgacgcgtccgtactacagcgatgtggacatcatgcgggatatcgcttccggcctgatcggtttgcttctgatctgcaaatcgcggtcgctcgaccgcagaggtatccagcgcgccgcggacatcgagcagcaggccgtgttcgcagtgttcgacgagaataaatcctggtatctggaagataatatcaacaagttctgcgagaatccggacgaggtgaaacgcgacgacccgaagttttatgaatcgaacatcatgtcgaccatcaacggctacgtcccagaatcgattaccactctgggcttctgcttcgacgataccgtccagtggcatttctgttcggtgggaactcaaaatgaaattctgaccatccatttcactggacacagcttcatttatgggaagagacacgaggacaccttgactctgttcccgatgagaggagaatcggtgaccgtcaccatggacaatgtgggcacttggatgttgacctcgatgaactcctcgcccagaagcaagaagctgcgtctgaaatttagagacgtgaagtgcatcccagacgacgatgaggacagctacgagatcttcgagccacctgagtccactgtcatggccaccagaaagatgcatgatcggctggaacctgaagatgaggagagcgacgctgattacgactaccagaaccgactggcagcagcacttggtatccgctcgttccgcaattcctccctgaaccaagaggaagaggaatttaacctgactgctttggcactggaaaacggcactgaatttgttagctcgaacactgacatcatcgtgggctcgaattactcctcaccatccaacatatccaagttcaccgtcaataatctggctgagcctcaaaaggctccgagccatcagcaggcaactaccgccggctccccgctccgccatctgatcggaaagaattccgtgctcaacagctcgaccgccgagcatagctccccgtacagcgaagaccctattgaagatcctctgcagccagacgtgactgggatccgactcctctcactgggagcgggtgagtttaaatcgcaggagcatgccaagcataaggggcccaaagtggaacgggatcaagcggccaagcaccggttcagctggatgaagctgctggctcataaggtgggccgccacctgtcacaggacaccgggtccccatccggaatgaggccttgggaagatctgccgagccaggataccgggagcccttcccgtatgaggccgtggaaggatccgccgagcgatctgctgctgttgaaacaatccaactcatccaagatcctggtggggagatggcacctggccagcgagaagggatcctacgaaatcatccaggatacggacgaggacaccgcggtgaacaactggctcattagcccacaaaacgcgagcagggcatggggagagtcaaccccactggcgaataaacccggaaagcagtccggccacccgaagttcccgcgggttcggcataagtcgctccaagtgagacaggacggcgggaagtcacgcctgaagaaatcgcaattcctgattaaaacgcggaagaagaaaaaagagaaacacactcatcacgccccgctctcacctcggaccttccacccacttcgctcggaggcttacaacaccttttcggaacgccgcctgaagcattccctggtcttgcacaagtcaaacgagacttccctgccgactgatctgaaccagaccctgccgtcaatggacttcggatggattgcttctttgccagaccataaccaaaactcgtcaaacgacactggacaagcgtcctgcccacctgggctgtatcaaaccgtgccacctgaagaacactaccagacttttcccatccaggacccggaccaaatgcatagcacttcggatccttcgcaccgctcgtcgagcccggaattgtcagaaatgctcgaatacgacagatcccacaagtcgttcccgaccgatatttcccaaatgtcgccaagctcggagcacgaagtttggcagactgtgatcagcccagatctgtcccaagtcacgctgtcgccggaactctcgcaaaccaacttgtcgccagacctttctcatactaccctctctccggaactcatccagcggaatcttagtccagctcttggccagatgccgatttccccggacctttcccacacgactctgagtccggatctctcccatacgaccctgtcccttgacctcagccagacgaatttgtcgcccgagctgagccaaactaatctcagtcctgcgctcggtcagatgcctctctcacctgatctcagccatactactctctcgctcgacttctcgcagaccaatttgtcgcctgagctctcccacatgaccctgagccctgaactcagccagaccaatctgagccctgccctcggacagatgccgatctcgcccgacctctcgcacactactctgtcgttggatttttcccagactaatctgtccccagagctcagtcagactaacctttcaccggctttgggccagatgcctctttcgccagatccatcccacactaccctgtctctggatttgagccaaaccaacctgtcccccgagctgtcgcagaccaacctgagccccgatctcagcgagatgcctctgtttgcggaccttagccagatccctctgaccccggaccttgaccaaatgaccctctccccggatttgggcgaaaccgacctgtcgccaaattttgggcaaatgtcgctctcaccggacctctcgcaggtgaccctgtcaccggacatttcagacactaccctcctcccggacctgagccaaatctccccgccgccggatttggaccagatcttctacccatcagaatcttcgcaatcgctgctgctgcaggaattcaacgagtcttttccgtacccagacctgggtcaaatgccatcaccctcatccccgaccctgaacgacactttcctctcgaaggaattcaacccattggtcatcgtgggactctcgaaggacggaaccgactacatcgagatcatcccgaaggaagaagtccagtcctcggaagatgactacgcggaaatcgactacgtgccgtacgacgatccgtacaagaccgacgtgcggaccaacatcaatagctcacgcgacccggataacattgcggcctggtacttgagatcgaacaacggaaaccgcaggaactactacatcgccgcggaggaaatctcgtgggattacagcgagttcgtgcaacgcgaaactgacattgaagattcagacgacatcccagaagacaccacttataagaaggttgtcttccggaaatacctggattccacttttaccaagcgggacccacggggagagtacgaggagcacctcggaattctgggaccaatcatcagagcagaggtcgatgatgtcatacaggtgagatttaagaatctggcatcccggccctattcgctgcacgcacacgggctgagctacgagaagtccagcgaaggaaagacctacgaagatgactcccccgaatggttcaaagaagacaatgccgtccagcccaacagctcgtacacttatgtgtggcacgctacggagaggagcggaccagagtcacctggaagtgcctgtcgggcctgggcctactactccgcagtgaatcccgaaaaagacatccactctggactcatcggcccgcttctcatctgccagaaaggcatcctgcataaagacagcaatatgccgatggatatgcgggagttcgtgctcctgtttatgaccttcgacgaaaagaaatcatggtactacgagaaaaagtcgcgcagcagctggcgccttacctcctcggagatgaagaagtcccacgagttccatgctatcaacggaatgatctactcgctgccaggacttaaaatgtacgaacaggaatgggtcagactgcacctgctgaatatcggagggtcccaagacatccacgtggttcacttccacgggcaaacgctgctggaaaacggaaataagcagcaccagctgggggtctggccgctgcttccaggatcgttcaaaaccctcgaaatgaaggcgtcgaagcccgggtggtggctgctgaacaccgaggtgggagagaatcagcgcgcgggcatgcagacccctttcctgatcatggaccgggactgtaggatgccgatgggactgtccaccggcatcatctccgactcccaaatcaaggcttcggagttccttggttactgggaacctcgacttgctagactcaataacggaggatcctacaacgcctggtcggtggaaaagctggcggctgaattcgcctcgaaaccgtggatacaagtggatatgcagaaagaggtgatcatcaccggaatacagacccagggtgcgaagcactacctgaagtcttgttataccaccgagttttatgtcgcgtactcgtcaaaccagattaactggcaaattttcaagggcaactcaactaggaacgtgatgtatttcaatggcaattcagacgcctccactattaaggaaaaccaattcgacccacccatcgtcgctcggtatatcaggattagcccaaccagggcatacaaccgcccgactctccgcctggaactgcagggatgtgaggtcaacggatgctcaacccctctcggcatggaaaatggcaagattgagaataagcaaatcaccgcgtcctccttcaagaaatcgtggtggggggactactgggaaccgttccgagctcggttgaacgcacaggggcgcgttaatgcttggcaagctaaggcgaataacaacaagcagtggctcgaaattgacctcctgaagatcaagaagattaccgccattatcacccagggatgcaaatcactgtcgtcggaaatgtatgtcaagtcttacactatccactactcggaacagggggtggaatggaaaccgtatcggttgaaatcgtcgatggtcgacaagatcttcgaaggcaacactaacacgaagggtcatgtaaagaacttcttcaatccgccgattatctcccgctttatcagagtgatcccgaaaacctggaaccagtcgatcgctctcaggctggaactcttcggttgcgacatctac

SEQ ID NO: 2300 - DNA, 6672 bp, Artificial Sequence
  derived and/or modified sequence
atgttcccggggtgcccaagactctgggtgctggtcgtgctgggaacctcctgggtgggatggggctcccagggaaccgaagccgcgcaacttagacagttctacgtcgccgcgcaaggaatctcctggtcgtatcggccggagcctactaattcaagcctgaacttgagcgtcacctcattcaaaaagatcgtctaccgggagtacgaaccatacttcaaaaaggaaaaacctcaaagcaccatctcaggcttgctcggaccgactctgtacgccgaggtcggagacatcattaaagtccatttcaagaataaggctgacaaacctctgagcatccacccacagggaattcgatactcgaaactctcagagggcgcctcatacctggaccacactttcccagcagaaaagatggacgacgcggtggctccagggagagaatacacgtatgagtggtcgatttcagaagattctggcccgacccacgacgaccccccatgcctcacccacatctactactcccatgaaaaccttatcgaggacttcaactccggactgatcggacccctgttgatctgtaagaagggcaccctgacggaggggggaactcaaaagacttttgacaagcaaatcgtgctcttgttcgccgtttttgatgaatcgaaatcgtggtcacagtccagctccctgatgtacaccgtgaacggatacgtgaatggcaccatgccggatatcaccgtctgcgcgcacgaccatatcagctggcatctgctcggcatgtcgtcgggcccggaactgttcagcatccatttcaacgggcaggtgcttgaacaaaaccatcacaaggtgtctgccatcactctggtgtcagccacctcaactactgcgaacatgaccgtgggaccagaggggaagtggatcatcagctcattgactccaaagcacctgcaggcgggcatgcaggcttacattgacattaagaattgtccaaaaaagactcgcaacctcaagaagatcacccgcgaacagcgacgtcacatgaagagatgggaatacttcatcgccgctgaagaagtgatctgggattacgctccggtgattcccgccaacatggacaagaagtataggtcgcaacaccttgacaacttttcaaatcaaatcggcaagcattacaagaaggtcatgtacacccaatacgaggacgagtcgttcactaagcacaccgtcaacccaaatatgaaggaagatggcatcttgggaccgatcatccgggcccaggtgagggacaccttgaagatcgttttcaagaacatggcgtctaggccatactccatctacccacacggtgtcactttttcgccgtacgaagatgaggtgaactcgagctttacctccgggcggaacaacacgatgatcagagccgttcaacctggtgagacttacacctacaagtggaatatcctcgagttcgacgagcccaccgagaatgacgcacaatgcctgactagaccgtactactccgacgtggacattatgcgggacatcgcctccggactcatcggtctgctgctgatttgtaagtcaagatccctcgacagacgcggcatccagcgcgcagccgacattgagcaacaggcggtttttgctgtgtttgatgagaacaagtcctggtacttggaggataacatcaataagttttgcgaaaaccctgacgaagtgaagcgcgacgatcccaagttttatgaaagcaatatcatgtcgacgatcaacggatacgtcccggaatcgatcactactcttggtttctgctttgacgataccgtccagtggcatttttgctcggtcggaacccagaacgagatcctgactatccattttaccggccacagcttcatctacggaaaacgccacgaggacactcttaccctctttcccatgcggggcgaaagcgtcaccgtcaccatggataacgtgggtacctggatgctgaccagcatgaatagttcgccgcgcagcaaaaagctcaggttgaagttccgggatgtgaagtgtatcccggacgacgacgaggattcctatgagattttcgagccacccgaaagtaccgtaatggcgactaggaagatgcatgatcgcctggaacctgaagatgaagagtcggacgccgattatgattaccaaaaccggctggccgctgcgctggggatccgctccttccgcaattcgagcctgaatcaggaagaagaggagtttaatctgaccgccttggccctcgaaaacggaaccgagtttgtctcctcaaataccgatatcatcgtcggttcgaactactcgagcccgtcgaatatctcaaaattcacggtgaacaacctggccgagccgcagaaagcgccgtcgcatcagcaggccaccaccgccggatccccgctgcgccacctcataggcaagaactcggtgttgaactcgagcacggccgagcactcctcaccctactccgaggatccgatcgaggaccctctccagccggacgtgactggaattaggctcctgagcctgggagccggcgagttcaaatcccaggaacacgcgaagcacaaagggcccaaggtggaacgcgaccaagctgcaaagcatagattctcctggatgaaactcctcgcccacaaggtgggacggcacctctcgcaggatacgggatccccgtcaggaatgcggccctgggaggacctcccaagccaagacaccggaagcccgtcgagaatgcggccgtggaaggacccaccgtcagacctcctgctgcttaaacagagcaacagcagcaagatcctggtgggacggtggcacctggcatcagaaaaagggagctacgaaatcattcaggataccgacgaggacaccgcggtgaacaactggttgatctccccacagaatgcatcgcgcgcgtggggcgaatcgacccccctcgccaacaagcctggcaaacagtccggacaccctaagttcccccgggtgcgccataagtccctccaagtcagacaagatggagggaaatcgcgtcttaagaagtcgcaattcctgatcaagactaggaaaaagaaaaaggaaaagcacactcatcatgcgccgctgtcgcctcgaacctttcacccgctgagatccgaggcttataacactttctcagaacggaggcttaaacacagcctggtgctgcacaagtcgaatgaaacctcacttcccactgacctcaaccaaaccctgccgtctatggacttcggatggatcgcctcgctgccggaccacaaccaaaactcctctaacgataccggacaggcctcatgccccccgggactgtaccagaccgtgccaccggaagagcattaccaaacttttccaatccaagacccagaccagatgcactccacttcggatccgtcacataggtcctcctcgcctgagctgtcagaaatgttggagtacgacagatcgcacaagtccttcccgaccgatatctcgcagatgtccccatccagcgaacacgaggtgtggcaaaccgtgatcagcccggacctgtctcaggtgacccttagcccagagctctcacagaccaatctctctccagacctctcacatactacgctcagcccagaactgatccagagaaacctgtccccagctctcgggcagatgcccatctcgccggacttgtcccacactaccctttctccagacctgtcccacaccacgttgtccctggacctgtcccagaccaatctgtcaccggaactgtcccagactaatctctcgccagccttggggcaaatgcctctctccccggatctgtctcacaccactctgagcctcgattttagtcaaactaacctttcgccggagctctcccacatgactctttcgcctgaactttcacaaactaatctgagtccagctctgggacagatgccgatttctcccgatctctcacataccaccctctctctggatttctcccagacgaacctctcccccgaactgtcccaaaccaacctgtcgccggctctcggacagatgcccctctcacctgacccaagccacacgactctcagcctcgacctttcccagactaacctgtcaccggagctgtcccaaacgaatttgagcccagatctgtcggaaatgccgctgttcgccgatctgtcgcaaatcccactcactccggatctcgatcagatgaccttgtctcctgatctgggagaaacggaccttagcccgaatttcgggcagatgagcctctcgccagacctttcacaagtgaccctctcgcctgacatctctgatacgacgctgctgccggatctgtcgcagatatcgccgcccccggacctggaccagatcttctacccgtccgaaagctcgcagtcgctgctccttcaggaattcaatgagagctttccgtacccggatctcggccagatgccgagcccatcgtccccaacgctgaacgatactttcctgagcaaggagttcaaccctctggtgatcgtgggactttctaaggacggaactgactacattgagatcatcccgaaagaggaagtgcaatcgagcgaggacgattacgctgaaatcgactacgtgccttacgacgatccatacaagaccgacgtgagaaccaatatcaactcctcgcgcgacccggacaatattgcagcatggtaccttaggagcaacaacggaaacaggcggaattactacatcgcagcagaagaaatctcctgggattactcggaattcgtgcaacgggagactgacatcgaggactcggacgacatcccggaggatacgacttacaaaaaggtggtgttccggaagtacctcgactcgacgtttactaaaagagatccgcgcggtgagtacgaagaacatcttggcatcctgggaccaatcattcgtgcagaagtggacgacgtcatccaggtgcgcttcaaaaatctcgccagccgcccatactcccttcacgctcacggtctgtcgtacgaaaagtcctcagaaggaaagacttacgaggatgattcgcccgaatggttcaaggaagataatgcagtacaacctaattcctcttacacttacgtatggcacgccaccgaacgctccggacctgagagcccggggtccgcatgcagagcgtgggcgtactacagtgcagtcaacccggaaaaagatatccatagcggccttatcgggccgttgctgatttgtcagaagggaattctgcataaagacagcaacatgccgatggatatgcgcgagttcgtcttgctcttcatgactttcgacgaaaagaaatcatggtactacgagaaaaagtcgcgttcttcatggcgactgactagctctgaaatgaagaagtcccatgagttccacgccattaatggaatgatttactcacttccgggactgaagatgtatgagcaggaatgggtgagactgcatctgctgaatatcggaggatcccaagatatccacgtggtgcacttccatggacaaactctgctggagaatgggaataagcaacatcagctgggagtctggccactcttgccgggatcgttcaagactctggagatgaaggcttcaaaacctggttggtggctgctgaacaccgaggtgggcgaaaatcagcgcgccggaatgcagactccttttctcattatggatagggactgcagaatgccgatgggcctgtcaaccggcattatctcggactcccagatcaaagcatcggaattcctgggatattgggagcctcgcttggcacgccttaacaacggtggatcatataacgcatggtccgtggaaaagctggccgcggaattcgcgtcgaagccatggattcaggtcgacatgcagaaggaggtgatcattactggtatccagacccagggagctaaacactacctgaaatcctgctacactactgaattctacgtggcgtactcaagcaaccagatcaactggcagatctttaaggggaactccactcgcaatgtgatgtacttcaacgggaactccgatgcgtcgactatcaaagagaaccagttcgatcctcctatcgtggccagatacatccggatctcgcctacccgcgcgtacaaccggccgactctgcgactggaacttcagggttgtgaggtaaatggctgcagtacccccctgggaatggaaaacgggaagattgagaacaagcagattaccgcctcatcgttcaagaagtcatggtggggcgactactgggagcccttcagggcacggctcaacgcgcagggccgggtcaatgcatggcaagcgaaagcgaacaacaataagcaatggctggaaatcgacctgctgaagatcaagaagattaccgccatcatcacccagggttgcaagtcgttgtcgtctgaaatgtacgtgaagagttacaccatccattactcggagcagggcgtggagtggaaaccgtaccgtctgaaatcctcaatggtcgacaaaatcttcgaaggaaataccaacaccaagggccacgtgaaaaactttttcaatcctcccatcatttcccgcttcatccgcgttatcccaaagacgtggaaccagtctatcgccctgaggctggaattgttcggatgcgacatatat

SEQ ID NO: 2301 - DNA, 6672 bp, Artificial Sequence
  derived and/or modified sequence
atgtttccaggctgcccaagactctgggtgcttgtggtgctaggaacatcttgggtgggttggggcagtcaaggcactgaggccgcacagctgcggcagttttacgtggcagctcagggcatctcatggtcctaccggcccgagccaacaaatagctcactcaacctgtcagtgacaagcttcaaaaaaattgtttacagagaatatgaaccctacttcaaaaaagaaaagcctcagtccactatctctggtctgctgggaccaacactgtacgctgaggtgggcgacatcattaaagtgcatttcaaaaacaaggctgacaaacctttgtccattcacccacagggaattcgatactccaagcttagtgagggcgcttcctaccttgaccatacctttccagccgagaaaatggacgacgcagtcgcgcctggcagagagtatacttacgagtggtctatctcagaggattccgggcccacgcacgatgaccctccttgtctgacccacatctactactctcatgaaaacctgattgaagattttaactctggccttattgggcccctactgatttgcaaaaagggtaccctcacagaagggggtacccagaaaacatttgacaagcagattgtcctgctttttgccgtctttgacgaaagcaaaagctggtctcagagctcctctctgatgtacaccgtgaacggttatgtgaatggtaccatgcctgacatcaccgtgtgcgcacacgatcacataagttggcacctgttgggtatgagttcagggcctgagttgttttccattcactttaacggccaagtacttgagcagaaccaccataaggtgtccgctattacactggtgtctgctacaagtactacggcaaacatgactgtagggccagagggaaaatggataatcagctccctgacacccaaacatcttcaagcaggcatgcaggcatatatagatatcaagaattgcccaaaaaagactaggaatttgaagaaaattacgcgggagcaacgacgacatatgaagcgatgggaatatttcattgcagcagaggaagttatatgggactacgctcccgttatccccgcaaacatggacaagaagtacagatcacagcacctggataatttcagcaatcagataggtaagcattacaagaaagtgatgtatactcagtatgaggacgaatccttcaccaagcatactgtcaaccccaatatgaaggaggatgggatcctgggcccgatcatccgggcacaggttcgggacacccttaaaatagttttcaaaaatatggcctcccgaccctattccatctatccacacggtgtaacattttccccctatgaagatgaggttaactcaagcttcacatccggcaggaacaataccatgattcgcgcggtccagccaggtgaaacatatacatataagtggaatatcctggaatttgatgaacccaccgagaatgatgcacagtgcctcacccggccctattattctgatgtagacattatgcgggacatcgcttcaggccttataggactgctcctaatctgcaagtcaaggtccctggaccggagggggatccaaagagcggctgacatcgagcagcaagctgtctttgccgtctttgacgagaataagtcctggtaccttgaagataacatcaataagttctgcgagaatcctgacgaggtcaagcgggacgaccctaagttctatgagagtaatatcatgagcaccatcaatggatacgttccagagtcaataaccactctgggcttctgctttgatgacacagttcagtggcacttttgtagtgtgggcactcaaaatgagattctgaccatccatttcactggtcattcttttatctacgggaagaggcacgaagatactctgaccctgtttccgatgcggggggagagtgtgacagtcaccatggacaatgtgggaacgtggatgctcacttcgatgaatagctcacctaggagcaagaaactgcgattgaagtttcgcgatgtgaaatgtatccccgatgacgacgaggatagctacgaaattttcgagccccccgaatctacagtaatggctacgcggaagatgcatgatcgactggagcccgaagacgaagaatctgatgcggattatgactaccagaatagactggcagccgcactcgggataagatccttccgtaattcatcgctgaaccaggaagaggaggaattcaatctgacagctctagctctagagaatgggaccgagtttgtcagctctaatactgacataattgtcggctccaactatagttcaccaagcaatatctcaaaattcacagtgaataaccttgccgagccacaaaaagctccctctcatcagcaggccacgaccgcagggagtcccctgcgacatttaattggtaaaaatagcgttcttaacagttccacagcggaacattcttcaccttattcagaggatccaatcgaggaccccctgcagcctgatgtcaccggaattagacttctatctctcggggccggcgaatttaaaagccaagagcatgccaaacacaaaggaccaaaggtcgaaagagatcaagctgctaagcaccgcttcagctggatgaagcttctcgctcacaaagtgggacgccacctgagccaggacacaggcagcccatccgggatgagaccatgggaggacctgcccagccaggacacgggctccccttccagaatgaggccttggaaggatcctccttcagacctgctgcttctgaagcagagtaattcttccaaaatccttgtcgggcggtggcacctagctagcgaaaaaggcagctacgaaataattcaggacaccgacgaagacaccgctgtgaacaactggctgataagcccacagaacgcatcccgtgcttggggagagtctactcctttggccaacaagcctggcaaacagtccggacatcccaaattcccccgcgtgcggcataagagcctgcaggtacgccaggacggtggaaaaagtcgtcttaagaagtcacagtttcttatcaaaacgaggaagaagaagaaggagaaacatacccaccacgcgccactgtctccaaggacattccatcccctgagatctgaggcttacaatacattttcagagagaaggctaaagcattctttggtgttgcacaagtcaaacgaaactagcctgcccactgatctgaatcagactctcccctccatggacttcggttggatcgcctctctgccagatcacaaccagaatagtagtaacgataccggccaggcttcatgccctcctggactataccagactgttcctccagaagagcattatcaaaccttcccgatccaggatcctgatcagatgcacagtaccagtgatccaagccacagaagctccagccctgagctttccgagatgctggagtacgaccggtcgcacaaaagctttcccaccgatatctctcaaatgtccccatcaagcgaacatgaagtctggcagactgtgatctcacccgacctgagccaggtgaccttgtcccctgagctgagtcaaacaaatttgagccctgacctctctcacactaccctttctcctgaattaatccagaggaacctgagtccagcactgggacagatgcctattagtcccgacctctcacatacaacgctaagcccagacctgagccacaccactctcagtctggacctaagccagacaaacctgtcacctgagctctctcagactaacctgagtcctgctctgggtcagatgcctctgagtcctgacctgtctcacaccacattgtccttggacttcagccaaacaaacctcagtcctgagctgtcccacatgaccttgtctcctgagctgtctcagaccaatctctcccctgccctcgggcagatgccgatatccccggatctctctcacacaacattgtcgttggattttagccaaacaaacctgtcccccgaactgtcccaaacaaacctgagcccagcattgggtcaaatgcccttatctcctgatccctcgcacaccaccttatccttagatttgagccagaccaatctctcccctgaattgtcgcagacaaacctcagccctgacctgtccgaaatgccactgttcgcggatctctctcagatccccctgaccccggacctggaccagatgaccctctctcctgaccttggcgaaacagacctgagtccaaacttcggacagatgagtctgtccccagatttatcccaggtaactttgagccccgatatctccgataccacgcttttacccgacctgagtcagatttccccacctccagacctggaccagattttctaccctagtgagtcgtcgcaatcactgctcctacaggagtttaatgagtcttttccgtatccggatctgggacagatgccttcaccatctagcccaaccctgaatgatacattcctctcaaaggagtttaacccactcgtgattgtaggcctgtcgaaggacggcactgattatatagaaattattccaaaggaagaggtgcagtcctcagaggacgattatgctgagattgactacgtgccgtatgatgacccctacaagacagatgtcagaaccaacatcaacagctcaagggaccccgataatatagccgcttggtatttgcggtctaataacggaaatcgtcgtaattactacatagctgccgaagagatctcttgggactactctgagtttgtgcagagagaaaccgacatcgaggactcagacgatatcccagaggacaccacatataagaaggtggttttcaggaagtatctcgattcaaccttcactaagcgggaccctagaggggaatacgaggaacacctaggaattctgggcccaataattcgagccgaggtggatgatgtcattcaggtgcgtttcaagaacctggcctcacggccctacagcttgcacgctcacggcctgtcatacgaaaagtcctctgagggcaagacctacgaagatgattctccagaatggtttaaggaagataacgcggttcagcccaacagtagctacacttatgtctggcacgcaacggaacgttcaggaccagagagcccggggagtgcatgtcgcgcttgggcctattatagcgccgtgaaccccgaaaaggacattcattccgggttgatcggccccctgctgatttgtcaaaagggcatcctgcacaaagatagtaatatgcccatggacatgcgggaatttgtgttacttttcatgacctttgacgaaaagaaaagctggtactacgaaaaaaagagccgcagttcttggagactgactagttctgagatgaagaaaagccacgaattccacgcgataaacggcatgatttacagcctacccggtctaaagatgtacgagcaggaatgggttcggctgcatctcctcaatatcgggggctcacaggatatccacgtcgtgcactttcacggccagacacttctggagaatggaaataaacagcatcaacttggggtctggcccttgctgcctggtagtttcaaaaccctggaaatgaaggcctcgaaacctggctggtggctgctgaatacggaagtgggcgagaaccagagagccggaatgcagactccctttttgatcatggaccgggactgtagaatgccaatgggactctccaccggtatcatctctgactctcaaatcaaagcaagcgagttcttaggatattgggaaccccgcctggcgcgcctgaacaacggcggaagttacaatgcatggagtgtggaaaagctcgctgcagaattcgcctcgaaaccatggatccaggtcgatatgcagaaggaagtcatcattacagggatacaaactcaaggagcgaaacactacttaaagtcatgctataccacagagttctacgtggcctactcttctaaccagataaactggcaaatctttaaagggaactccacccgcaatgtaatgtacttcaacggaaacagcgatgcctctacgataaaggagaaccagttcgacccaccgattgtggctagatatatacgcatctcccccacgagagcttacaaccgaccgactctgagactggagctccaggggtgcgaggtgaacgggtgcagtacgcctctcggcatggaaaacgggaagatagagaacaaacaaatcaccgcgtccagttttaagaaatcctggtggggtgactactgggagccgtttagggccaggctaaatgcacaggggcgggtaaatgcctggcaggctaaggctaataataataaacaatggctcgagattgacctgctgaagatcaagaaaattaccgctatcattacccaggggtgcaagtcactctcctctgaaatgtacgtcaaatcgtatacaattcactatagcgaacagggagtcgagtggaaaccctatagactgaagagctccatggtagacaaaatctttgagggcaacacaaacaccaaagggcacgtcaaaaacttttttaatccgccgatcatcagtcgtttcattcgtgtgatacctaaaacgtggaaccagagtatcgcactccggttggagctttttggctgcgacatctac

SEQ ID NO: 2302 - DNA, 6672 bp, Artificial Sequence
  derived and/or modified sequence
atgtttcccggctgtccacgcctgtgggtgctcgtggtcctcggcacttcctgggtgggatggggttcgcaggggaccgaagcagcacagctccgtcagttttacgtggcagcgcagggaatttcctggtcctacaggcctgaacctaccaactcatctctcaacttgtcggtgaccagctttaagaagatcgtataccgcgaatacgagccctactttaagaaggaaaagcctcaatcgaccatctcggggctcctcggacctactctgtacgcagaagtgggagatatcattaaggtgcactttaagaacaaggctgataagcccctttctattcatccgcagggtattaggtactcaaagctctccgaaggggcctcctacctggaccacaccttccccgcagagaaaatggacgatgcagtggcaccaggcagagaatacacgtacgaatggtcgattagcgaggacagcggtcctactcatgacgatccaccttgtctgactcacatctactattcccatgaaaatcttattgaagatttcaattccggactcattgggcctcttcttatctgcaagaaaggtactctgaccgaagggggaactcagaaaactttcgataaacaaattgttcttctcttcgctgtgtttgacgaatcgaaaagctggagccaaagcagctcccttatgtacaccgtgaatggatatgtgaacggtactatgccggacatcaccgtgtgcgcccatgaccatattagctggcacctgctgggtatgagctcgggtcctgaacttttttccatccatttcaacggtcaagtgctggagcaaaaccatcacaaggtgtctgccattactcttgtctccgcaacctcgactaccgctaatatgactgtcggccctgaaggaaagtggattatcagctcccttacgccaaagcatctgcaagccggtatgcaggcatacattgacataaagaattgccccaagaaaactcgcaaccttaagaaaatcactcgcgaacagcggcggcatatgaaacgttgggaatacttcatagcagctgaagaagtgatttgggactatgcaccagtgattcccgcaaatatggataagaagtaccgatcccaacaccttgacaacttttccaaccaaataggcaagcattacaagaaggtgatgtatactcagtacgaggacgaatctttcaccaaacatactgtgaacccaaatatgaaggaagatgggatcctggggccaattatccgcgcacaggtgagagatactctcaaaatcgtgttcaagaacatggcgtcacggccttactccatataccctcatggagtcacctttagcccgtacgaagatgaagtcaactcctcatttacgtccgggaggaacaacaccatgatacgggcagtgcagcccggcgaaacgtacacttacaaatggaacatcctggaatttgacgagcctacggaaaatgacgcgcagtgtcttacgcgcccttactactcagatgtggacatcatgcgtgatattgcatccggactcatcggactgttgctcatttgcaagtcgcgctcacttgaccgtagaggtatccagagagcagcagatatagagcaacaagcggtgtttgccgtgttcgatgagaacaagagttggtacttggaggataacatcaacaaattctgcgaaaatccagatgaggtgaaacgtgatgatccaaagttttacgagtcaaacatcatgtccactattaacggttacgtccctgaaagcatcaccactctcggcttttgctttgacgacaccgtccagtggcacttttgtagcgtcggaacgcagaatgaaatcctgactattcactttacgggtcattcattcatttatggtaagaggcatgaggacactcttactctctttcccatgcggggagaatccgtgactgtgaccatggataacgttggcacctggatgctcacctccatgaacagctctcctcggtcgaagaagctgcggctgaagtttagagacgtgaagtgtattcctgatgacgatgaggattcttacgagatctttgagccacccgaaagcaccgtgatggcaacccggaaaatgcatgatcgcctggagcccgaggacgaggaatcggatgcggattatgactaccaaaacaggcttgcagctgcactggggattcgtagctttagaaattcgagcctcaatcaggaagaagaagaattcaaccttactgccttggcactcgaaaacggaacggagtttgtctcctcgaatactgacataatcgtgggcagcaactactcgtccccaagcaacatttccaaattcaccgtgaataatcttgccgaaccacagaaagcgccctctcatcaacaggcgacgaccgcaggatcccctctgcgtcacctgatcggaaagaatagcgtgctcaattcctcgaccgcggaacattcaagcccatacagcgaagatcctatcgaggatcctcttcaaccggatgtgacgggaatcagactgctctcgctcggggccggtgaattcaaatcacaagaacacgcaaagcacaaaggaccaaaagtggagcgcgaccaagcagcaaaacatagatttagttggatgaagctgctggcccataaggtgggaaggcacctttcgcaagataccggaagtccatcaggaatgaggccgtgggaggatcttccatctcaagataccggtagcccttcacgcatgcgcccatggaaggaccctccaagcgaccttctgcttctgaagcaaagcaactcgagtaagatccttgttggaaggtggcatcttgcctcagagaaaggaagctacgaaatcatccaagacaccgatgaggataccgcagtgaacaactggctgattagccctcaaaatgcgtcccgcgcgtggggcgaatcaactccattggctaataagcctggcaaacagtccggacacccgaaatttccaagggtgcgccataagtccctgcaggtgagacaagatggcgggaagagcagactgaagaagtcccagttcctgattaagacccggaagaaaaagaaagaaaagcatacgcatcatgcacctctttcccctcgcacttttcaccctcttcgcagcgaagcctacaacacgttttcggagcgccgtctgaagcattcgctggttctccacaagtctaacgaaacttcgctgcccactgatcttaaccaaactcttcccagcatggattttggatggattgcatcactgccagatcacaatcagaattcctccaatgacactggccaagcgtcctgtcctccagggctttaccagaccgtgcctccggaagaacattaccaaactttcccaatccaagatccagatcaaatgcactccacgtccgatcctagccatcgatcctcaagccccgaactgagcgagatgctggaatacgatagatcccataagtcttttccgacggacatctcccaaatgtccccttcaagcgagcatgaagtctggcaaaccgtcatttcgccggatctgagtcaagtcaccctttccccagagctcagtcagactaacctttctccagatctttcgcacaccactctgagccctgagttgattcaacggaacctctctcccgccctgggacagatgccaatcagccctgacttgtcgcatactactttgtcacctgacctttcgcacactactctgagcctggatctctcacaaacgaacctgtccccagaactttcgcagactaatctttcccctgcacttggccaaatgccgctgtcaccggatctcagccacactacccttagcttggatttttcacaaaccaatctgagccccgagctgtcgcacatgacgctgagccccgaactttcccagactaacctgagcccggcgctgggccaaatgcccatttcgcctgatctcagtcatactactctttctctggatttctcgcaaaccaacctgtcgccagaactcagccagactaatctctcacccgcactcggtcaaatgccactttcacccgacccttcccacaccaccctgtccctggatcttagccagaccaatctctcgcccgaattgagccagaccaacttgagccctgatctctcggagatgccactttttgcagatctgtcgcagattcctctgactcctgatctggaccaaatgacccttagccctgatcttggtgaaactgatttgagcccgaactttggacagatgtcgctgtcccctgatcttagccaagtcaccctctcgcctgacatttccgacacgaccctgctgcccgatttgtcccagatctcgccgcccccagacttggatcagatcttttacccatccgaatcctcgcaatcgctcctgctccaagaattcaacgagtcgtttccgtaccccgatctgggtcagatgccatccccttcgtctcccaccctcaatgatacttttctttccaaggaattcaaccctcttgtgatcgtgggactgtccaaagacggaactgattacattgagataatacccaaggaggaagttcaatcgtcggaagatgattacgcagaaattgattatgtcccgtacgacgacccttacaagaccgatgtgagaacgaacatcaactcgtcccgcgaccccgacaacatcgccgcatggtacctgaggtcaaataacggtaaccggcggaactactacatcgctgccgaggagatatcctgggactactcggagtttgtccaaagggaaactgacattgaagattccgatgatatccccgaagataccacctacaaaaaagtggtgttcaggaagtacctcgattcgacctttaccaagcgagatccgcggggggaatacgaagaacatctgggaattctgggaccgataattcgcgcagaggtcgacgatgtcatccaggtgaggttcaagaacctggccagccgaccatacagcctgcatgcacatggtcttagctacgaaaagtcatcagaaggaaagacctatgaagatgatagccctgagtggtttaaggaggacaacgccgtccagccgaacagctcatacacttacgtgtggcatgctaccgaaaggtccggcccggaatcaccagggtccgcctgcagagcgtgggcatactacagcgccgtcaatcccgaaaaggatattcattccggtttgataggtcctctcctgatctgtcaaaaggggattctccataaagattccaatatgccaatggatatgcgagaattcgtgctgctctttatgacctttgatgagaagaaaagttggtactacgagaaaaagtcgagatcatcatggagattgacttcgtcggagatgaaaaagtcgcacgagtttcatgcgattaatggcatgatctactcactcccaggacttaagatgtacgaacaggagtgggtgcgacttcatctccttaacataggaggatcacaggacatccacgtggtccactttcatggtcagactctcctggaaaatggtaacaagcaacaccaacttggagtctggcctctgctccctggatcgttcaagactctcgaaatgaaggcatccaaacctgggtggtggctccttaacaccgaagtgggcgagaaccaacgcgccggaatgcaaacccctttcctgataatggatagggactgccgcatgcctatgggactctccactggcataatcagcgattcgcagattaaggcgtcagagttcctcggatattgggagccgagactggcccgattgaataacggaggctcgtacaatgcatggtcggtcgaaaaacttgccgctgagttcgcgtcgaagccgtggattcaagtggacatgcaaaaggaggtgatcattactggaattcagacccaaggggcaaaacattacctcaagtcgtgctacactaccgaattctatgtcgcatactcttccaatcagattaactggcagattttcaaagggaactccacccgtaacgtgatgtacttcaacggtaacagcgacgcatccacgatcaaggagaaccagtttgatccacccatcgttgcaagatatatccggatttcacccacgcgcgcatacaatagaccgaccctgagattggaacttcaagggtgcgaagtgaatggatgtagtaccccactgggcatggagaatgggaaaatcgagaacaagcagattaccgcatcaagttttaagaagtcctggtggggtgattactgggaacccttccgggcacgcctgaatgcccaaggacgtgtgaacgcatggcaggcaaaagccaataacaataaacaatggctggagatagatcttcttaagatcaagaagatcactgcaattatcacccaaggttgtaagagcctttcctcagaaatgtacgtcaagtcgtacaccatccattactccgagcagggtgtcgaatggaagccatatcggttgaaatcgtcgatggtcgacaagatttttgagggaaacaccaacaccaagggtcacgtgaagaacttctttaatccaccaattatctcaaggtttattcgagtgattcccaagacctggaaccaatccatcgccctccgacttgaactgttcggttgtgatatctat

SEQ ID NO: 2303 - DNA, 6672 bp, Artificial Sequence
  derived and/or modified sequence
atgtttccgggatgcccacgactttgggtgctggtggtgctggggacttcctgggttggctggggatcccaggggactgaagcggcccaactgagacagttctatgtagcagcacaggggatttcgtggtcgtatcgtcctgagccaactaattcgtcgctcaacctgtcagttacttccttcaagaagattgtctacagggaatacgagccatactttaagaaggaaaaaccacagagcaccatttcagggcttctcggccctacgctgtacgcagaagtgggagatatcataaaggtccacttcaaaaacaaagctgataaaccactctcgatacatccacagggtattcgatattccaagctctcggaaggcgcatcatatctcgatcatacttttcctgcggaaaagatggacgatgcagtggcacctgggcgagaatacacttatgaatggtcgatctccgaggatagcgggcctacgcatgacgacccaccatgtcttacccacatttactactcacatgagaatctgatagaggatttcaactctggcctcataggaccccttttgatttgtaagaaagggaccctcaccgaaggggggacccaaaaaactttcgataagcagatagtgttgctttttgcagtgttcgatgagtcgaagagctggagtcaatcgtcgtccctgatgtacacggtgaacggctacgtgaacggtactatgcctgatatcaccgtgtgtgcacacgaccacatttcctggcatctgcttggaatgagttcgggaccagagctttttagcattcatttcaacggacaagtcctggagcagaatcaccataaggtgtccgcgattacccttgtaagcgctactagcaccaccgcaaacatgactgtggggcctgaaggtaaatggattatctctagcctcactcccaagcatttgcaggccggtatgcaagcatacattgatatcaagaactgtccgaaaaagaccagaaacctgaaaaagattactcgtgagcaacggaggcacatgaagagatgggagtactttatcgcggccgaagaagtcatttgggactacgcaccagtcattccagccaacatggacaaaaagtaccggagccagcacctggataacttttcgaaccaaataggtaagcactacaagaaggtgatgtatacccagtacgaggatgagagcttcactaagcataccgtcaatccaaatatgaaggaagatggtatccttggaccaattatcagagcccaagtccgcgataccctgaagatcgtgtttaagaacatggcgtcgcggccatattcaatctaccctcatggtgtcactttttcgccttacgaagatgaggtcaattcgtccttcaccagcggaagaaacaatactatgattcgcgccgtgcaaccgggcgaaacttacacctataagtggaacattcttgaatttgacgaacctaccgagaacgacgctcaatgcctgactcgtccttactactctgatgtggacataatgagggatattgcatccggtttgatcggactgctgctcatctgtaaatcgcgcagcctcgatcggcgggggatccaaagagcagcagacattgaacagcaagctgttttcgcagtgtttgacgagaataagtcttggtaccttgaggacaacattaacaagttttgcgaaaacccagatgaagtcaaacgtgatgatcctaagttttacgaatcaaatatcatgtcaaccatcaacggttacgttcccgaatcgataaccaccctcggattctgttttgacgataccgttcaatggcacttttgctcggtcggtacccagaacgaaattcttaccatccatttcactggccattccttcatttatggaaagagacacgaggatactcttactctttttcctatgagaggcgagtcagttactgtgaccatggacaacgtgggcacctggatgcttaccagcatgaactcctctcctcgctcgaagaaacttaggctgaagtttcgggatgtgaaatgtatcccagatgacgacgaagattcatacgaaatctttgaacctcccgaatcaactgtgatggcaactaggaaaatgcatgatcgcctggagcctgaagatgaagaatcagatgcagattacgattaccagaacagacttgcagcggcactgggcattcgctcattccgcaattccagccttaatcaggaagaggaggaattcaaccttaccgccctggcactcgaaaacggtacggaatttgtatctagcaacaccgacattatcgtgggaagcaattactcgagcccatccaatatctctaaattcactgtgaacaacctggcggagcctcaaaaagcgccttcccatcaacaagcaacgactgcagggtcccctctcagacatctcattggtaagaactcggtgcttaatagctccactgccgaacattcgagcccgtactcggaagatccaattgaagatccccttcagccggatgtgactgggatcaggcttctgtctctcggtgcaggggagtttaagtcgcaggagcatgccaagcacaaaggtcccaaagtggaacgcgaccaagccgctaagcacagattttcctggatgaaacttcttgctcacaaggtggggagacatctgtcacaagataccggtagccctagcggaatgcgtccttgggaggatcttccctcccaagataccggatcgccttcccgaatgcgcccctggaaggatcctccgtccgatctgctgctgcttaaacagtcgaattcgtccaaaattctcgtcggaagatggcacttggcctcggaaaaaggatcctacgagattattcaggataccgatgaggatacggcagtcaataactggcttatttcacctcaaaacgcatcgcgtgcgtggggtgaatccacccccctcgccaacaagccaggcaagcagtcgggccaccccaagtttcccagggtcagacacaagagcctccaggtgagacaagacgggggtaagtcacggcttaagaagagccaattccttatcaaaacgagaaagaagaaaaaggaaaagcatactcatcatgccccgctttcccctcggacctttcatcctcttcggtctgaagcatataacaccttttcagagcgacgccttaagcattcgcttgtgctccacaagtcaaatgaaacgtcccttcctaccgatttgaaccagactctgccttcaatggacttcggatggattgcaagcctccctgatcacaaccagaattcgtcgaacgataccggacaagcctcctgtcctcctggcctgtaccagacggtgcccccagaagaacattaccaaacgtttcccatacaggaccccgaccagatgcactcaacttctgatccttcgcacagatcatcctcccccgaattgtccgagatgttggaatacgaccgtagccataaatcatttcctaccgatattagccagatgtccccttcctcagaacacgaagtgtggcagaccgtcatttcaccagacctctcgcaagttactctgagcccagaattgtcgcaaacgaatttgagcccagatctgagccatactacgttgtccccagaacttatccaacgaaacttgagccctgcattgggacagatgcccatatcacccgatcttagccatactactctgtccccggacctttcccataccaccttgtccttggacctcagtcaaaccaatctttcaccagaactctcgcagacgaacctgagtccagcccttggtcaaatgccgctgtctcctgatctgtcccatacgaccctgagccttgacttctcacaaactaacctctcaccagaactttcacatatgactctgagtcccgaacttagccagaccaacctctcgcctgccctgggtcagatgcctatttcgccagatctgtcgcacacgaccctttctctggacttttcacaaaccaatctcagccccgaattgagccaaaccaatctgtcaccggctctggggcaaatgccactctccccggacccgagccatacgactcttagcctggacctgagccagactaatctctcacctgagctttctcagaccaacctgtcccccgacctgtccgaaatgcctctgttcgctgatcttagtcaaattccacttacccccgacctcgatcaaatgactctctcaccagatctcggtgagacggaccttagtcccaactttggacaaatgtcactttcacctgatctctcacaggtcactctgtcccctgatatctccgacacgacgcttctgcctgacctttcacagatttcgcctccccctgacttggatcagatcttttacccgtccgaaagctcacagtcccttcttttgcaagagttcaatgaatcgtttccataccctgaccttggccaaatgccgtcgccatcgtccccgaccctgaacgatacttttttgagcaaagagtttaaccccctggtcatcgtgggtctttccaaagatggtaccgattacatcgagattatcccgaaggaggaagtccaatcgagcgaagatgattacgcagaaattgattacgtgccttacgacgacccatacaagaccgacgtgagaacgaacatcaactcatccagggacccagacaacattgcagcatggtacctgaggtcgaataatggaaataggagaaattactacatcgcagcggaagagataagctgggattacagcgaattcgtgcaacgggaaactgacattgaagattccgatgacatcccagaggacactacttacaagaaagtggtgtttcggaaatacctggattcaacgttcactaagcgcgatccacggggcgagtacgaggagcacttgggaattctgggacctatcatacgcgcagaagtggatgacgtgatacaggtgaggttcaagaacctggccagtagaccttacagcctgcatgcacacggcctctcctacgaaaaatcgtcggaaggcaaaacctacgaggacgactcccctgagtggtttaaggaagataatgcagtgcagcctaacagctcttacacctacgtttggcacgccaccgaaagatccggtccagaatcacccggctcagcctgtcgtgcttgggcatactactcggccgtcaatccagaaaaggacatccatagcggtctgatcggaccactgctgatttgccaaaaaggaattcttcataaggattcgaatatgcctatggatatgcgcgaatttgtgcttcttttcatgacgttcgatgagaagaagtcgtggtactacgagaagaagagcagatcctcgtggagacttaccagctcggagatgaagaagtcccatgaatttcatgcaattaacggaatgatttactcgcttccgggacttaagatgtacgaacaagaatgggtccgcctgcatcttctgaacattggaggctcgcaggacatccatgtggtgcactttcatggacagaccctgttggaaaatggtaataagcaacatcagctgggagtgtggccactgttgcctggatccttcaagaccctcgaaatgaaggcatccaagcccgggtggtggctcctcaacactgaagtgggggaaaaccaacgagcagggatgcagactcccttcctcattatggatcgagattgcagaatgccaatgggtctgtcaaccggtattatctcggactcccaaatcaaagcatcagaatttcttggctattgggagccacgactggcccggctgaataacggtggatcttacaacgcctggtccgtcgaaaagctcgcagcagagtttgcaagcaagccttggatacaagtcgatatgcaaaaagaagtgatcattaccggaattcaaacgcagggagcgaagcattacctgaaatcatgttacactactgagttttacgtggcttactcgagcaaccaaatcaattggcagattttcaagggaaactccacccgcaatgtgatgtacttcaacggtaactcggacgcgtccactatcaaggaaaaccagtttgatcccccaatagtggcccgttacatccgcatatcgccaacgagagcatacaatcgaccgactctgagactcgaactgcaaggttgcgaggtgaacggatgtagtaccccgcttggtatggagaacggtaagattgagaataaacaaataaccgcatcgtccttcaagaaatcttggtggggggattactgggaaccctttcgagctcgtctgaacgcacaagggcgggtgaacgcgtggcaagcaaaggccaacaacaacaagcaatggctcgagattgatctgctgaagatcaagaagattactgcaatcataacccagggttgtaagtcgcttagcagcgaaatgtacgtgaagtcgtacaccatccactactcagagcaaggagtcgagtggaagccatatcgcctgaaatcaagcatggtggataagatttttgaaggaaatacgaacactaagggacatgtcaagaatttctttaatcctcctatcatttcgcggtttattcgcgtgatccctaaaacctggaatcagtccattgctctgagattggagttgttcggttgcgatatctac

SEQ ID NO: 2304 - DNA, 6672 bp, Artificial Sequence
  derived and/or modified sequence
atgttccccggatgtcctcgcctttgggtgctggtggtgctagggaccagctgggtgggatgggggtcgcagggcactgaggcagcccaactgcggcagttttatgtcgccgctcagggcattagctggtcgtataggccagaacctaccaatagcagtctgaacctgtcagtcacatcatttaagaaaatcgtttacagagagtatgagccttacttcaagaaggaaaagccacagtcaaccattagtggccttctgggccctaccctgtacgccgaggtgggagacatcatcaaagtgcacttcaagaataaggcggataagccactgtcaatccacccccagggcattaggtacagtaagctctctgagggcgcttcctatctggatcatacattccctgctgagaagatggatgatgccgtagctccaggacgggagtatacctatgagtggtcaatatctgaggattccggaccaacccacgacgatcccccatgccttacccatatatactatagccacgaaaatttgattgaggacttcaacagtgggctaattgggccccttctgatatgcaagaagggaacgctcacagaaggcggcactcagaagacatttgataaacaaatcgtgctcctgttcgctgtctttgatgaaagtaaatcttggagccagtcctctagcctaatgtacactgtgaatggctatgtgaatggcaccatgcccgacataactgtgtgtgcacatgaccatatctcctggcacctcctggggatgtcctccggccccgagctgttctctatccacttcaacggacaggtgctggaacaaaaccatcataaggttagcgccatcaccttagtgtcagctacaagtactactgccaacatgactgtagggccggaaggaaaatggattattagtagtctgacgcccaagcacctccaggcaggtatgcaagcatacatcgacattaagaactgccccaagaaaacccggaacctgaaaaaaatcacaagagaacagaggcgccacatgaagcgctgggaatattttatcgcggccgaagaggtgatttgggattacgccccagtaatacccgcaaatatggacaaaaagtatcggtcccagcatctcgacaacttcagcaatcagattgggaagcattacaaaaaggtaatgtacacccagtatgaggatgagtcgtttacgaaacataccgtcaaccctaacatgaaggaggacgggattttgggccccatcattcgtgctcaggtgcgggacacactgaaaattgttttcaaaaatatggccagtaggccctattctatctatcctcacggcgttaccttctccccttacgaggatgaggtgaattcgtcttttacttcaggccggaataataccatgatccgtgccgtgcagccgggggaaacttacacatacaagtggaacatactcgaatttgacgaaccaacggaaaacgacgctcagtgtctcacgcggccttactattccgatgtggatattatgcgagacattgccagcggcctgatcgggttactccttatatgcaagagtcgttcattagatagaaggggcatccagcgcgcagccgacatcgaacaacaggccgtcttcgccgtttttgacgaaaataaaagttggtacctggaggataacattaacaaattttgcgagaaccccgacgaggtgaagagggatgatccaaaattttatgagtcaaacattatgtcgaccatcaacggctatgtccccgagtcaatcacgacattagggttttgttttgatgacacagtgcagtggcacttctgttccgttggtacccagaacgagatactgacaattcacttcaccggtcactctttcatctatggcaaacggcacgaggacactctaacactgttccctatgaggggcgagagtgtgaccgtcacaatggacaatgttggcacctggatgctcacatctatgaactcttcccccagaagcaaaaagttgaggctgaaattcagagacgtgaagtgcatccccgatgatgacgaggactcatatgagatctttgaaccgcccgagtccactgttatggccacccggaagatgcatgatcgcctggaaccagaggatgaagaaagcgatgccgactacgactaccagaaccggctggctgccgccctgggcatcagaagtttcagaaactcgtctctgaaccaggaagaagaggagttcaacctgacagccctcgccttggagaacgggacagagttcgtatccagcaacacggatatcatcgtggggagcaactatagttctccctctaacattagtaagttcaccgtgaacaatttagcagaacctcaaaaggcgcccagccaccagcaggctactaccgctggatctcccttgagacatctgattggaaagaactcagtgctgaacagtagtacggccgagcatagcagcccctatagcgaagatcccattgaggacccattgcaacccgacgtaaccggcattcgcctgctgagcctgggggctggggaatttaagagccaggaacatgctaagcacaagggcccgaaagtagaaagggaccaggccgcaaagcatcgcttcagctggatgaagctgctggcacacaaggtgggtcgccacttatctcaggatactggtagtccgtcaggcatgcgcccttgggaggaccttccaagccaggatacaggcagtcccagccggatgagaccgtggaaggaccctcccagcgacctgctcctgctgaagcagagcaattcttcgaagattcttgttggacgctggcacctggcctcggaaaaaggcagctatgaaatcattcaggacacagacgaagataccgcggtgaacaactggctcatatcaccacagaacgccagccgcgcctggggagaatctacccctctagcaaataaacctgggaagcaatcaggacaccctaagttcccacgggtaaggcacaaatctttgcaggtgcgccaggatggggggaagtcacgtcttaaaaagagccagtttttgattaaaacccggaagaagaagaaggagaaacacacacatcacgcgcccttgtcccctcgaaccttccatccgctcaggtctgaagcttacaataccttcagcgaacggaggttgaagcatagcctggtcctgcacaaatccaacgagacatcgctccccaccgacctgaaccaaaccctgccatcaatggactttggatggatcgcaagtctacctgatcataaccagaactcgtctaacgacacagggcaggcctcctgcccccccggcctgtaccaaacggttccccccgaggaacattaccagacctttcccattcaggatccagatcagatgcattccacttccgacccgtctcatcgttcttcctcccccgagctgtctgagatgctggaatacgaccggagtcacaaaagttttccaaccgacatttcacagatgtctccatcctccgaacatgaagtttggcagactgtcatatcccctgacctgtcacaggtgactctatcccctgaactaagccagactaatttgtccccagacctgtctcacacaactctgagcccagaactgattcagaggaacctctctcctgcactgggacaaatgccaatctcaccagacctgtcgcataccacactctccccagacctgtcacacaccactctgtctttggacctgtcacagaccaacctgtcacctgaactgtcacagacaaacctgagtccggctctgggacagatgccactgtctcccgacctgtcacatactaccctcagcctggatttcagtcagacaaacctgagcccagaactgagccacatgaccttgagtcccgaattatctcagacaaatctatcccctgcactgggccagatgcccatctcccctgatctgagtcacacaaccctgtccctggacttctctcaaaccaatctgtctccagagctatcacaaactaatctgtcaccagcactagggcaaatgcccctgagccctgacccatcccacacgacattgtctctggacctcagtcaaaccaatctatcacctgagctgtctcagaccaatctgagccccgatttgagtgaaatgccacttttcgccgacctctctcagatccccctcactcccgatctcgatcagatgaccctttcccccgacctgggagaaaccgacttgagtcctaactttggccagatgtcactgtcacccgacctgtcccaagttactctgtcacctgatattagcgatactacgctgctccctgatcttagccagatctccccccctccggacctggatcagatattctaccctagcgaatcttcccagtcacttctgctgcaagagtttaacgagtcatttccttacccggacttggggcagatgccttcaccctcttctcctaccctgaacgacacctttttaagcaaggagtttaaccccctggtcatcgttggcctgtccaaggacggcacagactacatcgaaatcattccaaaggaagaggttcagtcctcggaagacgactacgccgagatagattacgtcccttacgacgatccatataagacagatgttagaactaatatcaattccagcagagaccctgacaatatcgccgcctggtacttgaggtctaataacggaaatcgccgtaactactacatcgccgctgaggagatctcttgggattacagcgagttcgttcagcgggaaaccgacattgaagacagcgacgacatacctgaagatactacttataaaaaagtggtgtttcgcaaatacctggactcgacctttaccaagcgagacccacggggagagtatgaggagcatctggggattttgggtcctattattagggccgaagttgacgacgtgatacaggtgcgattcaagaatttggctagcaggccctactcattacatgctcacggtttgagttacgagaagtctagtgaaggtaagacttacgaagacgattctccagagtggtttaaggaggataacgctgtacaacccaattctagctatacttacgtgtggcacgcaacagaaagatccggaccagaatctcctggctctgcttgccgagcgtgggcatattattctgccgtgaaccccgagaaggacattcactccggtctgataggccccctccttatttgccagaagggcatcctgcacaaggatagtaatatgccgatggacatgcgagaatttgtgctcttattcatgacatttgatgaaaagaagtcctggtactatgagaagaagtcccgcagctcttggagactcacctctagcgagatgaagaaatcacacgaattccatgcaattaacggtatgatttatagcctcccaggacttaaaatgtacgagcaagaatgggtgagattgcatttactgaacatcgggggctcgcaggacattcacgttgtccactttcatggccaaactttgctggaaaacggtaacaaacagcaccagttgggagtatggcccctcctgcctggaagcttcaagacgctggagatgaaggctagtaagcccgggtggtggctactgaataccgaggtcggtgaaaaccaacgtgctgggatgcagacgccatttctgataatggatcgtgactgtagaatgccaatgggtctctctactggtattatctctgactcccaaatcaaggcctccgaatttctaggatattgggagccccggctggctaggctgaacaatggcggaagctacaatgcgtggtccgtggagaagctggccgccgagttcgcctctaagccttggattcaggtggacatgcagaaggaggtgatcattacaggaattcagacccagggagccaaacactacctcaagtcatgctacacgaccgaattctacgtagcttattcttcaaaccagatcaactggcaaatctttaaaggcaattcaacgcgcaacgtcatgtactttaacggaaactctgacgcctctacaattaaagagaaccagttcgaccctcctatcgtggctcggtacattaggatctctcccaccagggcctacaaccgacctacactcaggctggagcttcaaggttgtgaggtcaacggatgctctactcccttgggcatggagaatggcaaaatcgaaaataaacagatcacggcctcatccttcaagaaaagctggtggggagactactgggaaccatttagagctaggctgaatgctcaggggagggtcaacgcctggcaagccaaggcgaataacaacaaacagtggctcgaaattgacctactcaagatcaaaaaaatcaccgctatcatcactcaagggtgcaagtcgctgtccagcgagatgtacgtaaaatcttacactatacactattcggagcagggcgtagagtggaaaccatatcgactgaaatcgagcatggtggacaagatctttgaaggcaacacaaacacaaaggggcacgtgaagaacttctttaatcctccaataattagcaggtttattagggtcatccctaagacttggaatcagtccatcgcactgcgattagagctgtttggttgtgacatttat

SEQ ID NO: 2305 - DNA, 6672 bp, Artificial Sequence
  derived and/or modified sequence
atgttcccaggctgcccacgcctgtgggtcttagttgtgttgggcacttcatgggtgggctggggctcccagggtacagaggctgcacagctgaggcagttctatgtggcggcacaaggcatttcttggtcctaccgtcctgagccaactaacagctccctgaatctcagcgttaccagtttcaagaagatcgtttatcgcgaatatgagccttactttaagaaggagaagccgcaaagcacgatcagcggcctccttgggccgacgttgtatgcggaggttggtgatatcatcaaggtgcatttcaagaataaagctgacaagcccctcagcatacacccacaaggtattcgttatagcaaactatctgagggggcaagctatctggatcacacgttcccagctgagaagatggatgacgcggttgcgccagggagggaatatacctatgagtggtccatctcggaggattccgggccaacccatgatgatcctccatgcttgacgcacatttactactctcacgagaatctgattgaggacttcaactctggtctgatcgggccgctgctgatctgcaagaagggcacgctgaccgaaggcggcactcagaaaacctttgacaagcagattgtcttgctgtttgcagtgttcgatgaaagtaaatcttggtcccagagctcctctctgatgtacacggttaatggatacgttaacggcaccatgccagacattactgtttgcgcccacgatcacatcagttggcatttactgggtatgtcctccgggccggaactgttttccatccactttaatggtcaagttctggaacagaaccaccacaaggtgagcgcaatcacgcttgtgtctgcgacttccacgactgccaacatgacagttgggcctgaaggtaaatggattatctccagcttgactcctaaacacctacaggccggtatgcaggcgtatatcgacataaagaactgccccaaaaaaactcgcaatctgaaaaagattaccagagagcagcgccgccacatgaaacgttgggagtattttatcgccgccgaggaggtaatttgggactatgcaccggttattccggcaaacatggacaaaaaatatcgtagccagcacctggacaacttcagcaatcagatcgggaaacactataaaaaggttatgtacacccagtacgaggatgagtcttttactaaacatacggtcaaccctaatatgaaggaagatggcatcctgggtccgatcatccgcgcccaggtgcgagacacactgaagattgtgttcaaaaatatggcttcacgcccgtactccatctacccccatggggtgaccttttctccgtatgaggatgaggttaattcctcctttacttcaggccgcaataataccatgattagggcggtgcaaccgggtgagacctatacctacaagtggaatatcctggaatttgacgaacctacggagaacgatgcacagtgtttgacgcgcccatattactcagacgttgatattatgcgcgacatagcgagcggactgattggtctgctgttgatttgcaagagccgtagtctggatcgccgcgggattcagcgcgcagcggatattgagcagcaggccgtgtttgctgtttttgatgagaacaaatcctggtacctcgaggacaacataaataaattctgcgaaaatccagacgaagtgaagcgcgatgaccctaagttctacgagagcaacattatgtctactattaacggctacgttcctgaaagcatcacaactctgggcttctgttttgatgacaccgtccaatggcacttttgctccgttggtactcagaacgaaatcctcaccattcatttcaccggtcatagcttcatttacggtaaacgacacgaagatacgctgactcttttccccatgcgcggagaaagcgttaccgtgaccatggataacgtgggcacgtggatgctcacctctatgaacagctctcctcgttctaagaaattacggctgaaattcagggacgttaaatgcattcccgatgatgacgaggactcttatgaaatttttgaaccccccgaatccactgtgatggcaacgcggaaaatgcacgaccgcctggaacctgaggacgaggagtctgacgctgactatgattaccagaatcgcctcgctgcagcactgggaatacgcagctttcgcaattccagtctgaaccaagaggaggaagagtttaacctgactgcgttggcactggaaaatggcaccgagtttgtgagcagcaacaccgacatcatcgtcggcagcaactatagctcccctagcaatatcagtaagttcactgtgaacaatctggctgagccgcagaaagcgccgtcgcaccagcaggcaactactgcaggaagccctctaaggcatcttataggcaaaaatagcgtgctgaatagcagcaccgcggaacatagcagcccttatagcgaagatcccattgaggaccctctgcagccggatgttaccggaatccgactgctgagcctgggcgctggcgagttcaagagccaggaacacgccaagcataaaggtccaaaggtggaaagggaccaggcggctaaacaccgcttcagctggatgaagctgctggcccataaagtgggtaggcatttgagtcaggacacgggttcgccatcaggcatgcgcccttgggaagacctaccttctcaggataccggcagccctagcaggatgaggccgtggaaggacccgccaagcgacctgctgttgttgaagcagagtaactctagcaagattttggtgggccggtggcacctggcgtcggagaaaggcagctacgagatcatccaggacaccgacgaggataccgccgtgaataactggctcatctctccgcaaaacgcctcccgcgcttggggtgagagcacgccactggcaaataagcctggtaagcagagcggccaccctaagtttcctcgtgtgcggcacaaatccttgcaagtgcgtcaagacggtggtaaaagtcgcttaaagaaaagtcagttcctgattaagacccggaaaaagaagaaggagaagcatacccaccatgcaccattgagcccacgcaccttccaccccctgcgttccgaagcgtacaacacgttttcggagcgccgcctaaagcactctctggtccttcataagtccaatgagacctcgctgccgaccgacctgaatcaaacgctgccgtcgatggatttcggttggattgcctcactgccagaccataaccagaactcctctaacgacaccggtcaggcttcttgtccgcccggtttgtaccagaccgtgccacctgaggagcattaccagaccttcccgatccaagatcctgaccaaatgcactcaaccagcgatccttctcacaggtctagcagtcccgagctaagcgaaatgctagaatacgatcgcagccataaaagctttccgaccgacatttcccagatgagcccttcttctgaacacgaggtctggcagaccgttattagccctgatctctctcaagtgacgctgagcccagagctgagccaaacgaatctctccccggacctgagtcataccacgctgtctcctgaattgattcagcgaaatctgtcacctgcgctgggccagatgccgatcagcccggatctgagccacactaccctatccccggatctgtcacatacgacactgagcttggacttaagccagaccaacctgagcccggagctgtcccaaactaatcttagccctgcactgggacaaatgccactgtctcctgacctgagccacacaactctgagtctggacttctctcaaacgaatctcagccctgagctatctcacatgacgctatccccagagttgtctcaaaccaatctctcaccggccttgggccaaatgcctatttctcctgacctgtcccacactacgttgtctctggacttttctcagactaacctgagccctgagctgagccagaccaatttgtctcctgctctgggtcagatgccccttagccctgatcctagccacactactctgtctctggatttgagccagaccaatcttagcccagagctttcccaaaccaatctgagtcctgacctgtctgaaatgcctctcttcgccgacctgtcgcaaattccactgacgcctgacctggaccaaatgacgctgagcccagaccttggcgagacagacctctccccaaacttcgggcagatgagcttgtcaccggatctgagccaagtgaccttaagtccggatatttcagatacaacattgctgccggatctcagccaaatctcaccaccgccggatctggatcaaatcttttaccctagcgagtctagccagtccttgctgctgcaggaatttaatgagagcttcccctatccggatctgggccagatgccaagcccttcatcacctacactaaacgacacctttctttctaaggagtttaaccctcttgtcatcgtcggcctctccaaagatggtacagactatattgagattatccctaaagaggaagtgcagtctagcgaggatgactacgccgagatcgactacgtgccgtatgacgatccttataagactgacgtccgcactaacattaactcgagccgtgacccagataacatcgctgcgtggtacctcaggagcaataacggaaataggagaaattactatattgcggcggaggagatctcgtgggattatagcgaatttgtacagagggagaccgatattgaggacagcgacgacatccctgaggacactacctacaaaaaggtcgttttcagaaagtacctggactccacgtttactaaaagagacccacgcggtgaatatgaggagcatctgggcatcctgggtcctattattcgcgcagaggtagatgacgttattcaagttaggtttaaaaatctggcgtcacgtccttatagcctgcatgcgcacggcctctcctatgagaaaagcagcgaaggcaaaacctacgaggacgacagccctgaatggtttaaggaggataatgcagtgcagcctaattctagctacacttacgtgtggcacgcaacggaacgctccggacctgaatcccctggatcagcctgcagggcgtgggcgtattattctgcagtgaacccggaaaaagacattcattcgggtcttattggtcccttactgatctgccagaaggggatactgcacaaggactcgaacatgcctatggatatgcgtgaatttgtcttgctgtttatgaccttcgacgagaagaagtcctggtattatgagaagaagtcgcggtcgagctggaggttgacgtccagcgaaatgaagaagtcacacgagtttcacgcaatcaacgggatgatctattccctgcctggtctgaagatgtacgaacaagagtgggtgcgcctgcacctgctgaacataggtggcagccaggacattcacgtagttcacttccacggccagacactcctggagaatggtaataagcagcatcaactgggcgtgtggcccctgctgcctgggtcgtttaagaccctggagatgaaagcaagcaaaccggggtggtggttactgaacaccgaggttggtgaaaatcagcgagcgggcatgcagacgccatttctgataatggacagagattgtcggatgccgatgggcctgagcacaggtatcatatctgatagccagatcaaggcaagcgagtttctgggttactgggaaccgaggctggctcggctgaataatggtgggagctataatgcatggtctgtggaaaagctggctgcggaattcgctagcaaaccatggattcaggttgacatgcaaaaagaagtgattatcaccggaatccagacccagggtgctaaacattacttgaagtcttgctacacgacggaattttacgttgcttacagcagtaatcagatcaattggcagatttttaagggcaactccacgcggaatgttatgtactttaacggcaattccgacgcctctacgatcaaagaaaaccaattcgacccgcctatcgtagcgcgctacattcgaatctccccgacgcgtgcgtataatcggccaacgctgcggctggaattacagggttgcgaagtcaacgggtgcagtactccccttggtatggagaacggcaaaattgagaataaacagatcaccgcgagcagcttcaagaagagctggtggggtgattattgggaacctttccgcgcgcgcttgaatgcccaaggccgggtgaatgcgtggcaagcgaaggcgaataacaacaaacagtggctggagatcgatctgctgaaaattaaaaaaattaccgcgattatcacgcaggggtgtaagagcctgagctctgagatgtatgtcaagtcttacaccattcattatagcgagcagggcgtagagtggaagccgtatcgcttgaagagcagcatggtggataagatttttgaaggtaatacaaacaccaaagggcacgtgaagaacttttttaaccctccaatcattagccggtttatacgcgtgattccaaaaacgtggaatcagtcgattgccttgcgcctggagctgtttggctgcgacatatat

SEQ ID NO: 2306 - DNA, 6672 bp, Artificial Sequence
  derived and/or modified sequence
atgtttccaggatgtccaaggctctgggtgctggtagtactggggacatcttgggttggatggggatcacagggaactgaagctgcccagctgcgccaattctatgtcgccgcccagggaatatcctggtcgtatagacctgaacccacaaacagtagtctaaacttgtccgtgacatctttcaaaaaaatcgtgtatcgggaatacgaaccatacttcaagaaagaaaaacctcagagtactatcagtggacttttagggcccacactgtatgcagaggtgggggatataatcaaagtacacttcaaaaataaagccgataagccactgtctatccatccccagggaattcggtattcaaagctctccgaaggggcttcttatctggatcatacatttcccgccgagaaaatggatgacgcagtggctccaggacgcgaatacacatatgaatggtctatctcagaagattctgggcctacacacgacgaccctccctgtcttactcacatctattattcccatgaaaatttaatagaagattttaactctggattgataggaccccttctgatctgtaagaaaggaactcttactgaaggaggaacacagaaaacatttgacaaacagattgtactattatttgcagtgttcgatgaatctaaaagttggtctcagtcctcctcccttatgtacacagtgaacgggtatgttaatgggacaatgcctgacatcacagtatgcgctcatgatcatatatcttggcacctgctcggaatgtctagtgggcccgaactgttttctatccacttcaatgggcaggtgctcgaacagaatcaccataaagtttctgccataactctcgtaagtgcaacatctacaactgccaatatgactgtaggacccgaggggaaatggatcatatcctctctgactcccaaacaccttcaggctggaatgcaggcctatatcgatatcaaaaattgccccaaaaaaactcgcaatttaaaaaaaatcacaagagaacaacggagacatatgaaaagatgggagtactttattgcagctgaagaagttatttgggactatgctcctgttattccagcgaacatggataaaaaatatcgctctcaacacctcgacaatttttccaaccagattggaaaacattataaaaaagtgatgtatacacagtatgaagatgaatccttcacaaaacatacagtcaacccgaacatgaaagaagatggaattcttggacccattatccgggcacaggtgcgggatacactcaaaatagtgttcaaaaacatggcctctcggccatattctatatatccccacggggttacattcagtccttatgaggacgaagtaaattcttccttcactagtgggcgaaacaatacaatgatcagggcagtacagcctggggaaacatatacatataaatggaacattttagaatttgatgaaccaactgaaaatgatgctcagtgtctgacacggccctactactccgatgtcgatatcatgcgagatatcgcatcaggattgattggactactcctaatatgcaagtctagatctctggataggcgtgggattcagcgcgccgcagacattgaacagcaggctgtattcgcggtgttcgacgaaaacaaaagttggtacctggaagataatattaataaattctgtgagaatcccgatgaagtcaaacgcgatgatcccaaattctatgaatctaatataatgtcaactattaatgggtatgtgcctgaatctattacaactcttggattctgtttcgatgatacagtgcagtggcatttctgctcagtaggaacacagaatgagatactcactatccacttcacaggacactctttcatatatgggaaacgacatgaagatactttaactctatttcccatgagaggggaaagtgtcactgttactatggataatgtagggacatggatgcttacatcaatgaattcatcaccccgaagtaaaaaactgaggctgaaatttagagatgttaaatgtatccccgatgatgatgaagactcctatgagatttttgaaccacctgaatccactgtgatggcaacaaggaaaatgcacgatcggctggaacccgaagatgaagaatctgatgctgattacgattaccagaatcgcctcgctgcagccctgggaatcaggtctttccggaattcatctctaaatcaggaagaagaagaattcaatctcactgcacttgccctggaaaatggaactgagttcgtgtctagtaatactgatatcatagtgggatcaaattatagttccccttctaatatctcaaaatttactgtcaataatttggctgaacctcagaaagccccttcacatcagcaggccacaactgcagggagtcctttaaggcacctgatcggaaaaaattcggtgcttaacagtagtacagctgaacattcctctccctattctgaagatccaattgaagaccccctacagcccgatgtgacaggaatcagactactgtcgctcggagccggagaatttaagtcgcaggaacatgcaaagcacaaaggacccaaggttgagcgggatcaggcggccaagcataggttctcgtggatgaaactactcgcccacaaagtgggaagacacctatcacaggatactgggtctccatctgggatgaggccttgggaagacctaccctcacaggatacagggtccccctccagaatgcgcccttggaaggatcccccatctgacctcctcctcctcaaacaatccaactcctcgaagatactggtaggaagatggcacctagcttcggaaaaaggaagttatgaaattattcaggacactgatgaagacactgcagttaacaattggctgatatctccccagaatgcctccagagcctggggagaatccactcccctggctaataaaccagggaaacagtctgggcatcccaaatttcctcgagtgcggcacaaaagtcttcaggtacggcaggatggaggaaaatctagactcaaaaagtctcagtttctaataaagacacggaagaaaaagaaggagaagcacacacaccacgctccactctcccctagaactttccatccactgcgatctgaagcctacaacactttcagtgaacggaggcttaaacactctcttgtgttacacaaaagtaatgaaacatcactgcctacggatcttaatcagactctaccctccatggatttcgggtggatagcatccttgcccgatcacaaccaaaatagttcaaatgatacagggcaggccagttgtcctcctggactttatcagacagtgcctccagaagaacactatcagacattccctatccaggatcctgatcagatgcactccacttcagatccaagtcataggtcgtcatcgcccgaactgtctgagatgctggaatatgatcggtctcacaagagttttcctacagatatttcacagatgtcacccagttctgaacacgaagtatggcagacagtcatatctcccgatcttagtcaggtgacactgtctcctgaactttcccagacaaatctgtctcccgacctgtcacacactacattgtcacccgaattaatacagcggaatctgtcccccgctctggggcagatgcccatttcccccgacctctctcatacaacacttagtcccgatctctcccatactacactgtccttggatctaagtcagacaaatttatctccagaattgtctcagacaaacctgagtccagcgcttggacaaatgccactatcacccgatctaagtcatacaactttgtctcttgatttctcccaaactaatctatcacctgaactttcccacatgactctatctccagaactgtcacagactaacctctctccagccctagggcagatgccaatttccccagatctctcgcacactactctgtcgctcgatttttctcaaactaatctgtctcctgaactctctcagacaaacctctctccagcacttgggcagatgcccctctctcctgatccttcccacactacactgagtctggatctgtctcagactaatctctctccagaactgtctcagacaaacctctcccccgatctcagtgaaatgcccctgttcgctgacctgtcccagattcccctcactcccgatcttgatcagatgacactaagtcccgatttgggagaaactgacctatcccccaattttgggcagatgtcactcagtcccgatctttctcaggtaactctttcccccgatatctctgatactacactcctacccgatttatctcaaatcagtcctccccccgatctggatcagatattctatccatcagaatcctcacagagtcttctccttcaggaatttaatgagtccttcccctatccagatctaggacagatgccttctccctcttctcccacattgaacgatacgttcttgtcaaaagaattcaatccattggtgatagtcggactcagtaaagatgggactgattatattgagatcatccccaaagaggaagtgcagtcctcagaagatgattatgcggaaatcgactatgttccatacgatgatccctataaaacagatgttcgcacaaatatcaactcatcacgagaccccgacaacatcgctgcttggtatctaagaagtaataacgggaacaggcggaattattatatcgccgcggaagagatctcttgggattatagtgaattcgtgcagcgcgagactgatatcgaagattcagatgatatccccgaagatacaacatataaaaaagtggtgttcaggaaatacctagacagtacatttacaaaaagggatcccaggggagaatatgaagaacatctcgggatcctgggacccatcatcagagccgaagtagatgatgtgatacaggtccggttcaaaaacctggcatctcggccatactctctccatgctcacgggttgtcttatgaaaaatcttcggaagggaagacatatgaagacgattcccctgaatggtttaaagaagataatgccgtccagcccaacagttcttatacatatgtgtggcatgctactgaacgctcaggacccgaatcacctgggagtgcatgtcgggcttgggcctactatagtgccgtgaaccccgaaaaagatatccacagtggactaattgggccactgttgatctgccagaaaggaatactgcataaagattctaatatgcctatggatatgagggaattcgtgttgctgtttatgacatttgatgaaaaaaaatcttggtactatgaaaaaaaatctcggtctagttggaggctgactagttcagaaatgaagaaatcacatgaattccacgccataaacggaatgatctattcgctccccgggcttaagatgtatgaacaggagtgggttcgtcttcatctgctcaacatcggaggatcccaggacatccatgtggttcatttccatgggcagacactgctagaaaacgggaacaaacagcaccagctaggggtgtggcctcttctgcccgggagttttaaaacactcgaaatgaaagcctctaaaccaggatggtggcttctgaacacagaagtaggggaaaatcaaagggccggaatgcagactccattccttataatggatagagattgtcgaatgcctatgggactctccactgggatcatatccgattcacagattaaagcatctgaatttttgggatactgggaaccacgacttgccagactcaataacggagggagttacaatgcttggtcagtggaaaagcttgctgcggaatttgccagtaagccttggatccaggtggatatgcagaaagaagtgatcatcacggggatccagacacagggggccaaacattatctgaagtcttgctatactactgagttctatgtagcttattcatctaaccagatcaactggcagatttttaagggaaattcgactcgaaacgtgatgtatttcaatggaaattcggatgcttccactatcaaagagaaccagttcgatcctccaatcgtggctcgctacatccggatatcacccacaagggcctataatagaccaacactccgattagaactgcaggggtgcgaagtgaacggatgttcaacgccactggggatggaaaacgggaaaatagaaaacaaacagattacagcatccagttttaaaaagtcctggtggggggattattgggaaccatttcgggctcggcttaatgctcaggggagggttaatgcctggcaggcgaaagccaacaacaacaaacagtggctcgaaatagatctcttgaagataaaaaaaattacagcaatcatcacacaggggtgtaaatccctatcttcagaaatgtatgtgaagtcctatacaatccactacagtgaacagggagtggaatggaaaccttaccgattaaaatcttccatggttgataaaatcttcgaaggaaacacaaacacaaagggacacgtaaaaaactttttcaatccacctatcatctcccgctttataagggtgatcccaaaaacttggaatcagtctatcgcactccggctggaactttttggatgtgatatctac

SEQ ID NO: 2307 - DNA, 6672 bp, Artificial Sequence
  derived and/or modified sequence
atgttcccgggttgcccccgcctctgggtgctggtggtgctggggaccagctgggtggggtggggatcccagggaaccgaggctgctcaactgaggcagttttacgtggcggcccaaggaatctcgtggtcctaccggccggagccgactaactcgtcgctcaacttgagcgtgaccagcttcaagaaaatcgtgtatagggaatacgagccgtacttcaagaaagaaaagccgcaaagcaccatctcgggcctcctcgggccaacgctctacgccgaggtgggggatatcatcaaggtgcacttcaagaacaaggctgataagccactttctatccatcctcagggcatccgctactcgaagctctccgagggagcgagctatctggaccacacctttcccgccgaaaagatggacgacgcagtagctccgggacgcgaatacacttacgaatggtcaatctccgaggactcaggtccaacccatgacgaccccccttgtctgactcatatctattacagccacgaaaacctcatcgaggacttcaactcgggtctgatcggcccgctgcttatctgcaagaaaggaactctcactgaaggaggaacccaaaagacctttgacaaacagattgtgctgctgtttgcagtgtttgatgaaagcaagtcgtggtcgcagtcgtcatccctgatgtacactgtgaacggctatgtcaatggcacgatgccagacatcactgtgtgtgcgcacgaccacatttcctggcacctgctgggaatgtcgtcaggcccagaactgttttcgattcacttcaacggtcaggtcctggaacaaaaccatcacaaggtgtccgctatcactctggtgtcggcaacctccaccactgcaaatatgactgtgggtcctgaaggaaagtggatcatcagcagcctcacgccgaagcacctgcaggctggaatgcaggcctacatcgatatcaagaactgtccgaaaaagaccaggaatctcaagaagatcactcgggagcagcggaggcatatgaaacggtgggaatacttcatcgcagccgaagaagtgatctgggactacgcgcctgtgatccctgccaatatggataagaagtaccggagtcagcatctggacaacttctccaaccagatcggaaagcactacaagaaggtgatgtacacccaatacgaggacgaaagtttcaccaagcataccgtgaacccgaacatgaaagaggacggtattctgggtccaatcattcgggcacaggtcagggataccttgaagatcgtgtttaagaacatggcttcccggccatactccatctaccctcacggagtcacgttctcgccgtacgaggacgaggtgaacagctcgtttactagcggacggaataacacgatgatccgcgcggtccaaccgggagaaacctatacctacaagtggaacatcctggaattcgacgaacctactgagaatgacgcgcaatgcctcacgcgcccatactactcggatgtcgatatcatgcgggatattgcctcgggactgataggattgctcttgatttgtaagagcaggagcctcgatcgccgcgggatccagcgcgccgcagatattgagcagcaagccgtgttcgcagtgtttgacgagaacaagagctggtacctggaggataacatcaacaaattctgcgagaatcctgacgaagtgaagcgggacgatccaaagttctacgaatcaaacatcatgagcactatcaacggatacgtgccagagtcgatcacgacgctgggcttctgcttcgatgacactgtgcaatggcacttctgctcggtgggaacccaaaatgagatcctgactatccatttcactggtcatagcttcatctacgggaaaagacacgaagataccctcacccttttccctatgcggggagaatcagtcaccgttaccatggataacgtcggaacttggatgctgacttctatgaactcgtccccacgatccaagaagttgcgcctgaaattccgtgatgtcaagtgcatccctgacgacgatgaagattcctacgaaatcttcgagccgccggaaagcaccgttatggccacccggaaaatgcacgatcgcctggaacccgaggacgaagagtcggacgcagattacgattaccaaaaccggctcgccgcagcactcggaatccgctcatttagaaacagctcgctgaatcaggaagaagaggagtttaacctgaccgcgctggcgcttgagaacggtaccgagttcgtgtcctccaacaccgatatcatcgtcggcagcaattactcgagcccgtccaacatctcgaaattcactgtgaacaacttggcggaaccgcagaaagcgccgagtcatcagcaagccacgaccgctggctcgcccctccgccatctgatcggaaagaattccgttctgaactcgtcaaccgcggaacatagctcaccttattcagaggacccgattgaggacccgctgcagcctgacgtgaccggcatcagactcctgtcactgggggcaggcgaattcaagtcccaggaacacgcaaagcacaagggaccaaaagtggagcgcgaccaagccgcgaagcatagattctcctggatgaaactgctggcgcataaggtcgggcggcacctgtcgcaggatactggatccccatcgggaatgcgcccgtgggaagatttgccttcgcaggacaccggatccccgagccgcatgcgaccgtggaaagatccaccgtccgacttgctgctgctgaagcagtccaactcgtccaagatcctggttgggcgctggcacctggcctccgaaaagggatcctacgagattattcaggacaccgatgaggacactgcagtcaataactggctgatttcaccacagaatgcctctcgggcatggggcgaatccactcctctggccaataagccggggaaacagagcggacacccgaagtttccaagagtgcggcacaagtcgttgcaagtcagacaggacggaggcaagtcgcgcctgaagaaatcgcagttcctgatcaaaacccgaaagaagaaaaaggagaagcatactcaccatgcgcctcttagcccacggaccttccacccgctccggtcagaagcgtacaataccttctccgaacggcgcttgaagcattctctcgtcctgcacaaaagcaacgagacttccctcccgaccgacctgaaccagaccctgccatccatggactttggctggatagcctccttgccggatcacaatcaaaactccagcaacgacactggacaggccagctgccctccaggattgtaccagaccgtgccaccggaggagcactatcagaccttccctatccaggacccggaccagatgcactccacctcggacccctcccaccggtcctcctccccggaactttccgaaatgctggagtacgacaggtcccacaaatcattcccgacggatatctcccagatgtcgccttcatctgagcacgaggtgtggcagaccgtcatctcgcctgacctgtcccaagtgactctgtctcccgagctctcgcagactaatctcagtcctgacttgtcgcatactacgctctcgcccgaattgatccaacgcaacttgagtccggcactgggtcagatgcctatctccccagacctgtctcacaccactctgtcgcccgatctttcgcacaccactttgtcgctggacctgagccaaacgaacttgtcaccggaactctcccagaccaacctttcccccgccctcgggcagatgcccctgtcccctgacctgtcacataccaccctgtcccttgatttctcgcagacgaacctgtccccggaactgtcccatatgactctgtccccagagttgtcccagaccaatctcagcccggccttgggacaaatgcctatctctccggatctcagccataccactctgagcctggacttttctcagactaatctttcccctgagctgagccaaactaatctgtcaccggctctcggccaaatgccactgtcaccagaccccagccatactactctgagccttgatttgtcacaaaccaacttgtccccggagctgtcccaaaccaatctctcaccggatctgagcgaaatgccgctctttgcagatctcagccaaatccctctcacgccggacctggatcagatgaccctgtctccggatttgggtgaaactgacctttcgcctaactttgggcagatgtccctgtcaccggaccttagccaggtgactctcagcccggatatctccgataccactctcctgcccgaccttagtcaaataagcccgccgcccgatctggatcagattttctacccttccgaatcaagtcaatcgctcctgctccaggaattcaatgagagcttcccctacccagatcttggtcagatgccatccccgtccagcccgactctgaacgataccttcctgtcgaaagagttcaacccgctggtgattgtcggactctccaaggacggaactgattacattgagattatcccaaaggaggaagtgcagtcatcagaggatgactacgcggagatcgactacgtgccgtatgacgacccgtacaagaccgacgtgagaaccaatatcaactcatctcgcgatccggacaatatcgcagcttggtacctgcggtccaacaatggtaatcgcagaaactactacattgcggctgaagagatttcgtgggactactctgagtttgtgcagcgcgagactgatatcgaagattcggatgacatccccgaggacaccacttacaagaaagtggtgttcaggaaatacctcgactcgacgttcacgaagagagatccccgcggagaatatgaggagcatctgggcatcctcggacctatcatccgcgccgaagtggacgacgtaatccaagtgcgcttcaagaaccttgcctcccgcccgtactccctccacgcgcacggactctcgtacgaaaagagctcggagggaaagacgtacgaagatgactcccctgaatggttcaaggaggataatgctgtccagccaaattcctcctacacctacgtttggcatgcgaccgaacggtcaggacctgagtcacctggttccgcttgccgcgcatgggcctactactccgcagtcaatccggagaaggatattcacagcggcctgatcggaccactcctgatctgccagaagggaattttgcataaggatagcaacatgccgatggacatgcgggaatttgtactcctgtttatgactttcgacgaaaagaagtcctggtactacgagaagaagtccagatcctcttggcggctgaccagctcagagatgaaaaagtcacacgaattccacgcaatcaacggaatgatctattcgctgccggggttgaagatgtacgagcaggaatgggtgcgcctgcaccttctcaatatcggcggatcccaagacattcatgtggtccactttcacggccagactctcctggaaaacggcaacaagcaacaccagttgggggtctggccgctgcttcctggatcgttcaagactctggagatgaaggccagcaaaccaggctggtggctgctcaacactgaagttggagagaaccaacgcgcagggatgcaaacccctttcctgatcatggaccgcgactgccggatgccgatggggctctcaactggaatcatcagcgacagccagataaaggcctcggaattcctcgggtattgggagccacggctggccagactcaacaatggtggatcgtacaatgcctggtcggtggaaaaactcgcggccgaattcgcgagcaagccatggattcaagttgacatgcagaaagaagtcatcattacgggcatccagactcagggagctaagcattacctcaaaagctgctacaccaccgaattctacgttgcctactctagcaaccaaatcaattggcagatcttcaaaggtaattcgacgaggaacgtcatgtacttcaacgggaattccgatgcctccaccatcaaagagaaccagttcgaccccccgatcgtggcgcggtacattagaatcagccctacccgtgcatacaacaggccgaccctgaggctggagctccaaggatgtgaagtcaacggttgttcgacgccgttgggtatggaaaacggaaaaatcgagaacaaacagatcaccgcttcttcctttaagaaatcctggtggggcgactactgggagccgtttcgggcgagactgaatgcacaaggacgcgtgaacgcctggcaagcaaaagctaataacaacaaacagtggctggagatcgacctgctgaaaatcaaaaagatcactgccattatcacgcaggggtgcaagagcctttcgtcagaaatgtacgtgaagtcctacaccatacactactccgaacagggagtcgaatggaagccgtacaggctgaagtcgtcgatggtcgacaagatcttcgagggcaataccaacacgaaaggccacgtgaagaactttttcaatccacctatcatctcacgtttcatacgcgtgatccccaagacttggaaccagagcatcgcacttcgactggaacttttcggatgcgacatctac

SEQ ID NO: 2308 - DNA, 6672 bp, Artificial Sequence
  derived and/or modified sequence
atgttccccgggtgcccgagactctgggtcctagtggtcttaggcacatcgtgggtggggtgggggagccaggggaccgaggcagcccagctgcggcagttctacgtggcagctcagggaatttcctggagctacaggcccgagccaaccaactcgtcactgaatttgagtgtgacaagttttaaaaagattgtgtaccgagagtacgagccctactttaaaaaagagaaacctcaatccaccataagtggactgcttggtcccactttgtatgcagaggtgggggacattatcaaggtccactttaagaataaggcagacaagcctctctccatacacccccagggtataagatactctaagttatcagagggcgccagttacttggaccacaccttccctgcggaaaagatggatgatgctgtggcccccggccgggaatacacctacgagtggtctattagcgaggacagcgggcctacacacgatgatcctccctgcttgacccacatctattactcccatgagaatctgatcgaagatttcaactccggtctcatcggccctctgttgatttgcaaaaaggggacccttactgaaggcggaacacagaagactttcgataaacagatcgtgctgctgttcgccgtctttgacgagtccaagagctggtcccagagcagttcgctcatgtatactgtcaacgggtacgttaacggtaccatgccagacattaccgtgtgtgctcacgatcatatttcgtggcatctgctcggcatgtccagtggacccgagctcttctcaattcatttcaatggccaggtgcttgagcagaaccatcataaggtgtccgcaattaccttggtaagtgctacgtctacaaccgccaacatgacggtggggccagaaggaaagtggataatcagcagcttaaccccaaaacacctacaagccggcatgcaggcgtacatagacatcaaaaactgccctaagaagactcggaatctgaagaaaattacgcgagaacagaggcgccatatgaagcgttgggaatactttatcgctgccgaggaagtaatctgggactacgcacccgtgattcctgctaatatggacaaaaagtaccggtctcagcatttagacaacttctcaaaccaaattggcaaacattataagaaggtgatgtatacacagtatgaagacgagagcttcacaaagcacactgtaaacccaaatatgaaggaggatggtatcctgggcccgatcatcagagctcaggtccgagacacccttaaaatcgtttttaaaaacatggcctcccgtccatatagtatctatccccatggggtaacatttagcccatacgaagatgaggtgaactcatcttttacttcaggacgcaataacaccatgatacgagccgtgcaacccggcgagacttatacctacaagtggaacattctggaatttgacgaacctacagagaacgacgcccagtgcctcacaaggccgtattacagcgatgtcgatatcatgagagacattgcatctggtttgattggcctcctcctgatctgtaagtctcggagtcttgaccggagaggtatccagcgtgcagcagatatcgaacagcaggccgtgttcgctgtcttcgatgaaaataaatcttggtatctagaggataacataaacaaattctgcgaaaaccccgacgaagtcaagcgtgatgaccccaaattctatgagagcaatatcatgtcaaccattaatgggtatgtaccagagagcatcacaaccctgggcttctgttttgacgatacggttcagtggcacttttgctcagtgggtactcaaaacgagatcctcactatccactttaccggtcacagctttatctatggtaagcgacacgaggatacgctgaccctgtttcctatgcgaggtgagagtgttacagttaccatggacaacgtaggaacgtggatgctgacgagtatgaattctagccccaggagcaagaaacttcggctgaagtttcgcgacgttaagtgcattccagacgatgatgaagactcatacgaaatctttgaaccaccagagagcacggtgatggctactaggaagatgcatgacaggctcgagccagaggacgaagaaagcgatgcagattacgattaccagaaccgcctggcggcggcgttagggatccgctcctttagaaacagtagtctgaatcaggaggaggaggagttcaacctcacagccctcgcactcgaaaatggcaccgagtttgtgagctctaatactgacattatagttggaagcaactacagctctccaagcaatatatctaaattcaccgtgaataacctggccgaaccccagaaagccccatctcaccaacaggcaacgaccgcaggtagccctctacggcacttgataggaaaaaactccgtgttgaatagtagtaccgcggaacactcgagcccctactctgaggaccctattgaagacccacttcaaccagatgttaccgggattaggctgctatcgctcggggcaggcgagtttaagtcccaggaacacgcaaagcataaaggcccaaaggttgaacgggaccaagctgctaaacacagattcagttggatgaagcttctagctcacaaggttgggagacacctgagtcaggacaccggctcaccttctgggatgcgtccttgggaagatctcccatcccaggacaccggatccccctctcgtatgagaccttggaaagatcccccctccgacctccttctactgaagcagagtaattcctccaagattctggtgggccgctggcacctcgctagcgaaaaaggttcgtatgaaatcatccaggatactgacgaggacacagcagtcaataattggctcattagtccacagaatgcatcccgtgcctggggagagtccacaccgttggcaaataagcctggaaaacagtcaggccacccaaaatttccccgagtgaggcacaaatctctgcaggtgcggcaggacggcggcaaatctagattgaaaaagagccagttcctaattaagacaaggaaaaagaaaaaggagaagcacacgcatcacgcgcctctttctccaaggacgttccacccccttcggtcagaggcctataatactttttccgagagacggttgaaacatagcttggtgctacataaatccaacgaaacaagtctgcccactgatttgaaccagacactgccttccatggacttcggctggattgcttctctgccagaccataatcagaatagctcaaacgatacaggacaggcttcttgtccacccggcctgtatcagaccgtcccacccgaggaacattaccagaccttccctattcaggatcccgatcagatgcactctactagtgacccatctcacagaagctcctcacctgagctcagtgaaatgctggagtacgaccgatctcataagagtttcccaacggacattagccaaatgagcccaagcagtgaacatgaggtgtggcaaaccgtcatcagtccggatttgtcgcaggtgaccctgtcccctgagctgtcgcagactaacttgagcccagatctgtctcataccaccttgtccccagaattgattcaacggaatctttcccctgccctcggacagatgccaatctctcccgacctgtcccacaccaccctgtctcctgacctgtcacacacgactctctcgctggacctttctcagacaaatctgtctcctgagctgtctcagaccaatcttagcccagcgttgggtcaaatgccacttagcccagacctgtctcataccacactaagcctcgactttagccagacaaacctatcccccgagctctctcacatgaccctctcccccgaattgagccaaacaaatttatctcccgcacttggccaaatgcccatctctcctgatttgtcgcatactacattgtccctagatttctctcagacaaacctgtccccagagctctcccagacgaacctgagcccagcccttggtcaaatgcctctgtctcccgatccaagccatacaacgctctcactcgacctatcccagaccaatctctctccagagctcagtcagacgaatctgagccctgacctgagcgaaatgcccctcttcgccgatctgtcacagatccccctcactccggatttggatcagatgacactcagtcctgacctgggcgagacagatttgagtcccaattttgggcagatgtctttgagcccagacttgagccaagttaccctgtcacccgatatctcggacactactctgctgccggatctatctcagatcagcccaccaccagatcttgatcagatcttttacccctccgagtcctcccagtccctcttgctgcaagagttcaacgagagctttccataccctgacctgggccagatgccctccccgtcctcgccaaccctcaatgacacctttttgtcgaaggaattcaacccactggtgattgtcgggctttccaaggacggaacagattatatcgagatcatcccaaaggaggaggtgcagtcatccgaggatgattacgccgagatagattacgtgccttatgacgatccctataagacagatgtgagaaccaatatcaactcttccagggatcccgacaacatcgctgcttggtatttgcgctctaataatggtaatagaagaaactattatattgccgcagaagaaatcagctgggattatagcgaattcgtgcagcgggaaaccgacattgaagatagtgacgacattccagaggacacaacatacaaaaaggttgtgttcagaaagtatctggactcaacttttaccaagagagacccccggggtgagtacgaggaacacctgggcatcctcggccccattattcgcgcggaggtggacgatgtgatccaggtgagatttaagaacctggcatctagaccgtattcgctgcacgcacatgggctgtcatacgaaaagtcttccgaaggaaaaacgtacgaagatgacagcccagagtggttcaaggaggacaatgctgtgcaacccaactctagttacacctacgtttggcacgctactgagcggtccggtcccgagtctcctggctctgcatgtagggcatgggcctattattccgctgtaaatccagaaaaagacattcattcaggcctgatcggcccgttactgatctgtcagaaaggaattctccacaaggacagtaacatgccaatggacatgagagaattcgtgttgctcttcatgaccttcgacgagaaaaagtcctggtattacgagaagaagagtcggtccagctggcgtctgacatcttcggaaatgaagaagagccacgagttccacgcaatcaacggtatgatttactccctgcctggtttgaagatgtacgagcaagagtgggtacggcttcacctgttgaacatagggggctctcaggatatacacgtggttcacttccatggacagaccctcttggagaacggtaacaaacagcaccagcttggcgtatggcccctgttgcctgggtcgtttaagacacttgaaatgaaagctagtaagcccggctggtggctgctgaatacggaggtgggggagaatcagcgtgccggaatgcaaacacctttcctaatcatggacagagattgtagaatgcctatggggttgagtacaggtatcatcagcgactcccagattaaagcttccgagttcttgggctactgggaacctagactggcacgactcaataatggaggatcctataacgcatggtcagtggagaaactcgccgctgaattcgcttctaagccgtggatacaagtcgacatgcagaaagaggtgatcatcacagggatacagacccagggcgccaaacattatctcaaatcatgctacacgaccgagttttacgtggcctactcgtcgaatcagataaattggcagatttttaagggcaactctacgcgcaacgtcatgtactttaatggtaattccgacgcgtccaccataaaagagaaccagttcgacccacccattgtcgcaaggtacatccggatctcaccgacacgggcctacaataggcctacactcagactggaattacagggctgcgaggtgaatgggtgtagtacccccctgggaatggagaacggaaaaatagaaaacaagcagattacagcgagctccttcaagaagagctggtggggcgactattgggagccattcagggcacggcttaatgcccaagggagggtgaacgcatggcaggcgaaggccaataataataagcaatggctggaaatcgacctgctgaaaatcaaaaagatcacagctatcatcactcaggggtgcaaatcactgtcgtccgagatgtatgtgaagagttacactatccactacagcgagcaaggagttgaatggaagccttataggctcaaatcatcaatggtcgataagatctttgaagggaacaccaacacaaaaggccatgtgaagaacttctttaacccccctatcatctctcgttttattagggtcatccccaaaacatggaaccagtccatagccctgcgtctggagcttttcggatgtgacatctac

SEQ ID NO: 2309 - DNA, 6672 bp, Artificial Sequence
  derived and/or modified sequence
atgtttcctggctgcccgagactttgggtgctggttgttctgggcacgagctgggtgggctggggatcccaggggacagaagccgcccagctgagacagttttatgtggcagcccaggggataagctggtcttataggccggagcccactaatagttccctcaatctgtctgtgaccagcttcaaaaagatagtataccgagaatacgagccctatttcaagaaggaaaagccccagtccacgatctccgggctattaggacctactctgtacgctgaggtcggcgatatcatcaaagtccacttcaaaaataaggcggacaaacctttgtccattcatccccaagggataagatatagcaagttaagtgagggcgcgagctacctggaccatacctttcccgcggagaagatggatgatgcagtggcgcccggccgagaatatacttacgagtggtctatctccgaagactccgggcccacccacgatgatcccccctgcctgacacacatctattatagccatgaaaatctgatcgaggactttaactccgggctgatcggtcctctcctcatttgtaaaaagggtacacttaccgaagggggcacccagaaaaccttcgacaagcagattgtgttgctattcgccgtcttcgacgagagcaagtcttggtcgcaatcctcatccctgatgtacactgttaacggatacgtgaatggcacaatgccagatattacagtctgtgcacatgaccacatttcctggcacctgctcgggatgtctagtggccctgagctctttagcatccacttcaacggtcaggtgctagagcagaaccaccataaggtgtctgcgataactctagtgagcgcgacaagcaccacggcaaatatgaccgttgggcctgaaggcaagtggataataagttctttgacacctaaacatctgcaagcaggaatgcaggcttatattgatattaagaattgtccaaaaaagacaagaaatttgaaaaagatcacaagagagcagagacgtcatatgaagaggtgggagtattttatagcagcggaagaagtgatctgggattacgccccagtgatccctgctaatatggacaagaaatataggagccagcatctggacaacttctccaatcagatcggaaaacattacaagaaggtgatgtacacgcagtacgaagatgagtcattcactaagcataccgtgaatcccaatatgaaggaggacggaatcttaggtccgataatccgagcccaggtgagggacaccctaaagatcgtcttcaaaaacatggccagcaggccctacagtatttaccctcacggagtcaccttctcaccttacgaggacgaagtgaacagctccttcaccagcggtcgcaacaacaccatgatcagggcagtgcagcctggtgaaacctatacttataagtggaacatcttggagttcgacgaacctacagaaaacgacgcccagtgtctcactaggccatactattctgacgtagatattatgcgggacatcgcctccggcctgattggactcctcttaatctgtaagtcgcgatccctggaccgaagagggatccaacgagccgcagacatagagcagcaagctgtttttgctgtcttcgacgagaacaaaagttggtacctggaggacaacattaataaattctgtgagaaccccgatgaggtgaaaagagatgatccaaagttctacgagagtaacatcatgagcacaattaacggctacgtcccagagagcataactaccctcggattttgcttcgatgacaccgtgcagtggcacttttgttctgtaggcacccagaacgaaattctcacaattcacttcacaggccattcttttatctacggcaaaaggcacgaagataccctcactctgtttcctatgaggggagagagcgtaactgtcactatggataatgtgggaacatggatgctgaccagcatgaatagttcaccccgaagcaaaaagctgagactgaagttccgagatgttaagtgtatacccgatgacgacgaggacagttatgaaatctttgaaccaccagaatctacagtgatggccactaggaaaatgcacgatcggctggagcccgaagatgaggagagtgacgccgactatgattaccagaaccgactagccgccgccctgggtataaggtcgttccgtaacagctcgcttaatcaagaggaggaggaattcaatctcacagcattagcgctagaaaatgggaccgaattcgtctcgagcaatacagatatcatcgtcggtagcaactattcctccccctcaaacatctcaaaatttacggtgaacaatctagccgaacctcaaaaagccccctcacaccagcaagccaccacagcaggtagccctttaagacacctgattgggaagaattcagttctcaatagctcgaccgcagaacatagcagtccttatagtgaagatcccattgaggacccccttcagcctgacgtgacaggaatccgactactgtcccttggggcaggcgaatttaaatctcaggagcacgctaagcataaggggccaaaggtggagagagaccaggctgctaagcatcgattttcctggatgaaacttctagctcataaagtgggaagacacctttcccaggataccgggtccccctcaggtatgcgaccatgggaggatctgccatcccaagatacgggctcaccatccaggatgcgaccctggaaggaccctcccagtgatctgctactgcttaagcagtcaaattccagcaagatccttgtgggccgatggcatttggcctctgagaagggctcctacgaaatcatccaagacaccgatgaagacacagccgtgaacaactggctgataagtccacaaaatgcgagtcgggcctggggcgaatctactccacttgccaataagccaggaaagcagtccggccacccaaaatttccacgcgtgaggcacaagagtttgcaggtcaggcaagatggcgggaagtctcgactgaaaaagtcgcagttcctgattaaaacccgaaagaagaaaaaagaaaagcatactcaccatgcccctctatcaccacgaacgtttcatcctcttaggagtgaagcctacaacaccttctctgaaagacggttgaaacatagcctagtactgcacaagtcgaatgagacatcgctccccaccgatctcaatcagactcttccctcaatggatttcgggtggatcgcctctctgcccgaccacaatcagaacagttccaacgacacagggcaggcttcttgcccgcctgggctgtatcagacagtgcctccggaagaacactatcagacttttcccattcaggaccctgatcaaatgcatagcacgagtgacccatcacatcggtcgagtagtcccgagctatcagagatgctggaatacgatagatcccacaagtccttccccacagacatctctcagatgagtccatccagcgagcacgaggtatggcagaccgtcatctctccggatctgtcacaggtgacccttagccccgagctgtctcagaccaacctcagccctgatctgtcccacacgacactgtcccccgaattgatacagagaaacctaagtccagctctgggacagatgcctataagtcctgacctctctcacaccaccctgtccccagatttgagtcacaccacactgtctttggatttgagccagactaacctgtctcccgaactgtctcagacaaacctgtcgcccgcattggggcaaatgccattgtcccccgacctcagtcacacaacactgtccctggatttcagtcagacaaatctctccccagagctgagccacatgaccctctcacccgaactaagtcagaccaatttgtcccccgcacttggccagatgcctatttcccctgacctaagccacaccacactgtctctggatttttcacagaccaacctttcacccgagctgtcgcagacgaatctgtcacctgctctcggtcagatgccattgagtccggatccttctcacacaaccctgtctctcgatctgtcccaaacaaacttgtccccggagctatcacaaacgaatctgagccctgatttgtctgagatgccgctgttcgcagatctaagccagataccgctgacacctgatttggaccaaatgacgctctcccccgatttaggagaaacagacttgtcacctaattttggccaaatgtccttgagcccagacttgtcccaagtgaccctgagccccgacatcagtgacaccaccctgctgcccgacctgtctcagatttccccacccccagatctcgatcagattttctatcccagtgagagctcccaatctctgttgctgcaggagtttaatgagagtttcccatatcccgacctcgggcaaatgccatcccccagctctcccaccctcaatgacacattcctgtccaaggagtttaaccccctggtaattgtgggcctgtctaaggacggaaccgactatattgagattattccgaaagaagaggtccagagttccgaggacgactatgccgaaatcgattacgtcccatatgatgacccttacaagacagacgtgaggacaaatatcaatagctccagggaccccgataatatcgcggcttggtatctccgttctaacaatggaaacaggcggaattattacatcgccgccgaggagatcagctgggattacagcgagtttgtgcagcgagagactgatatcgaggatagtgatgatattccagaggatacaacgtataaaaaagtcgtattcaggaaatatctggatagcactttcaccaaacgggatcctcgaggggaatatgaggaacacctgggcattttggggcccatcataagggcggaagtagatgatgtgattcaagtccgatttaaaaatttggccagccgtccttattccctgcacgcacatggcctgtcctatgagaagtctagcgagggcaagacatacgaggatgacagccctgagtggtttaaggaggataacgccgtccagcctaattcctcctacacatacgtctggcatgcaacagagcgatcaggaccagagtctccaggtagtgcctgcagggcgtgggcttactattcagcggtgaatcccgagaaagacatccattctggactgattgggccactgcttatctgtcagaaaggtattctgcacaaagactcgaacatgccaatggatatgcgggagtttgtgctcttatttatgacctttgacgaaaaaaagtcttggtactatgagaaaaagtctcggtccagctggaggctgacatcttcagaaatgaagaaaagccacgaattccatgcaatcaacggcatgatatactccttgcctggtctgaagatgtacgagcaggaatgggtgcggcttcacctgcttaatatcggcgggagccaggacatacacgtagtgcattttcatggacagacactactcgaaaacggtaataagcagcaccaattaggggtgtggccactgctaccaggcagcttcaagaccctcgaaatgaaagccagcaagccggggtggtggctgctgaacacagaagtaggggaaaatcagagggccggaatgcagacgccttttcttatcatggatcgagattgccggatgcctatggggctgtccacagggataatttccgacagccagataaaggcctctgagtttctcggctactgggaacctcgtctagccaggctgaataacgggggatcctacaacgcttggagcgtagagaagctggctgccgagttcgccagtaaaccttggatccaggttgatatgcaaaaggaagtgatcatcacagggattcaaacgcagggagccaaacactatcttaaatcttgttacactacggagttttacgtggcgtactctagcaaccaaattaattggcaaatcttcaaagggaactctacccggaacgtgatgtactttaatggcaattccgatgcttctactataaaagagaaccagttcgacccaccgatcgtcgccagatatattaggatcagccccaccagagcctataaccgacccactctccgcctggagctgcagggctgcgaggtcaacggatgttcgacacccttgggcatggaaaacggcaagatcgaaaacaagcagatcaccgcatccagctttaagaagtcctggtggggagactattgggagcccttccgggcacggcttaacgcacagggcagggtcaatgcctggcaggccaaggctaacaacaataagcagtggctggagatagacctattgaagattaagaaaataaccgccatcatcactcaagggtgtaaatctctgagctcggagatgtatgtcaagtcttataccatccattattccgagcagggtgtcgagtggaagccctatcgtctgaaatcctcgatggttgataaaatattcgaagggaacacaaacacgaagggccatgtgaagaattttttcaaccctccgatcattagcaggttcatccgcgtgattcctaaaacctggaatcagagcatagccctcaggttagaactctttgggtgcgacatatac

SEQ ID NO: 2310 - DNA, 6672 bp, Artificial Sequence
  derived and/or modified sequence
atgttcccaggctgccccagactctgggtgctagtggtgctgggcacgtcatgggtcgggtggggctctcagggcaccgaggctgcacagctgcgccagttttacgttgctgctcagggcattagttggagctatcggcccgagcccacaaacagctctctgaacctgagcgttacttctttcaaaaagatcgtgtaccgtgagtatgagccttattttaagaaggaaaagccacaaagtaccattagtgggttgcttggcccgacactatatgccgaagtcggagacattataaaggtgcatttcaaaaacaaggctgataaacccttgagtatccacccccagggcatccggtactcaaagctctctgaaggggccagttacttggaccacacttttcccgctgaaaagatggatgatgccgtagcgccagggagggaatacacatacgagtggagtattagtgaggactcagggccgactcacgatgatcccccctgtctgacacacatttactacagccacgagaatctcattgaagacttcaactctggtttgattggtccattgttgatttgtaagaaaggcaccttgaccgaaggaggaacacaaaagaccttcgacaaacagatcgtcctgctgttcgcagtgtttgatgagtccaaaagttggtcacagtcttctagtctgatgtataccgtcaatggatatgtcaacggaactatgcccgatataactgtgtgtgctcacgaccacatcagctggcaccttctcgggatgtctagtggccctgaactatttagcatccactttaacgggcaggtgctggaacagaatcaccacaaagtaagcgcgatcacactggtctccgctaccagtactacggccaatatgaccgtcgggcccgaggggaagtggataatctcctcactgactcctaagcacctgcaagccgggatgcaggcgtacatagacataaagaactgtcccaaaaagaccaggaacctaaagaagattacccgcgagcagagacgccacatgaagaggtgggaatacttcatcgccgccgaagaggtcatatgggactatgctccggtaattccggctaatatggataaaaagtaccgcagtcaacacttggacaacttttcgaaccagatcgggaaacactacaagaaggtgatgtacacacaatatgaagacgagtcttttactaagcacaccgtgaaccctaacatgaaggaggatggcattcttgggcctataatccgcgcccaggtgcgggacacgttaaagatcgtttttaaaaacatggcgtcaaggccttattccatctatccccatggggtgactttctctccttacgaggatgaggtgaactcatctttcactagcgggcggaacaatacaatgatccgcgctgttcagccaggagagacatacacatataaatggaatattctcgagttcgatgaacccacggaaaacgacgcccagtgcttgaccagaccttactatagcgatgtcgatatcatgcgagatatcgcaagtgggctcataggcctgttattaatctgtaagagcaggagtctggacaggaggggaatccagagagcggcagacatagaacagcaggcagtgtttgccgttttcgacgagaacaaaagttggtacctcgaggacaatatcaacaaattttgcgagaaccctgatgaagtgaagcgtgacgacccaaaattttatgagtcaaacatcatgtcaactatcaatgggtacgtccctgaatcaatcaccactttaggcttctgcttcgacgacacagtgcagtggcacttctgctcagtcggtactcagaacgaaatcttaaccatacattttacaggacattccttcatctacggcaaaaggcacgaagataccctcacccttttcccaatgcgtggggaatcagtgactgtcacaatggacaatgtgggaacttggatgctgacctctatgaactcctctccgcgttcaaagaaacttagactgaaattcagagacgtgaaatgcatccctgatgatgatgaggattcttacgagattttcgagcctccagagtctaccgtgatggccacgcgaaaaatgcacgacagactcgaacccgaggacgaggagagcgacgcagattacgattaccaaaatcgcctagcagcagccctaggcatcagaagcttcaggaacagctcactgaaccaagaagaagaggagtttaatctgaccgccctggcacttgaaaacgggacagagttcgtgtccagtaatacggatatcatcgtgggttcgaactattcctctccttcaaatatctccaagttcaccgtgaataatcttgccgagcctcagaaggccccatcgcaccagcaggccactacggctggatccccactgcgacacctgattggaaagaatagtgtgctcaactcttccaccgctgaacactcctcgccctactccgaagatcccatcgaggatccgttgcaaccagatgtaaccggcatacggctgctgtcactaggagccggggagtttaaaagccaggagcatgcaaagcacaagggcccaaaagtggagcgcgatcaggctgcaaaacaccggttctcatggatgaaattgctcgcacacaaagtaggacgtcatttgtcacaggacacaggatccccttctggaatgcgtccctgggaagatcttccaagccaggatacaggaagcccctctagaatgcggccatggaaagatcccccaagcgatctgctgctgcttaagcaatctaactcctccaaaatcctggttggccggtggcatttggccagtgagaagggatcatatgaaataatccaggacacagacgaggacactgctgtgaacaattggttgatcagtccccaaaacgcgagtagggcctggggagagagcacgccattggcgaataagcccgggaaacagtccggtcatccaaagtttccaagggtgaggcacaagtccctgcaggtccgccaggacgggggaaagagcagattgaagaaaagccagttcctgattaagacccgcaaaaaaaaaaaggagaaacatacccaccacgcacccctgagcccccgcacctttcaccccttaaggtcagaagcctataacactttctcagaacgcagattaaagcactccttagttctgcacaagtccaatgaaacaagcttacctaccgacctgaatcaaactttaccaagcatggattttggctggatcgcatccctgcccgatcacaatcagaattctagtaacgataccgggcaggctagctgcccccccgggctctaccagactgttccccctgaagagcactaccaaacatttccaatccaggaccctgaccagatgcactcaaccagcgacccgtcccatcgcagcagcagccctgaactgtccgagatgttagagtatgatcgttcgcataagtcattccccaccgatataagccagatgtctccaagcagtgaacatgaggtttggcagaccgttatctctccagatctttcccaggtcactctctctccggaattgtcccagaccaacctcagccccgatctctcccataccacactatccccagaactaatccagcgcaatttatcacctgccttgggccagatgcccatcagtccagatctgtcccacaccacattatcgcctgacctgagccacacaaccctgtctctcgatctgtcgcagaccaacctatccccagaactgagccaaactaaccttagccctgcgctcggacagatgcctctgtcccccgacttgtcgcataccactctgtctttagatttcagccagaccaatctgtcccccgagttgtcccatatgacactgagtccggagctgagccagacaaatctctctcctgcgctaggacagatgcctattagtcctgacctgtctcatactacactgagcttggacttcagccagacaaacctctcgcccgaattgtcacagactaatctgagccctgctctggggcaaatgcctctcagtcctgacccatcccacacaacactaagtctggacctgagccagaccaacctgtctcctgaactgagccaaaccaatctgtctcccgacctttcagaaatgcccctctttgcggatctctcacagataccactgacaccagacctggatcaaatgaccctatcccctgacctgggagagaccgatctgtccccaaacttcgggcagatgtctttatctcccgaccttagtcaggtaactctgtcaccggatatttcagacaccaccctgcttccagatctgtcccagatatcaccaccacccgaccttgaccagatcttctacccctcagagagcagccagtccttgctgctgcaggaattcaacgagagctttccttaccccgaccttggacagatgccgtccccgtcttctcccacactcaacgatacttttctctcgaaggaattcaatcccttagttattgtgggattgagcaaagacggtacagattacattgaaatcattcctaaggaggaggtgcagagttccgaagatgattacgcagagatcgactatgtgccctacgatgacccttacaagaccgatgtgagaaccaatatcaacagctctcgggatcctgataacattgccgcctggtacctccgatcgaacaacggcaatcgaaggaactattacatagcagcggaggagattagttgggattattcagaatttgtccagagggagactgacatagaagacagcgatgacatccctgaggatactacctataagaaagtcgtctttcgcaagtacctggactcaacctttaccaagcgggatccaaggggtgaatatgaagaacatctcggtattctagggcctatcatccgagctgaagtcgatgatgtgatccaagttcgtttcaagaacctggcgagcaggccctatagtttgcacgctcacgggttgtcctatgagaagagtagtgaagggaagacttacgaagatgattcacctgaatggtttaaagaggacaatgcagtgcagccaaactcctcctatacctatgtgtggcatgctacagagcgcagcggtcctgagagcccaggctctgcctgcagggcatgggcatattattccgccgtcaaccctgagaaggacattcactctggtctgatcggcccgctgctgatatgccagaagggaatcctccataaggactctaatatgccgatggacatgagggaattcgttctgttattcatgacttttgatgaaaagaagagctggtattacgagaaaaagagtcggtcctcttggaggttaacttcgtcggagatgaaaaaaagccacgagtttcatgccattaatggcatgatctacagcttacctggtctgaaaatgtatgaacaggagtgggtcagactgcatttactcaatatcgggggttctcaggacattcacgtcgttcacttccatggacagactttgcttgaaaatggcaacaaacaacatcagcttggcgtttggcctcttttgcccggttcctttaagacattagaaatgaaggcctcaaagccaggatggtggctgctgaacactgaggtgggagagaatcagagggccggcatgcagacccctttcttaattatggatcgcgactgccgcatgcccatgggtctgtccactggaatcatctctgattcccaaatcaaggcaagtgagttcctcggctattgggaaccaaggttggctcgactcaacaacggtggctcttacaatgcttggtccgtggaaaagctggcagcggaatttgcttcaaaaccctggatacaggtcgatatgcagaaagaggtgataattactggcattcagacccaaggagccaaacactacctgaagagttgttataccacggaattttacgttgcttattcaagtaatcagatcaattggcagatatttaagggcaacagcactcgaaatgtcatgtatttcaacgggaactcagacgctagcaccatcaaagagaatcagttcgaccccccaattgtggctagatacataaggatttcgcctacacgggcctacaacaggcccaccctgagactcgagctgcagggctgtgaggtcaatggctgttccactccgttagggatggagaacgggaagattgaaaataaacagattactgcgtctagttttaaaaaatcctggtggggcgattactgggagccttttcgagcccgactaaacgcccaggggcgtgtgaatgcatggcaggccaaggcaaacaacaataagcaatggctggagatcgacctgctcaagatcaaaaaaattacagctattatcactcaggggtgtaagtccctgtccagcgagatgtacgtgaaatcctatacgatccactattctgaacagggagtggaatggaagccataccgactgaagagctcgatggtggacaaaatttttgaggggaacactaacactaaggggcacgtgaaaaacttttttaatccgcccataatctcccggtttatcagggttatccccaagacctggaaccagtcaattgcgctgaggttggagctcttcggatgcgatatttat

SEQ ID NO: 2311 - DNA, 6672 bp, Artificial Sequence
  derived and/or modified sequence
atgttccccggatgccccagactgtgggtgctggtcgtcctgggcacttcctgggtaggctgggggagccagggaaccgaagccgctcagctgaggcagttttatgtggcagcccaaggcatttcatggtcctaccggcccgaacccaccaattccagcctgaacctgtcagtaacatctttcaagaagatcgtgtacagagaatacgagccatatttcaagaaagagaagccgcaaagtaccattagtggccttcttgggcctactttgtacgctgaggtgggtgatataataaaggtccacttcaagaacaaggccgacaagcccctgagcatccacccccaggggattaggtactctaagctgtccgagggcgcgtcttacctggaccacacattccccgctgaaaagatggatgacgctgtggccccaggcagggagtacacctacgaatggagtatctcagaagactcaggcccaacccatgatgaccccccatgcctgacccacatatactattcccacgagaatctgatagaggatttcaacagcggacttatcggcccactgctcatctgcaaaaagggcacactcaccgagggggggacccagaagaccttcgacaaacagatagttctgctcttcgccgtgtttgacgagtcaaagtcctggagccaaagcagttccctgatgtatacggtcaacggatacgtcaacggcaccatgccggacataacagtttgtgctcacgaccatatctcttggcacctgctcggcatgtcttccgggccggagctgtttagtatccatttcaatgggcaggtgctcgagcagaatcatcacaaggtttcagctataactttggtctctgctactagcacaacggccaacatgaccgtaggtcccgaaggcaagtggatcataagcagcctgaccccgaagcatcttcaagccgggatgcaagcatacatcgacattaagaactgcccgaaaaaaactcgcaacctgaagaagattacccgcgaacaacgacgacatatgaagcgctgggagtacttcatcgctgccgaagaggtgatctgggactatgctcccgtgatacccgctaacatggataagaaatacaggtcccagcatctggacaacttttccaatcagatcggcaagcattataaaaaggttatgtatacccagtacgaggacgaaagcttcaccaagcacacagttaaccctaatatgaaggaagatggaatcttgggccccataatccgcgcccaggtgcgcgacacacttaaaattgtattcaaaaatatggcttctagaccttattctatatacccgcatggagttactttttctccctacgaggacgaggtcaattctagttttacatcaggtcgcaataacactatgatccgggccgtacagccaggcgagacctacacatacaaatggaacatccttgagttcgacgaaccgaccgagaacgacgctcagtgcctgacaaggccatattactctgacgtcgacatcatgcgcgacatcgcatccgggctgattggactcctgctcatatgtaagtcaagaagcctggacagaagaggaatccagcgagccgccgacattgagcaacaggcggttttcgctgtgtttgatgaaaacaagtcctggtacctggaggataacatcaacaagttttgtgagaatcctgacgaggtaaagagggatgatccaaaattttatgagagtaacattatgtcaacaattaatggttatgttccagagtccataaccaccctgggtttctgtttcgacgatacagtccaatggcatttttgcagcgtgggcacccagaacgaaatcctcacaatacactttacgggccactctttcatctacggtaaacgacacgaggatacgctgacactttttccaatgcgcggcgaatctgtgacggtcacaatggacaacgtaggaacgtggatgctgacctccatgaactcctcaccacggtcaaagaagctgagactcaaatttagggacgtgaagtgcatccccgatgacgacgaggattcatacgagatcttcgaacctccggagagtaccgttatggccacccgaaaaatgcacgaccggctcgaacccgaggacgaggaatcagatgccgactatgattaccagaatagacttgctgcggctctgggaatccgatccttccggaactcaagcctgaatcaggaagaggaggaatttaacctgacagctctcgcactggaaaacggcaccgagttcgtgtctagtaatacagacatcatagtaggtagcaactatagttctccctccaacatttcaaaattcactgtaaacaatttggctgagcctcagaaggctccatctcaccaacaagctacaactgccggttccccattgaggcatcttatagggaaaaacagtgtgctgaatagctccaccgctgaacattccagcccttatagtgaggatcctatcgaagatccactccaacccgacgtgacaggcattcgactgctctctctgggtgctggcgagtttaagagccaggaacacgccaagcacaaaggacccaaggtggagagagatcaggccgcaaaacatcggttctcttggatgaaactgctcgcccacaaggtcggcaggcacctctctcaagatacagggagcccatccggtatgaggccatgggaagatctgccctcacaggacactgggtctccctcccggatgcgcccctggaaagacccaccatctgacttgctcctgttgaaacagtccaattcctccaaaattctggtcggaagatggcacctcgcctccgaaaaagggtcctacgaaatcatccaggatacagacgaagatacagcagtgaacaactggcttatctctccacagaatgccagcagggcttggggggagagtacgcctttggccaacaaaccaggcaagcagtccggtcacccaaaattccctcgagtgcggcataagagcctgcaggtgcgccaggacggcggaaaaagcagactgaagaaatcacagttcctgatcaagactcgaaaaaaaaagaaggaaaagcatacccaccatgcacccctgtcaccccgcacttttcatccactgcgctccgaagcctacaatactttttctgaacgaaggctgaaacatagcctggtgctccacaagtcaaatgagactagcctgcctacggacctcaatcagacactgcccagtatggactttggatggattgccagtttgcctgaccacaatcagaacagcagtaatgacacagggcaagcctcctgtcccccaggcctgtaccaaaccgtcccccctgaagagcactaccagacatttccaatccaggatccagaccagatgcattcaacgagtgacccaagccaccgctcttcatcccccgagttgagcgaaatgctggagtatgataggagtcataagtcattccccactgacatcagtcagatgtctccctccagcgagcacgaggtgtggcagaccgttataagtcccgatctcagtcaggtgacactgagtcccgaactcagccagaccaacttgtctcccgacctcagtcacaccaccctgagcccagaattgatccaacgcaatctttcacccgcactgggtcagatgcctatctctcccgatctgagtcacactacactcagccccgatctgtcccataccactctgagtctggaccttagtcaaactaaccttagcccagagctctcccaaacaaacctgtctcccgcccttggccagatgcccctcagccctgatctgtcccacacaactctgagtctggactttagccagacgaacctcagtcccgagctgagccatatgacgttgtctcctgaactcagtcagacaaacctgtctccagctcttggccagatgccaataagccccgatctgagccacactaccttgtcactggacttttcacagacaaacctgagcccagaactgagccaaacaaacctgtcccccgccttgggccagatgcctctcagcccagatccatcccacacgactctttctctcgacctgtcccagacgaacttgagccccgagctctctcagactaatctgagtccggatctgagtgagatgcccctgtttgcggacttgtctcagatcccgttgacccccgacttggaccagatgacgcttagcccggacctgggagagaccgacctgtcaccaaacttcggacagatgtccctgtcccctgacctcagtcaggtcaccttgagcccagatatctccgacaccacactgctgccagatcttagccagatatctcccccccccgatctggatcagatcttctacccttcagagtcctcccagtccctgcttctgcaggaattcaacgaaagcttcccctatccagacctgggtcagatgccatcccccagcagccctacactgaacgatacgttcctgtcaaaagagtttaacccgctggtgatcgtcggcctgagtaaggacggtaccgactacatcgagatcatccctaaggaggaggttcagtcaagcgaggacgactacgcggaaatcgattacgttccctacgatgacccttacaagacagacgtgcgcaccaacatcaacagctccagggatcctgacaatatcgctgcctggtacctgagaagcaacaacggcaatcggcgcaactactatatcgcagccgaggagatcagctgggactacagcgagttcgtccagcgcgagacggatatcgaggatagcgatgatatcccagaagacaccacctataaaaaggtggtattcagaaagtatctggactcaacgttcactaagagagatcctagaggagaatatgaagaacatctcgggatactcggccccatcatcagagccgaggtagacgacgtgattcaggtacgattcaagaacctggccagccgaccctactctctgcatgcacacggcctttcttacgagaagtcttctgagggcaaaacatacgaggacgattctcccgagtggttcaaagaagacaatgcggtccagcccaacagctcctatacatatgtgtggcacgcaacagagaggagtgggccggagtcccctggctcagcctgtagagcgtgggcatactattcagctgtgaatcccgaaaaggatattcattctggcctcatcgggcccttgctcatctgccagaaggggatcctgcacaaggattccaacatgcccatggacatgcgggagttcgtccttctgttcatgacgtttgatgagaagaagtcttggtattacgaaaagaaatctcgctcttcctggcggctgacgagtagcgagatgaagaagagccatgaatttcacgccatcaatggtatgatctactccctgccggggctgaaaatgtatgagcaggagtgggtgcgactgcacctgctgaacatcggtggaagtcaggacattcacgtggttcactttcacggacagactctccttgaaaacgggaacaaacaacaccaactgggcgtgtggccactgctgcctgggagcttcaaaacgctggagatgaaggccagcaagcccggttggtggcttctgaatactgaagtgggcgaaaaccagagggctgggatgcaaacacctttcttgatcatggacagagactgcaggatgcctatgggtctcagcacggggattatcagtgactctcagattaaagcaagcgagtttttggggtattgggaacctcggttggcccgcctgaataacggaggctcttacaatgcctggtctgtggaaaagctggccgccgagtttgcttcaaaaccttggatacaggtggatatgcagaaagaggtaatcatcacggggatccagacacagggcgctaaacattacctcaagagctgctatactaccgaattttacgtggcgtactcatctaaccaaattaactggcagatatttaagggcaattctacaaggaacgtcatgtatttcaatggaaacagcgatgcctctactatcaaggaaaatcagtttgatccccctatcgtcgcacggtatatcaggatttctccgaccagggcttacaaccgcccaaccctgaggctcgaactgcaaggatgcgaagtcaatggctgtagcactcctctcggcatggagaacggcaaaatcgaaaacaagcaaataacagctagtagcttcaagaagagttggtggggtgattattgggaaccctttcgggcgaggctgaacgcccagggcagggtgaacgcttggcaagccaaggctaataataataaacaatggctcgaaattgatcttctgaaaatcaagaaaattactgccatcatcactcagggttgtaagtccttgagttccgagatgtatgtgaagagctatacgatacactacagcgaacagggggtggaatggaaaccatataggctgaaatcttccatggtggacaagattttcgagggcaacacaaatacgaaaggacatgtgaaaaatttcttcaacccccccattattagcagattcatcagggtgattccaaagacctggaaccagtctatagctctgaggctggagttgttcggttgtgacatctac

SEQ ID NO: 2312 - DNA, 6672 bp, Artificial Sequence
  derived and/or modified sequence
atgtttcccggatgcccacgattatgggtactagtggtccttggaactagctgggttgggtggggctcccagggcaccgaggccgcacaacttagacagttctacgttgccgcccagggcatatcatggagttaccgtccagagcctacgaatagttccttaaatctgagcgtcactagcttcaagaagattgtctaccgagaatacgagccttacttcaagaaggaaaagccacaatcaaccatctctgggttgctgggcccaacactgtacgccgaggtgggagacatcataaaggttcatttcaagaacaaagcggataaaccacttagtatccacccgcagggaatcagatacagcaaattgtccgagggggcctcttacctggaccacacctttcccgccgagaaaatggacgacgccgtcgcgcccggacgggaatacacttacgagtggtccataagcgaggattctgggcccacacatgacgatcctccatgtctcacacacatctactactcccacgagaacctgatcgaagacttcaattcaggcctgattgggcccctacttatttgtaagaaaggcactctcaccgaggggggaactcagaagaccttcgacaaacagattgtcttgctgtttgcagtctttgacgaaagcaaaagctggagccaaagttccagtctgatgtataccgtcaacggctatgtcaacggcacaatgcccgatataactgtgtgtgctcacgatcacatcagctggcatttgctgggcatgtctagcggacccgagctgttttccatccactttaatggtcaggtgctggagcagaaccaccataaggtgtcggctatcacactggtgtctgctacctccacaactgcaaatatgaccgtggggcctgaagggaagtggattatctcatcactcactcccaagcatctgcaggctggaatgcaggcctatattgacatcaaaaattgtccaaagaaaactcggaatctaaaaaaaatcaccagagagcaaaggcgccacatgaagagatgggagtattttatcgcggccgaagaagtgatctgggactacgccccggtcatccctgcgaacatggacaagaagtatcgaagtcagcatttagacaatttctccaaccagattggcaagcactacaaaaaagtaatgtatacgcagtacgaagatgaatcattcaccaagcatactgtgaatccaaacatgaaggaagacggaatcttgggacccatcatacgggcacaagtgcgcgatacccttaaaattgtctttaagaatatggcctccagaccatacagcatttacccccatggggtgacctttagcccatacgaagatgaggtaaactcttcattcacctcaggaagaaataacacaatgatccgcgccgtccaaccaggcgagacctacacttataaatggaacatcttagagtttgatgaacctactgagaacgacgcccagtgtctgacgaggccatattatagcgatgtggacatcatgagggatattgcgagtggattgataggactccttctgatttgtaagtctaggtcccttgatagaagaggcattcagcgagctgccgacattgaacagcaggcggtatttgcagtcttcgacgaaaataaaagctggtatcttgaggataacataaataagttttgtgagaatcccgatgaagtaaagcgcgacgaccccaaattttatgagtcaaatataatgagtactatcaacgggtacgtgccggagtcgataacaaccttgggcttctgtttcgacgacacagtgcagtggcacttctgcagcgtaggaacccaaaacgagattctgaccattcacttcaccggacatagcttcatatacggaaagcggcatgaagacaccctgactctttttcccatgagaggtgagagcgtgaccgtcacaatggacaacgtgggaacatggatgctgacatccatgaacagtagccccagaagtaaaaagctgcgacttaagtttcgcgatgtaaagtgtatacctgacgacgatgaagattcatacgagatcttcgagccccccgagtctaccgtcatggccacaagaaagatgcacgacagactagagcccgaggacgaagagtcagatgccgattacgactaccagaaccgcctggccgctgctctggggattcggtccttcagaaattcttcacttaaccaagaggaggaggagttcaaccttaccgcccttgcattagaaaacggaaccgagtttgtgagcagtaataccgatatcatcgtcgggtccaactactcctctccaagcaacatcagtaagttcactgtaaacaacctcgccgagccgcagaaggccccgagccaccagcaggcaaccaccgccggcagcccgcttcgacatctcataggcaaaaactctgtccttaattcaagtactgcagagcattcttccccttattccgaggaccctatcgaggaccctctgcagcccgatgtcacgggcatcaggctgctctccctcggcgcaggcgaattcaaaagccaagaacacgccaagcataaaggacctaaggtggaaagagaccaggccgcaaaacaccgattctcctggatgaagctcctggcccacaaagttggtcgtcacctgtctcaggatacgggaagccccagtgggatgcggccatgggaagacctccccagccaggacacagggagtcctagtcgcatgcggccatggaaggatcccccctctgacctcttgctgcttaaacagtctaatagttcgaaaatcctggtaggtcgatggcatttggcctcggagaaaggaagctatgagatcatccaagatacagatgaagacacagctgttaataactggctcatcagtccccagaatgcttccagagcctggggcgagtcaaccccactggccaacaaacctggtaagcagagcgggcatcccaagtttcccagggtgcgtcataagtctctccaggttcgccaggatggtggcaagagcaggctgaagaagtcccagtttcttatcaagaccaggaaaaaaaagaaggagaagcacacccatcacgcccccctgtctcctagaacattccatcctctccgtagcgaagcttacaacacgttttctgagcggcgcctgaaacacagtttggtcctccacaaatccaatgagaccagtttgccaaccgatttgaatcaaaccctgccctccatggatttcggctggatagctagtctgccggaccacaatcagaatagttcaaacgacacgggccaggcatcttgcccccccggtctgtaccagactgtgcctcccgaagagcattaccaaacctttcctatccaggatcccgatcagatgcactcgaccagcgaccccagccacaggtcctccagtccagaactcagtgagatgctggagtatgaccggagtcacaagagctttcccacagatatttcgcagatgtccccttcttccgaacacgaggtctggcagacggtcatttcacctgatttgagccaggtgaccttgagtccagaactctcccaaaccaacttatccccagacctctcacatacaaccctgtcaccggagcttattcagcggaatttgtcccccgctctgggccagatgcctatttcacctgacctgagccacacgaccctgtccccagacctgtcccacacaacccttagcctggacttgtcacaaacaaacttatctccagagctcagtcagactaatctatccccagccctcggacaaatgccattgagccctgacctctcacacactaccctgtctctggacttctcccagacgaacttatccccggaattgtcgcacatgacattgtcaccagagctgtcgcagacgaacttgagtcccgccctaggacaaatgcccatatcccccgatctgagccataccactttatctctggacttctctcagactaacctgagccccgagctctcacaaacgaacctgagcccagcgctggggcagatgcctcttagcccggaccctagccacaccacactttccctggatctttcacagactaatttgtcgccggagctgtcacagactaacctctcccctgacctgtctgagatgccactgtttgcagacctttctcagatccctctgacccccgatttggaccaaatgactctgtctcccgaccttggtgagaccgacttgtctccaaatttcggccagatgagcctatctcctgatctgtcccaggtcaccctgtccccagacataagcgacacaaccctgttgccagatctgtcccaaataagccccccgccagatctggaccagatcttttatccaagtgagtcttctcagagcctactgcttcaggaattcaacgagagctttccctacccggatcttggccagatgccttcccccagttctccgacattgaacgacaccttcctgagcaaggaattcaacccccttgtgatcgtagggttgtccaaggatggcacagattatatcgagattattcccaaggaggaagtccaatcttccgaagatgactacgccgagattgattacgtcccatatgacgatccatacaagaccgacgtacggactaacattaattcctcacgggatcctgacaatattgctgcctggtatctgcgctctaataacggcaatcgcaggaattattacatcgctgccgaagagatcagctgggattatagtgaatttgtgcaaagggagacagatattgaggactccgacgacattcccgaagacacaacctacaaaaaagtagtatttcgcaaatatctggactccacttttacaaaacgggatcccagaggcgagtacgaagagcacttgggcatcctcggccccatcattcgggcagaagtcgacgacgtaatccaggttcggtttaagaacctggcctccaggccgtactccctgcatgcccacgggctgtcctatgagaagtcgtctgaagggaagacctacgaggacgattcaccagaatggtttaaggaagacaacgccgtccaaccaaacagctcttacacgtatgtgtggcatgccacagagaggagtggtcccgaatcacctggctctgcttgccgtgcctgggcttactacagtgctgtcaatcctgaaaaagacattcacagcggtctgattggtccgctgctcatatgccagaaggggatcctgcacaaggattctaacatgcctatggatatgcgcgaatttgtactcctctttatgacctttgatgagaaaaagtcttggtactacgagaaaaagtccaggagttcttggcgtctgacaagcagtgagatgaagaagtcccatgagttccatgctattaacggtatgatttattcccttcccggcctgaaaatgtacgagcaggaatgggtgcggttacatcttcttaacatcggtggttcccaggatattcacgttgttcactttcacggccagactttgctagagaatggcaacaaacagcatcagctgggtgtatggcccttgttacccggctcattcaaaacattagaaatgaaagccagcaaacctggctggtggctgttaaataccgaggttggcgaaaatcagagagctggcatgcagacaccttttctgataatggatcgtgattgtagaatgccgatgggcttgtccaccggaataattagtgactctcagattaaagccagcgagttcttggggtattgggaacctcggctcgcccgtttgaacaatgggggctcttacaatgcatggagcgtggagaaacttgccgctgaattcgcctccaagccttggattcaggtggatatgcagaaggaggtgattattacgggtatccagacccagggcgctaagcactacctaaaaagttgttatactactgagttttacgtcgcctactctagcaatcagatcaattggcagattttcaaagggaactctacgcgcaatgtgatgtattttaatggtaacagcgacgcttccaccattaaagaaaaccagtttgatccccctattgtcgcccgctacataagaataagccctacgcgtgcgtataaccgccccaccctgcgcctggaattacaggggtgtgaagttaatggatgttctacacccttgggcatggagaatggaaagatcgaaaacaagcagattaccgccagtagtttcaaaaagagctggtggggcgactactgggagcccttccgcgccaggcttaacgcccagggccgggtgaatgcttggcaggcaaaagcaaataacaacaagcagtggctggagatcgatctgctgaaaattaagaaaatcaccgcgattattactcagggatgcaagtctttgtcaagtgagatgtacgttaaatcttacaccatccattactccgaacagggtgttgagtggaagccctataggttaaagagctctatggtggacaaaatctttgagggaaacaccaatacaaaggggcacgtcaagaacttctttaatcctcctattatcagtcggtttatccgggttatcccaaaaacctggaaccagtctatcgccctaagactggagttattcgggtgtgacatctac

SEQ ID NO: 2313 - DNA, 6672 bp, Artificial Sequence
  derived and/or modified sequence
atgtttccgggttgtccaagactttgggttctggtggtcctgggcacctcatgggttggttggggttcacagggaaccgaagcggcccagctccgacagttttacgtggcagcccaaggtatttcctggagctaccgtccagaaccaaccaatagctctttgaacttgagcgtgaccagcttcaagaagattgtctaccgtgaatacgaaccctattttaaaaaagagaagccgcagagcaccatttccggactgctcggtcccacgctctacgcagaggtgggcgacatcataaaagtccacttcaagaacaaagccgacaaacccttgagcattcatccacaaggaatccgctacagcaagctaagcgagggggccagctatctggaccatacgttcccggccgaaaaaatggacgacgctgtggctccaggccgcgaatacacctacgagtggtctatctcagaagattctggtcctacccacgatgacccgccatgcctgactcacatatattatagccatgagaatctgatcgaggatttcaacagcggtctgatcggcccgctgctgatctgcaaaaaaggtacactgacagagggcggcacccagaagacgtttgacaaacagatcgtcctgctgttcgccgtcttcgatgagtctaagagctggtcccagagcagctccctgatgtataccgtgaatggatacgtcaacggaacaatgcccgatatcacggtctgcgctcacgaccacatcagctggcacctcctcgggatgagcagcggccccgaacttttctctatccattttaatggccaggtcctagagcagaatcaccacaaagtgtcagccatcacgctggtgtctgccacttctactactgccaacatgacggtgggtcctgagggtaagtggattatcagctcgctgacgccgaaacatctgcaggcgggaatgcaggcgtacatagacattaagaattgtccaaaaaagacgcgaaatttgaaaaaaattaccagggagcagcgcagacacatgaaacgctgggaatacttcattgcagctgaggaggtgatatgggattatgcccctgtcatccctgctaatatggataagaagtatcggtcccagcacctggataatttctcaaatcagatcggtaaacactacaaaaaggtcatgtatacgcagtatgaagacgaatcctttaccaagcatactgtcaatccgaatatgaaagaggatgggatcctgggtccaatcatccgagcccaggtccgcgacacgttgaagatcgtctttaagaacatggctagccgcccatatagcatctacccgcacggcgtgacattctccccgtacgaggacgaggttaacagctcgttcacttcaggtcgcaataataccatgatcagagcggtgcagccgggcgaaacctacacgtataaatggaacattttggaatttgacgaaccgacagagaacgacgctcagtgtctgacccgcccgtactacagcgatgtcgatatcatgcgcgacatcgctagcggcctcatcggtctgctgcttatctgcaaaagccgcagtctagatcgccgaggcatccaacgggcggctgatatcgagcagcaggcagtgtttgccgttttcgacgaaaacaaatcttggtacctcgaggataacattaacaaattttgcgagaatccggatgaggtcaaaagggatgatccgaagttctatgaaagtaacataatgagcactatcaatggatatgttcctgaaagcattaccacactcgggttctgtttcgacgataccgttcaatggcacttttgcagcgttggtacgcagaatgaaatcctgaccatccactttacgggacacagctttatctacggtaaacggcatgaggatactttgactttgttcccgatgcgtggagagtctgtgactgtaaccatggataacgtcgggacctggatgctgacctcgatgaattcctctccgcgcagcaagaaactgagattgaagttccgcgacgtgaaatgcatcccggacgacgatgaggattcttatgagattttcgagccgccggagagcactgtgatggccacccgtaagatgcatgatcgcctggagccggaggacgaggaatcagatgcggactacgattaccaaaatcggctggctgcggccctgggcatccgcagctttcgcaacagctcgctgaatcaagaggaagaggagttcaacctgaccgcgttggcattggaaaatggcaccgaattcgtttctagcaacacggatatcattgtaggctccaactacagctctccatccaatatcagcaagttcaccgtaaataatctggcggaaccacaaaaggcgccatcccatcagcaggcgaccaccgccggctcgccactgcgacacttgattggcaaaaacagcgtgctgaacagcagcacggccgagcactcttcgccctacagtgaggatcctatcgaagaccctttgcaaccggatgtcaccggcatccgtctgctgagcctgggtgcaggcgagtttaaatcgcaggaacatgcaaaacataaaggtccgaaagtggaacgggatcaggccgccaaacaccgattctcttggatgaaactgctggcccataaggtcggccgccacctctctcaggacacgggctcgccgtccggcatgcgcccttgggaggatttgccttctcaggacaccgggtcacctagccgcatgcgaccgtggaaagaccctccgagcgatctgctactgttgaaacagagcaacagctctaaaatcctggtgggtcgctggcacttggcgagcgagaagggcagctatgaaatcattcaggacacggatgaagacactgctgtcaacaactggctgattagcccgcagaatgcttcaagggcatggggcgagtctacccctctggccaacaaaccaggtaaacaatccgggcatcctaagtttccacgggtgaggcacaagtccctgcaggtgcgccaggacggaggcaagtcccgcttaaaaaagagtcagtttttgatcaagacaagaaagaagaagaaggagaaacatacgcaccatgcacctctgagccctaggactttccacccattgcgcagcgaggcctacaataccttcagcgagcgccgtttgaagcactctctggtactgcataaatcaaacgaaactagcctgccgacggatctgaatcaaacgttgccaagcatggattttgggtggatagcgagtctgcccgatcacaaccagaacagctccaacgacacaggccaggcgtcctgtccgccgggtctgtaccagaccgttccgcccgaggaacactaccagaccttccctatccaagatccggaccagatgcactcgacaagcgacccaagccacaggtctagcagcccagagttgtccgaaatgttagagtatgatcgctcgcacaagagcttcccgaccgacatctctcagatgtctcctagttcagaacatgaggtatggcagactgtgatcagcccagacctctcccaagtgacgctgagtcccgaactgtcccagacaaatctgtccccagacttatcccacaccaccctgagtccggaattaattcaacgcaacctttcgccagcgctgggccagatgccgatcagcccggatctttcccacacaaccctttcgccagatctcagccacacaactctgagtctggatctcagccagacgaatctgagcccagagctctcacagaccaacttgagtccggctttgggtcagatgccactcagccctgatctttctcacaccactctgagcctggattttagtcagacgaatctgagcccagagctttcacatatgacactgagtcctgagctttcacagactaacctgagccccgccctgggacagatgccaatcagtcctgacctgagccacaccaccctgagcctggatttctcgcagactaacctgtcccctgagcttagccagactaatctgtcccctgccttggggcagatgcctctgtccccagacccaagccacaccaccctgagcctggatttgtcccagaccaatttaagccctgaactgagccagaccaacttgtcgccggacttgagtgagatgccgctgttcgctgatctgagccagattccgttgacccctgacttggatcagatgaccttgtccccagatctgggtgagaccgatctgagccctaattttggtcagatgtccctgagcccagatctgtctcaggtgaccttgtccccagacattagtgacaccaccctcctgccggatctgagccagattagtcctcctcctgacctagatcagattttctatccgtccgagagcagtcaaagcctgctgctgcaggaattcaacgagtctttcccatatcctgacttaggtcaaatgcctagcccctccagccctacccttaacgatacctttctgagcaaagaatttaatccgctggtcatcgttgggctgagcaaggatggcaccgattacattgaaatcattcctaaagaagaggttcagagctcagaggacgactacgcagagatcgactacgtcccttacgatgatccgtacaagaccgatgttcgcaccaacatcaatagctcccgagaccctgacaatattgcggcctggtatttgcgcagcaataacgggaatcgcagaaactattatatcgccgctgaagagattagttgggactactcggagttcgtgcagcgtgaaaccgacatcgaagactccgacgacattcccgaggacaccacttacaagaaagtggtctttcgaaaatacctggattctactttcacaaagcgagatccacgaggcgagtatgaagaacacctgggcatcctgggccctatcatccgcgcggaggtggacgacgtgattcaggttcggtttaaaaatctagctagccgaccgtatagcctgcacgctcatggtctgtcatatgagaagtcttctgagggtaagacctacgaggacgacagcccggaatggttcaaggaggataatgccgtacagccgaactctagctatacctacgtctggcacgctaccgaacgcagcggcccggagtctcccgggagtgcatgccgtgcgtgggcctactactctgcggttaaccccgaaaaggacatccattctggcttgattggcccactgctgatctgtcagaagggtattcttcacaaagatagcaatatgcctatggacatgcgcgagtttgttctgttgtttatgacgttcgatgaaaaaaagagctggtactatgaaaagaaatcccgcagctcctggcgattaacttccagcgagatgaaaaaatcccacgagttccacgctattaatgggatgatttattcattaccagggctgaagatgtatgagcaagagtgggttcgcctgcatcttctgaacatcgggggctctcaggatattcatgtggtacacttccacggtcagaccctgttggagaacgggaacaaacagcatcagctgggtgtatggccgctgctgcctggtagcttcaagaccttggagatgaaggcctcgaaaccaggttggtggctgttgaacactgaagtcggcgagaaccagcgtgccggtatgcagacccccttcctgatcatggacagagactgccgcatgccgatgggtctgtccacgggtatcatcagcgacagccaaattaaggccagcgagtttctggggtattgggagccccgcttggcgcgcctgaataatggtggcagctataacgcgtggagcgtggaaaaactcgccgccgaattcgcctctaaaccgtggatccaggtggatatgcagaaagaggttattatcacgggtattcaaactcagggtgccaagcattatcttaaaagctgctacaccactgaattctacgtggcatacagcagcaatcagatcaactggcagatttttaaaggtaactccaccagaaacgtgatgtactttaacggaaactccgatgcgagcaccatcaaagaaaatcagttcgatccccccattgtggcccgctatattcgcatcagcccgaccagggcatacaaccgtccaacgctccgtctggagctgcaggggtgtgaggttaatgggtgctccactccactcggtatggagaacggaaagattgagaacaaacagatcacggcgtcctccttcaagaagagctggtggggcgattattgggagccgtttcgagcgcgcctgaacgctcagggtcgggtgaatgcctggcaagctaaagcgaacaataataaacaatggctggagattgacctgctgaagattaagaagatcacggctataatcacccagggctgcaaaagcctgagctccgagatgtacgtcaaaagctataccatccattacagcgaacaaggcgtcgagtggaaaccatatcggttaaagagcagtatggtggacaagatcttcgaaggtaacaccaacactaaaggccatgtgaaaaacttttttaatcccccaatcatttctagatttatcagagttatcccaaaaacctggaatcagtctatcgctctgcgcctagagctgttcggctgtgatatctac

SEQ ID NO: 2314 - DNA, 6672 bp, Artificial Sequence
  derived and/or modified sequence
atgttcccaggatgtccaagattatgggtcctggttgtgctggggactagttgggtcggctggggctcacagggcaccgaggcagcccagttgaggcaattctacgttgctgcccagggaattagttggtcctaccgccccgagccaacaaactccagcttgaacctatccgtaacatccttcaagaaaatcgtgtaccgcgagtacgagccatacttcaaaaaagaaaagccgcaatctacgatttctggactcctggggcctacgctgtacgctgaagtgggagatattataaaggtgcacttcaagaacaaagcagacaagccattgagcatccatccacaaggtatccggtactccaagctgtcagagggagcttcttatttggatcacactttccctgcagagaaaatggacgatgcagtggcacctggtcgcgaatatacatatgaatggtccatctcagaagattccggtcctacccatgatgaccccccgtgtctcacacacatctactacagccatgagaacctgatcgaggacttcaatagcggtctcatcggaccgctgcttatttgtaaaaaaggaacactcacggaaggaggcacccagaagactttcgacaaacagattgtgctgctctttgccgtcttcgacgagagcaaatcgtggtctcagtctagttccctgatgtacactgtaaacggctatgtgaatggaaccatgccagacataacagtttgtgctcatgaccacatcagttggcacttgttggggatgtccagcggccccgagctgttttccatccacttcaatggccaggtcttggaacagaatcatcacaaggtgagcgcaatcaccctagtgagtgcaacaagtactacggcgaacatgacagtgggcccagaaggtaaatggatcatctcttcccttacgccgaagcatctgcaagctggcatgcaagcctatatcgacataaagaattgccccaagaagacacgaaacctgaagaaaattacaagagaacagcggcgacacatgaagaggtgggaatacttcattgctgccgaagaagtgatctgggactacgcacctgtcataccggcaaacatggacaaaaagtaccggtctcagcaccttgataatttttcaaatcagattggcaagcattacaaaaaggtcatgtacacccagtacgaggatgaatcctttacaaagcacacggttaacccaaatatgaaggaggatgggatattggggcccatcatccgagcccaggtgcgggacaccctaaagattgtattcaagaatatggctagcagaccgtactccatatacccacacggtgtgaccttcagtccatacgaggatgaagtgaattcgtctttcacgtctggacggaacaataccatgatccgcgccgtccagcccggcgagacctacacctacaaatggaacatcctggaattcgatgagcccaccgaaaacgatgcccagtgcctgacacgcccatattattctgatgtcgacatcatgcgcgatattgcctccggcctgatcggactgctcctcatttgtaaatcaaggtcactggacagacgtggcatccagagagccgccgacatcgaacagcaggcggttttcgccgtcttcgacgaaaacaagtcttggtacctggaggataacattaataaattctgcgagaaccccgacgaagtcaaacgggatgaccccaaattctatgagtcaaatattatgagcaccattaatgggtacgtcccagaatccattacaacgctcggtttctgcttcgatgacacagttcagtggcatttctgtagcgtcggaactcaaaacgagattctcactatccacttcacagggcacagcttcatttacggaaagaggcacgaagacacattgacactgtttccaatgcgcggcgagtctgtcaccgtcacaatggataacgtcggaacatggatgctcacctccatgaactcaagccccagaagcaagaagctccggctcaaattccgggacgtgaagtgcatcccagacgatgacgaggattcttatgaaatcttcgagcctcccgagagcactgtgatggctacccgcaaaatgcacgacaggctcgaacccgaagatgaggagtctgacgcggattacgactaccagaaccgactcgctgctgcgctgggcattagatcatttaggaacagtagcctgaaccaggaagaggaggagtttaatctgaccgcactggctctcgaaaatggaactgagtttgtatcatctaatacggacattattgttggcagtaattacagcagcccttccaacatctccaagttcactgtcaacaatcttgccgagccacagaaggctcctagccatcaacaggctacaaccgccggaagtccacttcgccacctcattggaaaaaacagcgtcctaaactcatcaactgcagagcatagtagcccctattcagaggaccccatagaggatcctcttcagccagatgtcactgggatcaggttgctgtcactcggagcaggggaatttaagtcgcaagaacatgccaaacacaaaggtccaaaagtggaaagggaccaggccgctaagcatcggttttcgtggatgaagctcctggcacataaagtgggaaggcacctgagccaagatacaggctcaccctctggaatgcgcccttgggaggatctcccaagccaagatactggatccccttctcgcatgcgtccatggaaggacccaccctctgaccttctgcttcttaaacagtcaaatagtagtaaaatcctggtaggccgatggcatctcgcctcagaaaaggggagctacgagattatccaagacactgacgaggataccgcagttaataactggcttatctccccccaaaacgcctctcgggcctggggcgaatcaaccccactagcaaacaagcccggtaagcagtccggtcaccccaagtttccaagggtgagacacaaatcactgcaggtcaggcaagatgggggtaagagccgattgaagaaatctcagttcctgattaagacgagaaagaaaaaaaaagaaaaacacacgcatcatgcacctctgtccccacgaaccttccatccactcaggtcagaggcttacaacaccttttccgagagacgcctgaaacatagtctggtgctgcacaaatccaacgaaacctccttgcctacggatcttaaccagacactgccctccatggatttcgggtggattgcttccctgcccgaccataatcagaattcctccaatgatactgggcaggctagttgcccccccggcctgtaccagacagtgccccccgaagaacactaccagacctttcccattcaggatcccgaccagatgcactccactagcgacccttcccaccggtcatcttctcccgaactctcagagatgctagagtacgatcggtctcacaaaagctttccaactgacatatctcagatgtcaccaagcagcgaacatgaggtatggcagaccgtgatcagtcccgacctgagccaagtgacactatcgccggagctgtctcaaaccaacctgagccccgatctaagccacaccaccctcagccctgaactcatacagaggaatttaagtcctgcgctgggccagatgcccatctccccagatctgtcgcatacaaccctttcgcccgacttaagccataccacactgagcctggacctctcacaaactaacctttctcctgagctgtcccagaccaaccttagtccggccctgggacagatgccactctcacccgatctgagtcacaccactctgagtctggattttagccaaacgaatttatcaccggagctgagccacatgaccttaagcccagagttatcacagacaaacctttcgccagctctggggcagatgccaatcagtcctgacctatcacacaccacgctcagtctggacttttcccaaactaacctctcaccagaactgagtcaaacaaatctgtcgcctgccttgggtcagatgcctttgtcacctgaccccagtcacacgacactttcgttggatctatcgcagacgaatctgagtcctgagctctctcaaaccaatttatcacccgacctgtccgaaatgccgctgttcgccgatctgagtcagatccctctgacacctgatctggatcaaatgacgctgtcccccgacctaggggaaactgatctgtctcccaatttcgggcagatgtctctgtcccccgacctgagccaagtgactttgtcgcctgacatctcagacaccaccctcctccctgatctgagtcagattagccccccccccgatctggaccagatcttctatccatccgagagcagtcagtcgctgctccttcaagagtttaacgagagcttcccctatcccgatctagggcagatgcccagccccagctcacccaccctcaatgatacgttcctctcaaaggagtttaaccctttggtcattgtaggccttagcaaggatggaaccgactatatcgagatcatccctaaagaagaagtacagagcagcgaggatgactatgctgaaattgattatgtgccgtatgacgacccctataaaaccgatgtgcgcactaatattaatagcagccgggaccctgataacattgccgcatggtacttacgcagcaataacggcaaccggcggaattattacattgctgccgaagaaatctcttgggactactccgaatttgtacagagggaaacagacatcgaggatagcgatgacatcccggaggatacaacctacaaaaaagtcgtctttcggaagtatctggactcaacgtttaccaaaagagatcctcgtggagagtacgaggagcatctcggcatcctgggccctattatacgggctgaagtggatgatgtcatccaagtgaggttcaagaacctagcctcccggccctattccctgcatgctcacggtcttagctatgaaaagtccagcgaggggaagacatatgaagacgatagtccggagtggttcaaagaagacaatgcagtgcagcctaacagttcttacacctacgtgtggcacgctacagaacggtccgggcccgagagccctggctccgcttgccgcgcatgggcctactactccgcagtgaaccccgaaaaagatatccactcaggactgataggccccctactgatctgtcagaaaggtatcctacacaaggattcgaacatgcccatggacatgcgagaattcgttcttttattcatgacttttgacgaaaagaagtcatggtactatgagaaaaagagcaggagctcctggcgactgacctcttctgaaatgaaaaagagccacgagtttcacgcaatcaacggcatgatctattccctccctggactgaaaatgtacgaacaggagtgggtgcggttacacttgttgaatattggcggtagccaggatattcatgtggtgcacttccacggacaaaccctcctagagaacggcaataagcagcatcagctgggggtgtggccactgctgcccggtagtttcaagactctcgagatgaaagcatcaaagcccggctggtggctgctcaacaccgaagtgggtgagaaccaacgcgcaggtatgcagaccccttttttaatcatggaccgggattgtcgtatgcctatgggcttatccaccggcatcatttccgactcacagattaaggcgagcgagtttctgggttactgggagcctcggctggcacgcctcaataatggcgggtcctacaatgcttggtccgtcgagaagctggcggctgaatttgctagcaaaccctggattcaggttgacatgcagaaggaagtcatcataactggaattcaaacccaaggtgctaaacactatctgaaatcgtgttataccacagaattctacgttgcttactctagtaaccagatcaactggcaaatctttaaaggaaatagcacccgtaacgtgatgtattttaacggcaacagtgacgcctcgaccatcaaggaaaatcaattcgatccacccattgtggccaggtacatccgcatctcccccacccgtgcttataaccgaccaactctccgacttgagctccaggggtgtgaagtgaacggctgtagtactcccctggggatggagaatggaaagattgaaaacaaacaaatcaccgccagcagtttcaagaagagctggtggggcgattattgggagccctttcgagccaggcttaacgcccaaggcagagtcaacgcttggcaagctaaggctaataataacaaacaatggctggagatagatttgttaaagatcaagaagattacagccatcatcacccaggggtgcaagagcctctcttcagagatgtatgtcaagagttacaccatccactattctgaacagggggttgaatggaagccctatagactcaaaagcagtatggtggataaaatattcgaggggaacaccaacaccaagggccacgtgaaaaacttctttaatccccccattatcagtagatttatccgtgttatcccaaagacctggaaccagagcattgccctgcgactggagctatttgggtgtgatatctat

SEQ ID NO: 2315 - DNA, 6672 bp, Artificial Sequence
  derived and/or modified sequence
atgttccctggatgtcctaggctctgggtgcttgtagtgcttggcactagctgggtcggctggggctcgcaggggaccgaagcggcccagctccgccagttctatgtagctgcacagggcatatcatggtcttatagaccagaaccaaccaactcctctcttaacctttctgttactagcttcaaaaagatagtgtatcgcgaatatgagccttattttaagaaagaaaagccccagtctaccatcagtggcctgcttggaccaaccctgtacgcagaggtcggcgacatcattaaggttcacttcaaaaataaagctgacaaaccactgagcattcaccctcagggcattcgctattcgaagctgtccgaaggtgccagttacctcgaccacactttccccgcagagaaaatggacgatgctgtggcccctggtagagagtatacctatgaatggtctatcagcgaagacagcgggcctacgcacgacgatccgccctgtcttacccacatatactattctcacgaaaaccttattgaggactttaactccggcctgatcgggcctctgctaatctgtaaaaaaggcaccctgacggagggaggtactcaaaaaacctttgacaagcaaatagtgctactgtttgcggtgtttgatgaatcaaaatcgtggagccagtcgtctagtctaatgtacacagtaaatggctacgtgaatggcacgatgccagacattaccgtgtgcgcacacgatcacatcagttggcatttgctggggatgtccagtggccctgagctgttttccatccactttaacgggcaggtgctcgaacagaaccaccacaaagtgagcgccattacactggtctcagcgactagcaccaccgcaaatatgaccgtcggtccagaaggcaaatggattatttcctctctaactccaaagcacctccaagccggcatgcaagcatacatcgacatcaagaattgtccaaagaagacgcggaacctgaagaagatcactagggaacagcggcggcatatgaaaagatgggagtatttcatcgctgcagaagaagtcatctgggattatgcgcccgtgatacctgcaaacatggataaaaagtacaggagccaacacctggacaacttctcaaatcagataggcaagcattataaaaaggtgatgtacacgcaatacgaagacgagtcattcacaaaacatacagtgaatcccaatatgaaggaagatggtatactgggtccaatcatccgggctcaagtaagagatacattgaagattgtgtttaaaaatatggccagtagaccgtatagcatttaccctcatggggtcacatttagtccttacgaagatgaggtcaattcctcttttaccagcggacgtaacaatactatgatccgagccgtgcaacctggcgagacttacacatataagtggaacattctggaattcgatgaacccacagaaaacgatgcccaatgtcttacccgcccgtattattctgacgtggatatcatgcgggacatagcatcagggctgatcggcctcctgctgatctgtaagtccagaagtctggaccgaagaggaattcagagggccgccgacatcgagcagcaagcagttttcgccgtgtttgatgagaacaaaagttggtatcttgaggacaacattaacaaattttgtgaaaaccccgacgaggtcaagcgtgacgacccgaagttctatgagtcaaacattatgtcgaccatcaatggctatgtacccgaatcgatcacgacactcggtttctgcttcgatgacacagtgcagtggcatttctgctctgtcggcactcagaatgaaatactcaccatccattttaccgggcactcattcatctatggaaaacgccatgaggatactctgaccttgttcccgatgcgcggtgagagcgtcactgtaacgatggataacgtggggacttggatgcttacctctatgaattcgtcaccgagatcgaagaaactgaggcttaaattccgagacgtgaaatgtataccagacgacgacgaggatagttatgaaatttttgaaccccccgagtcgacagtgatggccacccgaaagatgcatgacaggcttgagcccgaggacgaggagtctgacgccgactatgactatcagaatcggctagccgcagccctcgggatccggtcattccgcaatagcagtcttaatcaggaagaggaagaatttaaccttacagcactggcgctcgaaaatggcactgaattcgtgtcttcaaataccgatattattgtgggatcgaactacagctccccatctaacatctccaagtttacagtgaataacctggcagagccccagaaggctccgtcgcaccagcaggctactactgcaggcagcccgcttcgccacctcattggtaagaacagcgtgttgaactcttcgactgccgaacacagcagcccctacagcgaagaccccattgaggatccccttcagcctgatgttacaggcatccgcctactcagcttgggggcaggagagtttaagtcacaggaacacgcaaagcacaaaggacctaaggtggagagggaccaggccgctaagcatcgattctcctggatgaagctcttggcccacaaggtggggcgacacctgtcccaggacacaggatctccttctggaatgcggccatgggaagaccttccctcacaggacacgggcagtccatcccgtatgagaccttggaaagatccgcctagtgaccttctgctccttaaacagagtaactcttcaaagattctggtgggaagatggcacttagcgagcgaaaaagggagttatgagattatccaggacacagatgaggataccgcggttaacaactggctgattagcccacagaacgccagccgcgcctggggcgagtccacacccttagcaaacaagccaggcaagcagtccggccaccccaaattcccaagggtgagacacaagagcctccaggtgagacaggatggggggaagtctcgactcaaaaaatcccaattcctgataaagaccaggaagaaaaagaaagagaaacatacccatcacgcccccttgtcgcctcgcaccttccatcctcttagatccgaggcatacaacacattttcggaacgaagactcaagcattctctggtgctgcataagtccaatgagacctcgctgcccaccgacctaaatcagacattgccaagcatggatttcggctggatcgccagcctaccagaccacaatcagaattcctcaaacgacactggccaggcttcctgcccccccggcctgtaccagactgtgcctcccgaagagcactatcaaactttcccaatccaagaccctgaccagatgcacagcacaagtgacccatctcatcgaagtagctctcccgaactgagtgagatgctcgagtacgacaggagccacaagagctttccaactgacatcagtcagatgagtccctctagcgagcacgaggtgtggcaaaccgtaatttctcctgatctgtcacaggttaccctctcccccgagctctcacagacgaacctgtctcccgatctttcacatacaacactcagccctgaactcattcagcggaatctaagtccagctcttggtcagatgcccatctctcccgatttgagccatacaacactgtctcctgatctgtcccacactacgctttcactcgacctatcccaaactaacttgtcacctgaactcagccagaccaatctgtctcctgcactgggacagatgcccctcagccctgatttgagtcatactactctcagcctagatttctcccagacgaaccttagccctgagctgtcacatatgacactgtctcccgaactgtctcagacaaacctttcaccagctttgggacagatgcctattagccccgacctctcacataccactctgtcacttgatttcagccaaactaacctgagccctgaacttagccagaccaacctgtcacccgcgcttggccagatgccattgtcacctgatcccagtcacactactctctcactggacttgagccagacaaacctaagccctgagcttagccagaccaatctctccccagatctatcagaaatgcccttatttgctgatctgtcacagatcccactaacaccagatctcgaccagatgactctgtcacccgatttgggggaaacagacctctctcctaattttggacaaatgtccttgagtccagacctctcccaggtgactttatcgccggatataagcgatactactctactccctgacctcagccagatatcccctcccccagacttggaccagatattttaccccagcgaaagtagtcagtcactgttgctccaggaattcaatgagagctttccctaccccgacctgggccagatgccctcaccctcttcccccacgctgaacgataccttcctgtcaaaggaatttaacccacttgtaatcgtgggtctctccaaagatgggacagattacatcgagattatccctaaagaagaagtccagtcttccgaggacgactatgcagaaatagactatgtgccctacgatgatccatacaaaacggacgtgcggacaaacattaactcctcccgggacccagataatatagcagcatggtaccttcgctctaacaatggaaacaggcggaactactatatcgccgccgaagagatctcatgggattattccgagttcgtccagagagagacagatatcgaggactcagatgacattcccgaggacacaacttacaagaaggtggtttttcggaagtacctggactccacttttaccaagcgagacccaagaggcgaatacgaggagcacctgggcatcttggggcctattatcagggctgaagtggatgatgttatacaagtacgttttaaaaacctcgcttccagaccttactcgctacatgcccatgggctgagctacgaaaaatccagcgaaggcaagacctacgaggacgatagcccggaatggttcaaagaggacaacgcagtccagcccaattcgtcctatacgtatgtttggcatgccacagagaggtctggtcctgaatcccccgggtcagcttgccgagcctgggcttattacagcgccgttaaccctgagaaggacatccattctggactgataggccccttgctgatttgccagaaaggcatcttacataaagactcaaacatgccaatggatatgcgcgaattcgtgctgttgttcatgacattcgatgagaagaagagttggtactacgaaaagaaatcccggagcagctggcgcttaacaagttcggaaatgaagaaaagtcacgaatttcacgcaatcaacgggatgatttattcactgcctggtttgaaaatgtatgagcaagaatgggtgagactgcacctcctgaatatcggagggtctcaggatattcatgtggtgcactttcacggccagacattgttggagaatggaaataaacaacaccagttaggcgtctggccgctgctgcccggttccttcaagacactggaaatgaaagcgtcgaaacctggatggtggcttctgaacactgaggtgggggaaaatcaaagagcaggcatgcagacccccttccttatcatggatcgagattgccgcatgcccatgggcttatcaaccggcatcataagtgacagtcaaataaaggcatccgagtttttgggttattgggaaccacgactggcacgcctgaataacgggggaagctataacgcctggtccgtggagaaattggcagccgagttcgcttccaagccctggattcaggtggatatgcaaaaagaagtgatcattaccgggatccagacacaaggggcaaagcattatcttaaatcatgctatacaacggagttctatgttgcttactccagcaatcagataaactggcagattttcaaagggaactctacaagaaacgtgatgtactttaatggcaactccgatgcatctaccattaaagagaaccagttcgatcctcctatcgtcgctcggtacattaggatctcccccacgagagcctataacaggccaacactcaggcttgagctgcaaggatgtgaagtgaacgggtgtagtactccacttggcatggaaaatggaaagattgaaaataagcaaatcactgcctcctcctttaagaagagttggtggggagattattgggagcccttccgggccaggctcaacgctcagggccgagtaaacgcgtggcaggccaaggccaacaacaataaacagtggttggagatcgacctcctcaaaattaaaaagattacggccatcataactcagggctgtaaatcactgagttcagagatgtacgtgaagtcgtatacaatacactattccgaacaaggagtggagtggaaaccatatcgcctgaagagctccatggtcgacaaaatcttcgaaggtaataccaacacgaaaggacacgtgaaaaatttttttaatcctccaattattagccggtttattcgcgtcatacccaagacgtggaatcagagtattgctttgagattagagctcttcggctgcgacatctac

SEQ ID NO: 2316 - DNA, 6672 bp, Artificial Sequence
  derived and/or modified sequence
atgtttccaggctgcccgcgcctatgggttctcgttgtacttgggacaagctgggtgggctggggtagtcaagggacagaagccgcccagctaaggcaattctacgttgccgcccagggcatcagttggtcttatcggcctgagcccacaaattctagtctgaacctgtccgttacctctttcaagaaaattgtatatagggagtacgagccgtatttcaaaaaagaaaagccccagtccactatcagtgggctgctagggccaactctatatgctgaagtgggagacattatcaaggtgcatttcaagaataaggccgacaagccactttctatccaccctcaaggcatcaggtatagtaaactgtcggaaggagcctcctacctcgatcacaccttccccgcggaaaagatggatgacgcggtggctccaggacgcgaatatacctatgagtggtccattagtgaggatagcgggcccacccacgacgaccctccttgcctaacccatatttattattctcacgaaaacctgattgaggacttcaattctggcctgatcgggcccctccttatctgtaaaaaaggcacgctcaccgagggggggacgcagaaaaccttcgacaagcagatcgtgctgttgttcgctgtgttcgatgagagcaagtcttggtcacaatctagcagcctgatgtacacagtgaacggctatgtgaacggaactatgccagatatcactgtttgtgctcacgaccacatctcctggcacctcctcgggatgtcttctggacccgaactgttttcgatccattttaatgggcaggtgttggagcagaaccatcacaaggtgtccgccatcactctggtgagcgcaaccagtacaactgccaatatgactgttgggcctgaagggaaatggattataagtagtctaacgcctaaacacctgcaggccgggatgcaagcatatatcgatatcaagaactgcccgaaaaagacaaggaacctcaagaaaatcactagagagcaacgcagacatatgaagagatgggaatacttcattgccgcagaggaggtcatttgggattacgctcctgtgattccagcaaatatggataaaaaataccggagccagcacctggataacttctccaatcaaattggcaaacattacaaaaaggtgatgtacacacagtatgaagacgaatcattcaccaaacacactgtgaaccccaatatgaaagaagatgggatactgggccctattataagggcccaggtgagagataccctaaaaattgtctttaagaacatggcttccaggccctatagtatctatcctcacggggtcacattttctccatatgaggacgaagtgaattcttcttttacaagtggaaggaacaacacgatgatcagagccgttcaaccaggagagacatacacatacaagtggaacatattggaattcgatgagccgaccgaaaatgatgcacaatgccttactcgaccctactattccgatgtggatattatgcgagatatcgccagtgggctgatcggacttctgctgatctgtaaaagcagaagcctcgacagacgaggaatccagcgagccgctgatatcgaacagcaggcagttttcgcagtgttcgatgagaataagtcctggtatcttgaggataatattaacaaattctgtgaaaacccagacgaagtcaagcgtgacgacccaaaattttacgaaagcaacattatgagtaccataaatggttatgtcccagagtcgattactacactgggcttttgcttcgacgataccgtgcagtggcacttctgttccgtcgggacccaaaatgaaatcttgacgatacattttactggacattctttcatatacggcaaaagacacgaggatacgctgaccctctttccgatgcggggtgagtccgtgaccgtgaccatggataacgtaggcacctggatgctcaccagcatgaattctagtccgaggagtaagaagttgcgcctgaaatttcgcgatgtcaaatgcataccggacgacgatgaggattcctacgagatattcgaaccgcctgaatctaccgtcatggcaactcgcaaaatgcacgacagattggaaccggaggatgaagaatcagacgccgattatgattatcagaaccgattggccgcagcactcgggatcagaagtttcagaaactcatctttgaaccaggaagaagaggagttcaatctgaccgctctcgcactcgagaacgggaccgaattcgtatcaagcaatacagacatcattgtgggtagcaattattcctctcccagcaatatatccaaatttactgttaataacctggctgagccgcagaaagctccctctcaccaacaggccaccacagctgggtcaccattacgccatttgataggtaagaacagcgttctgaatagttctacggccgaacactcctccccctactccgaagacccaatcgaggaccctctgcagcccgatgtcaccggtatccgcctgctcagtctgggcgcaggtgagttcaagtctcaagagcatgctaagcataaaggaccaaaagttgagagggaccaggctgccaaacacaggtttagctggatgaaactccttgcacacaaggtcgggaggcatttatctcaggataccgggtcaccttctgggatgaggccctgggaggatctgcccagtcaagacactggatcgccatctaggatgagaccatggaaggatcctccttcagacctgctgctgcttaagcagagtaactcatcaaagattctggtgggtcgctggcatttagctagcgagaaaggctcctacgagattatccaggataccgacgaagatactgctgtgaacaattggcttatatcaccgcagaacgcatctagagcttggggagagtctacacctctggccaataaacccggcaagcagtctggtcaccctaaatttccacgagtgaggcataagtctctgcaggttaggcaggacgggggcaaatcacggttaaaaaaaagccagttccttattaaaacccggaaaaagaagaaggaaaagcatacgcaccacgcccccctcagcccacggaccttccatccgctgagatctgaagcgtacaatactttcagtgagcgtaggctgaagcattcattggtcctacacaagtcgaacgagacgagccttcccacagatctcaaccagaccctgccatccatggatttcggctggatcgccagtttacccgatcacaatcagaacagctcaaatgacactggacaggcatcctgcccgcccgggctttaccagactgtgcctccggaagaacattaccagacctttcccatacaggatcccgatcagatgcactctacttcagacccttcccatagatcaagctcaccggaactcagtgaaatgttggagtacgacagatctcacaagtcattcccgacagatatcagtcagatgtcaccatcatctgagcacgaggtctggcagactgtgatcagtcctgatctttcacaggttacccttagtcctgagcttagccagactaatctgtctcctgacctctctcacaccacgctttcaccggagctcattcaacgcaaccttagccccgcactgggccagatgcccatatcaccagatcttagccacaccactttgagtcctgatctgtcccacacgacattatccctcgacctctcacaaactaacctaagccccgagctgagtcaaaccaacttatcacccgccctgggacagatgcccctaagccccgatctgagccacactactctgagtttggacttttctcagacgaatctaagtcctgaactgtctcacatgacactgtcacccgagctgtcacaaactaacctgagtcccgctctgggccaaatgccaatcagtccagacctctcacatactaccctgagcctggatttttcccaaactaatctaagtcccgagctctcacagactaatctgagtcctgctctgggccagatgccgctgtcgccagatccatcacacacgactttgagtctggatctttcacagacaaatctgagcccagagctgagccaaacaaatttatctccggatttgagtgagatgcctctcttcgccgatttgagtcaaatcccacttactccagatctggaccaaatgacactatctccagacttgggtgagacagatctgtctcccaactttgggcagatgtcactgagcccagacttgagtcaagtcaccctgtctccagacatttctgatacaacactgttaccagatctcagtcagatttctcctccccctgaccttgatcagattttctacccaagtgaaagctctcagtctctgctgttgcaggaattcaatgagtcgtttccgtatcctgacctgggtcagatgccctccccatcatcgcccacattgaatgacacattcctgagtaaagaatttaatcctctcgtcattgtaggcctgtccaaagacgggacggattacatcgagataatcccaaaagaagaggtgcagagcagcgaggacgattacgctgagatcgactatgtgccatacgatgacccctacaagactgacgttagaaccaacatcaattcgagccgggaccccgataacatcgctgcctggtatttacgtagtaataacggtaaccgcaggaactactacatcgcggccgaagaaatcagttgggattactcagagttcgtccagcgagagacagatatagaagactccgatgatatcccggaagatacgacctataaaaaggtggtgttccggaaatacttggattccaccttcaccaaacgcgacccccgcggcgaatatgaggaacacttaggtattctgggccctatcatcagagctgaagtggacgatgtgatacaggtgagatttaagaatttagcttcccgcccgtacagcctccatgctcacggcctctcctacgagaagtcatctgaaggaaaaacctacgaagacgacagccctgagtggttcaaggaagacaacgctgtccagcctaatagcagctacacctacgtatggcatgctacagaaagatccgggccagagtcaccgggcagtgcttgcagggcctgggcgtactattctgctgtgaaccccgaaaaagacatccactcaggactgatcggcccgctgcttatctgccagaaaggcatcctccataaggattctaatatgccaatggacatgcgggaatttgtgcttctattcatgacttttgatgagaaaaaatcctggtactacgagaaaaagtctcgctcttcatggagacttaccagcagcgagatgaaaaagagccatgaattccatgccatcaatgggatgatctattcccttcctggcttgaaaatgtatgaacaggaatgggtgcgtctccacctgttaaatatcggagggtctcaggacatacacgtcgtacatttccacgggcagaccctgctcgaaaatggcaacaagcagcaccaactgggcgtgtggcctctgttgcccggcagcttcaagactctggagatgaaggcctcaaagccggggtggtggttgctgaataccgaagtcggcgaaaaccagagggctggaatgcagacgccttttctgatcatggatcgggattgtcgtatgcccatgggactcagcaccggcataatctccgattcacaaatcaaagctagtgagtttctgggttattgggagcctcggcttgccagactgaacaacggggggagttacaacgcttggagtgtggagaagttggctgccgaatttgcttccaaaccatggatccaggtggatatgcaaaaggaggtgataattacgggcatccaaacccagggcgcaaaacactatctgaagagctgttatacaacggagttttatgtcgcctacagttctaatcaaataaattggcagatctttaagggaaattcgaccagaaacgtaatgtactttaatgggaacagcgacgctagcaccatcaaagaaaaccagttcgacccgccaatagtggcgcgctatattagaatttcccctactagggcctacaacaggcctaccctcaggctggaactgcagggatgtgaggtgaacggatgcagtacccccctgggaatggaaaacggcaaaatcgagaacaagcagattacagcatcctcctttaagaaatcttggtggggcgattactgggagccatttcgcgctcgcctgaatgcccaggggcgggtgaacgcctggcaggctaaggctaataataacaaacagtggttagaaatcgacctcttgaagataaagaagatcaccgccataatcacccaggggtgtaagtctctatcaagcgaaatgtacgtgaaaagctataccattcattattccgagcagggggtagagtggaaaccatacagactgaagagcagcatggtggacaaaatctttgaagggaataccaatacaaaaggccacgtgaaaaattttttcaacccccccatcatttcgagattcattcgagtcatccccaaaacctggaaccagagtattgcccttagactggaactgtttggatgcgatatctac

SEQ ID NO: 2317 - DNA, 6672 bp, Artificial Sequence
  derived and/or modified sequence
atgtttcctggttgcccacgattgtgggtgttggttgttctcggaacaagctgggtgggctgggggtctcagggcacagaagctgcccagctccgccaattctacgttgctgcacaagggatctcatggagttaccgccctgaaccaactaatagtagcctgaatctgtccgtgacatcctttaagaaaatcgtatatagggagtacgagccatacttcaaaaaagagaagccacagtctacgatcagtggcctccttggtccaacactttacgctgaggttggcgacatcatcaaagtccactttaagaataaagccgacaagccgttgtctattcatccgcagggaattagatactctaaattgtccgaaggcgctagctaccttgaccacacctttcccgctgaaaagatggatgatgccgtggcccctgggagggagtacacttatgaatggtctatatctgaggactcaggcccaacccacgacgatccaccgtgcctgactcacatctattactcccatgagaatctgatcgaggacttcaattctgggttgattggaccactgttgatctgtaagaaagggacactgactgagggaggtacacagaagactttcgacaagcaaatcgtgttgctgttcgctgtcttcgatgagtcaaaaagttggtcccaatcttcatccctcatgtatactgtaaacggatacgtgaacgggactatgcctgacatcacagtgtgtgcccatgatcatatctcctggcatctgctcggaatgtcttccgggccagagttgttcagtatacattttaacggacaagtgcttgagcagaaccaccacaaggttagtgccattaccctcgtgtctgctacatcaacaacagccaacatgaccgtggggccagaggggaagtggattatttcctcacttacacccaaacatctccaggccgggatgcaggcatacatcgacattaaaaactgccctaaaaagacccggaatctgaagaagatcactcgggagcagagaagacatatgaaacgctgggagtattttatcgcggcggaggaagttatctgggattacgccccagtcattccggcaaatatggacaagaaatataggtcacagcacctggataacttttccaatcagatcggaaagcactacaagaaagtaatgtacactcaatatgaggacgagtcctttacaaaacacacagttaacccgaacatgaaagaagatggtattctgggcccaataattcgagcacaggtgcgagatactcttaagattgtcttcaagaatatggctagccggccgtatagcatctacccgcacggagtcactttctctccctacgaggacgaggtgaattccagttttaccagcggccggaataacactatgatcagagccgtccagcccggcgagacttacacctacaagtggaacattctcgagtttgacgaacccactgaaaatgacgcacagtgcctgacaagaccttactacagtgacgtcgacatcatgcgagacatcgccagcggtctgataggcctgctgctcatctgtaagtccagatcactggaccggcgaggcattcagcgggcagccgatatcgagcagcaggctgtattcgccgttttcgatgagaataagtcctggtatctggaagataatattaataaattttgtgaaaatcctgatgaggtgaagcgggacgaccctaagttctatgaaagcaatattatgtccactataaatgggtatgtccccgaatcaataactaccctgggtttttgttttgacgacacggtgcaatggcatttttgctcagtggggacccaaaatgagatcctgacaattcattttactggccacagtttcatctatggaaagcgacacgaggacactcttaccttgttccccatgcggggcgagtccgttacggtgacaatggacaacgttggcacatggatgctcacatctatgaattccagcccccgctctaagaaacttcgactcaagttcagggatgttaaatgtattccggacgatgatgaggatagttacgagatctttgaaccccccgagtctaccgtgatggccacccgcaaaatgcacgatcggctggaaccagaggatgaggagtccgacgccgattatgactatcaaaatcgcctggctgccgccttgggtatacggagctttagaaatagctctttgaatcaggaagaggaggagttcaatctgactgctctggcgcttgagaatggcaccgaatttgtctctagtaatacggacattatcgttggcagcaactactcttctccaagcaatatcagcaagtttaccgtgaacaacctggctgagccacagaaggccccgagccatcagcaggcgacgaccgccggcagccctctcaggcatctgataggcaagaactccgtcctcaacagcagcacggcagagcattcaagtccctattccgaagaccccatcgaggaccctctgcaacctgacgtgaccggaatcagacttctctcccttggcgccggagagttcaagtcacaggagcatgccaaacacaaggggccgaaggttgagcgcgatcaggccgccaagcacagattcagctggatgaagctgctggcgcacaaggtgggccgccacctgtcccaagacactgggtcccccagtggaatgcggccctgggaagacctgccaagtcaagacacaggatcccccagcagaatgagaccttggaaggatccacccagcgaccttctgctcttgaagcagagtaacagttccaagatcctggtcggacggtggcacctggcttctgagaaaggcagctacgaaattattcaggacaccgatgaggacaccgccgttaacaattggctcatttcaccccaaaatgcatccagagcttggggggaatccactcccctcgctaataagcccgggaaacagagcggccaccccaagtttccaagggtgaggcacaaatctctgcaggttaggcaggacgggggcaaatcccggctcaaaaagagccagtttctgataaaaactcggaaaaagaagaaagagaaacatactcatcatgcaccattgagtcccagaacctttcacccactgcgctccgaggcttataataccttttctgagcgacggctgaaacactcactggtcctccacaagtccaatgagacatcactccctaccgatctgaatcagacattgcccagcatggactttggatggatcgctagtcttccagatcacaatcagaattcaagtaacgacacaggacaggctagttgtccacctgggctttaccagaccgtgccgccagaggagcactaccagacttttccaattcaggatcccgaccaaatgcatagcacttccgatccctctcaccgaagctcctctcctgagctcagcgaaatgctcgagtacgatcggagccacaaatcctttcccacggatattagtcaaatgagccccagctccgagcacgaggtctggcagaccgtgatttcccccgacctgtcacaggtgactctctctcccgaactctctcagaccaacctgtctccagacctttcacacaccactctttctcccgagttgatccagagaaacctcagtcccgctcttggacagatgccaatcagcccagacctgagccacacgactcttagcccagatttgtcacacaccactctgtccctcgacctgtctcagaccaatcttagcccagagctgtctcaaactaacctcagtcccgccctcgggcaaatgccactcagccccgacctgtcccacactaccctgagcctggactttagccaaacaaatctgagcccagagttgtcccatatgactctcagcccagaattgtcccagactaatctgagccccgcccttggccaaatgcccatatccccagacctgagccatactaccctgagcctggacttttctcagaccaatctgtcccctgaactgtcacaaaccaacctgagccctgctctgggccagatgccgctgtcaccggatccgagtcatactacactctctctggatttgagtcagactaacctttctcctgagttgtctcagacaaatttgtcacctgacttgagtgagatgcctctgttcgctgacctgtctcaaattcctctcacccccgatctggatcagatgacgctttcccctgatctgggcgagaccgacctttcccctaactttggccaaatgtccctgagtccagacctgagtcaggtgaccctgtcccctgatatatctgataccacgcttctgcccgacctgagccagatcagccctcctccagatctcgatcagatcttttatcccagtgagtcctcacagagtctgcttctgcaggaattcaatgagtcattcccctatcccgaccttggccagatgcctagtccaagcagtcccactctgaacgatacattcctgtccaaagagtttaatcctctcgttatcgttggcctgagcaaggatggcactgactatatcgaaattattcccaaggaggaagtgcagtcaagtgaagatgactatgctgagatcgactatgtgccctacgacgacccctataagaccgatgtgaggaccaatataaactcttctagggatcccgataacatagcagcgtggtacctccggtctaataacggcaacagacgcaattactatatcgcggctgaggagatcagctgggactattccgaatttgtacagcgggagacagatattgaagactcagacgatatccctgaggacacaacatataagaaagttgtttttcggaagtatctcgatagcacctttaccaagcgcgaccccaggggcgaatatgaagaacatttgggtatccttggtccaattatcagggccgaggtggatgatgttatacaggtgagattcaagaaccttgccagtcggccatatagtctccacgcgcatgggctgagctatgaaaagtctagtgaggggaaaacctacgaggacgactcacccgaatggtttaaagaagataatgctgtccagccaaactctagctacacttatgtgtggcatgcaacagagaggtccgggccagagtctccgggaagcgcttgcagggcctgggcctattatagcgccgtgaatcctgagaaagacatacactctggactgattgggccactcttgatctgtcagaaaggcatcctgcacaaagattcaaacatgcccatggacatgagggagttcgtactgctgttcatgacattcgacgagaagaagtcctggtactatgaaaagaaatcacggagcagctggaggctgactagctctgagatgaagaagagccacgagttccatgccataaacggaatgatttactcacttcccggactgaagatgtacgagcaggaatgggtccgacttcacttgctgaatatcggtggcagccaggatatccacgtggtacacttccatggacaaaccctgttggagaacgggaacaagcagcaccaacttggtgtgtggccattgttgccaggatcctttaagaccctcgaaatgaaggcctccaagcccggatggtggctgctgaatacagaggtgggagagaatcaaagagccggcatgcagactccctttctcattatggaccgggattgccgcatgccaatgggcttgagtacgggtattatatcagactcacaaatcaaggcctctgagtttctcgggtattgggaaccgagactcgcccgactgaataacggaggcagttacaacgcgtggtccgtcgaaaagctggcggccgagttcgcaagcaaaccctggattcaagtcgatatgcagaaggaagtaattatcactgggatccagacgcagggtgctaaacactacctgaagtcatgttataccacagagttctacgtggcctactccagcaatcagataaactggcaaatctttaaaggtaacagtacaaggaacgtgatgtacttcaatggaaactctgacgcgtccactattaaggaaaaccaattcgatccccccattgtggctcgctacataagaatctcccctacccgcgcttacaatagaccaacactccggctggagcttcaaggttgtgaggtgaatgggtgttccacaccgctgggtatggagaatgggaaaatcgagaacaagcagatcactgcatcctcatttaagaagtcatggtggggggattactgggagccattcagagccaggctcaacgctcaaggacgcgtgaacgcatggcaggctaaggcgaacaataacaaacagtggttggagatcgacctgctgaagataaaaaagattaccgcaatcatcacacaggggtgcaagtcattgagtagcgagatgtacgtgaaaagctacacaatacactactcagaacagggcgttgagtggaaaccatataggctgaaatcctctatggttgacaagatcttcgagggaaacaccaacacaaaggggcatgtgaaaaacttttttaatcctcccattatcagccggtttatccgcgtcatccccaagacatggaatcagagcatagccctccgcttggaactgtttgggtgcgacatatat

SEQ ID NO: 2318 - DNA, 6672 bp, Artificial Sequence
  derived and/or modified sequence
atgttccctggatgcccaagattatgggtgttggtggtgttgggaacttcatgggtagggtggggatctcagggaactgaagcggcccagctgaggcagttctacgtggcggctcagggaatatcttggagttatagacccgaacccacaaattcttccctaaatctctcagttacatcttttaaaaaaatagtttatcgcgaatacgaaccatattttaaaaaagaaaaaccacagtctacaatctctggacttctcggacccacactttacgctgaagttggagatataattaaagtacattttaaaaataaagccgataagcctctatctatacatcctcagggaatccggtatagtaaactctctgaaggagcatcatatcttgatcatacattccctgccgaaaaaatggatgatgccgtggctcctggaagggagtatacatatgaatggagtatctcggaagattctggaccaacacacgatgatccaccttgcttaacacatatctattattctcacgaaaatctaattgaagatttcaacagtggactcatagggcctcttctaatttgtaaaaagggaacactaactgaaggagggactcagaaaacttttgataagcagatcgtattgctcttcgccgtgtttgatgaatctaaatcatggtctcagagttcaagtcttatgtatacagtgaatggatatgtgaatggaactatgccagacatcactgtctgcgcgcacgaccatatttcatggcatctgctgggaatgtcatctggacccgaattattttcgattcatttcaatgggcaggtgcttgagcagaaccaccacaaggtctcagcaatcacactcgtgtctgcaacatccactacagcaaatatgacagtagggcccgaaggaaaatggataatctcatccctcacaccaaaacatttacaggcagggatgcaggcatatatcgacatcaagaactgtcccaagaaaacaagaaatcttaaaaaaataactcgcgagcagaggaggcatatgaaacggtgggaatacttcatagcggccgaagaggtgatttgggactatgctccagtgatacctgcaaacatggataaaaagtatcgatctcagcatctggataatttctccaatcagataggaaaacactataaaaaagtcatgtatactcagtacgaggatgagtccttcacaaaacatacagtgaaccccaatatgaaggaagatgggatcctcgggcccatcattagagctcaggtaagagatacattaaaaatcgtctttaaaaatatggcctctcggccttattcgatctatcctcacggagtaacattttctccctacgaagatgaagtgaacagttcctttacatcgggaaggaataacactatgatacgcgccgtacagccaggagaaacatatacatataaatggaacatattagaattcgatgaacccacagaaaatgatgcacagtgcctaactagaccctattactccgatgtggatatcatgcgggatatagcctccggactcatagggctattgctgatatgtaaaagtcgctcactcgatcggcggggaattcagagagcggctgatattgaacagcaggccgtgtttgcagtgttcgacgaaaacaaatcatggtatctggaagacaacattaacaaattctgtgaaaatcccgatgaagtcaaacgcgacgatcctaaattttatgagtctaacatcatgtcaactatcaacgggtatgtgcctgaatccatcactacactgggattttgtttcgacgatacagtgcagtggcacttctgcagtgtcgggacacagaacgaaattttaacaatccactttactgggcattctttcatctatgggaaaaggcacgaagacactctcacattattcccaatgcgaggggaatccgttactgttacaatggataatgttgggacttggatgcttactagtatgaattctagtcctaggtccaaaaaactgcggctgaagtttagggatgtcaaatgtatcccagatgatgatgaagattcttatgaaatctttgaaccccccgagtccactgtgatggcgacaaggaaaatgcatgatagacttgaaccagaagacgaggaatctgatgcagattatgattatcagaaccgcctcgccgccgctcttgggatccgctcctttaggaactccagtctcaaccaggaagaggaggaattcaacctcactgctctagccctagaaaatggaacagaattcgtctcttccaatacagacatcatagtggggtctaattattctagtccctccaatatctctaaattcacagttaataatctcgccgaacctcagaaagccccctcacaccaacaggccacaacagccgggtcacccctgcgccacctcatcgggaaaaattcggttctcaactcctcgactgctgagcattctagtccttattctgaagatccaattgaggatcctctacagcccgatgtgactggaatccgcctcttaagtttgggagccggggaatttaaatctcaagaacacgcaaaacacaaaggacccaaagtggaacgggaccaggcagcaaaacataggttttcctggatgaagcttctcgcgcataaagttggaaggcacctctcccaggatactgggtccccctctggaatgaggccatgggaggatttaccatctcaagatactgggtcaccttctaggatgaggccttggaaggatcccccatctgatctcctgttactaaaacagagtaactcatctaaaatactagttggacggtggcacctggcctccgaaaaaggatcgtatgaaatcatacaggatacagatgaagatactgcggtaaataattggctgatctccccccagaatgcctccagggcttggggagagtctacacctctggctaataaacctgggaaacagtcaggacaccctaaatttcccagggtgagacacaaatctctacaggtaaggcaggatggaggaaagagtagactcaaaaaatcacagttcttaataaaaacaagaaaaaaaaagaaagagaaacatacacatcatgcccccctgagtcctagaacgttccaccctctaaggtcagaagcatataacacattctcagagcgacggctgaaacattctctggtgctacataaatcgaatgaaacatccctcccaacggatctgaatcagacactcccatcaatggacttcggatggatcgcatccttgccagatcataaccagaactcttcaaatgacacgggacaggcaagttgcccacccggactctatcagactgtgccacctgaggagcactatcagactttccctattcaggatcctgatcagatgcactctacatctgatccctctcatcgatcttcctcacccgaactgagtgaaatgctcgagtacgacaggtcccataaatcttttcctacagatatctcacaaatgtctccatcctctgagcacgaagtctggcagacagtaatatcaccagatctgtctcaggtaactctctcccccgagctctcccagactaatctatctcccgatctctctcacactactctatcacccgagctcatacagcggaatctgtcgcctgcgctcggacagatgcccataagtcctgacctttcgcatacaactttatctcccgatctgtcacatacaactctgtctctggatctgtcacagactaacctgagtccagaactgtctcaaacaaatctttcccccgcactggggcagatgcctctttctccagatctgtcccacacaactctgtctctagatttctctcagactaacctatcacccgaactgtctcacatgactctctcgcccgagctgtctcagactaacctttcccccgcactcggacagatgcccatctcccctgacctgtctcatacaactctctctctcgatttctcacagacaaacctctctcctgaactaagtcagacaaacctgtcacccgcattaggacagatgccactctctcccgacccatcccatacaactctctccttagatcttagtcagactaatcttagtccagaactcagtcagacaaacctatctccagatctgtctgaaatgcccctgttcgcagacctatcacagataccacttacacccgatctggatcagatgactctttctcccgacctgggagaaacagatctgtcgcctaactttgggcaaatgtctctcagtccagatctttcccaggtcacactctcacctgatatatccgatacaactctcttgcctgatctctcacaaatcagtccccctccagacctggatcagattttttatccttctgaatcatctcagtctttgctcctgcaggaatttaatgaatccttcccctatcctgatctcgggcagatgccctccccttctagtcccacacttaacgacactttcttatcaaaggagttcaacccactcgtcatcgttgggctgtccaaagacgggactgattatatcgaaattatccctaaagaagaagtgcagtcaagtgaggatgattatgcagagatagattatgtgccttatgatgatccttataaaacagatgtgcgcactaatatcaattcatctagagatcctgataacatcgctgcctggtacttaaggtctaacaacgggaacaggcgaaactattatatcgccgctgaagagatttcctgggattacagtgaattcgttcagcgcgaaacagacatagaagattcagacgatattcccgaagatacaacatataaaaaagtggtgttcagaaaatatctagattctacattcactaaacgcgatccacggggggaatacgaagaacacctcgggattctaggaccaataattcgcgcggaggtagatgatgtgatccaggtgagattcaaaaacttggcctcccggccctattcactacatgctcatgggctcagttatgaaaaatcttccgaagggaaaacttatgaagatgattccccagaatggttcaaagaagataacgctgtgcagccaaactcatcctatacatatgtatggcacgccacagaacgctcagggccagaaagtccaggatctgcctgtcgcgcgtgggcttactactccgccgtaaacccagagaaagatattcacagtggactgatagggcccctgctgatatgccagaaaggaatactgcacaaagactctaacatgcctatggacatgagggaattcgtactcctctttatgacatttgatgagaaaaaatcatggtactatgaaaaaaagagtcgatctagttggcgactgacttcgagtgaaatgaagaaaagtcacgaattccacgcaataaatggaatgatttactccctgcccgggctcaaaatgtatgaacaggaatgggtacggcttcatctactcaacataggggggtctcaggatattcacgtggttcatttccatgggcagactttactcgaaaatggaaacaaacagcatcagctcggagtatggcctctgttaccaggatcttttaaaactctagaaatgaaagcatcgaaacctgggtggtggctcctaaacacagaagtaggggaaaatcagagagccgggatgcagacgccatttctaatcatggatagagattgtcggatgcccatgggactctcaactgggattatctcagactcgcagatcaaagcgagtgaattcctgggatactgggaacctaggctcgcacgactgaataatggaggatcatataatgcttggtcagtggagaaattagccgccgagtttgcctccaaaccatggattcaggtggatatgcagaaagaagtaattataactgggatacagacacagggagccaaacactatcttaaatcgtgctatacaactgaattctacgtggcttattctagtaaccagataaattggcagattttcaaaggaaattctactcggaatgtaatgtacttcaacgggaattctgatgcttctacaattaaggaaaatcagttcgacccccccatcgtggcacgttatatcagaatttctccaacacgagcctacaataggcccacattgcggctcgaactccaagggtgcgaagtgaacggatgttctacaccactcgggatggaaaatgggaaaattgaaaataagcagataactgcttcttcctttaaaaaatcctggtggggggattattgggaaccattccgggcccggctaaatgcccagggaagagttaatgcttggcaggctaaagccaacaataataaacagtggctggaaatagatctcctcaagataaaaaaaatcactgccataatcacacagggatgtaagtcactctcttcagaaatgtacgtaaagtcatacacaatccattattctgaacagggagtggaatggaaaccctaccggcttaaatcatccatggtggataaaatttttgaagggaatacaaacactaaagggcacgtaaaaaactttttcaaccctccaattatcagtcgcttcataagagtgatccctaaaacatggaaccagagtatcgctcttcggctagaactatttggatgtgatatctat

SEQ ID NO: 2319 - DNA, 6672 bp, Artificial Sequence
  derived and/or modified sequence
atgtttccaggatgtcctaggctatgggtgctggtggtgttgggcacctcctgggtgggatggggtagtcaagggacggaagccgctcagctgcggcagttttacgttgccgctcaggggatttcatggtcttaccgtcctgagccaacaaacagcagcctgaatctctctgtcacgagcttcaaaaaaatcgtgtatagggagtacgagccctatttcaagaaggaaaagcctcagtcaaccatcagcggactgttggggcctacactctatgctgaagtcggcgacatcatcaaggtgcacttcaaaaataaggccgataagcctctgtcaattcacccacagggcattcggtattccaaactcagcgagggggcttcctatttggatcacaccttccccgcggaaaaaatggacgacgcggtggctccaggaagagaatatacctacgagtggtcaattagcgaggactctggtccgacacatgacgacccaccttgcctgacacatatctattattctcatgaaaacctgattgaggacttcaatagtggtctgatcggtccccttctcatttgcaagaaaggaactctgaccgagggaggaacccagaagaccttcgataagcaaattgtgctgttatttgccgtttttgacgaatctaagtcctggtcacagtcctcttctctcatgtatactgtgaacggctatgtgaacggcacaatgcctgatattaccgtatgcgcacatgatcatatcagttggcacctgctggggatgtcctccgggcctgagctctttagcatccactttaatggccaggttctcgaacagaaccaccataaagtatccgctattactttagtatccgctacttcgactacagccaatatgactgttggacctgagggaaaatggatcattagcagcctgacccccaagcacttgcaggcaggaatgcaggcctatattgacataaaaaattgtcctaagaagacaagaaaccttaaaaagatcacgagggagcagaggcgccacatgaagcggtgggagtactttattgccgccgaagaagtgatatgggattatgcccctgttattcccgcgaacatggacaaaaaatacagaagccagcaccttgacaatttctccaaccagattggaaaacattacaagaaggtcatgtacacccaatacgaggacgagtcattcacaaaacacactgttaatcctaacatgaaggaagatggtatccttgggcctattatcagggcccaggtcagggacacactaaaaatcgtctttaaaaacatggcttccaggccatactcgatttatccccatggagttacattcagcccatatgaggatgaggtcaatagctcttttaccagtggtaggaataacactatgattcgagccgtgcaacctggagaaacttatacgtataaatggaacatactggagttcgacgaaccaaccgagaatgatgcgcagtgcctcactagaccctactacagtgatgtagatattatgcgggacattgcttcaggtctaatcggactattgctgatttgcaagtccagatctttggatcgacgaggcatacagagagcagcggatattgagcagcaggccgtcttcgctgtatttgacgagaacaagtcatggtatctcgaggacaacattaataagttctgcgaaaaccctgacgaggtaaagcgagatgatcccaagttctatgagagcaatattatgtccaccatcaatggttacgtgccggagtccattacaactcttggcttctgcttcgatgacactgtccaatggcacttttgttcggttggaacacaaaatgaaattctgaccatacatttcaccggtcatagctttatttacggcaaacgtcacgaggatacactgaccctgttccccatgagaggggaatccgttacggttacgatggataacgtcggcacctggatgttaacgtccatgaatagctcccctagatccaaaaaactgcgcctgaagtttcgggacgttaagtgcattccagacgacgatgaagatagttatgagatcttcgagccacctgaatccaccgtgatggccactcgcaagatgcacgacagacttgagcctgaagacgaagagagcgacgcagactatgattatcagaatcgtctggccgccgccctggggatcaggtcgtttaggaattcctcgctgaaccaagaagaggaggagttcaatctaaccgccctagctcttgagaacggaaccgaattcgtctccagtaacaccgatattatcgtcggaagcaattacagctcgcctagcaacatcagcaagttcaccgtgaataatctcgccgaaccgcagaaggctcctagtcatcaacaggcgacaactgccggatcccctctccgtcatctcatcggcaaaaatagcgtgctcaattcgtccactgccgagcacagtagcccctatagcgaggaccccatcgaggatcccctccagccagatgtgaccggaatccgcctactgtccttaggagccggagaattcaaatcccaggagcacgcaaagcacaaaggtccgaaggtggaaagggaccaagctgcgaaacaccgcttttcctggatgaagctgctggcccataaggtggggcgccatttgagccaggacaccggctcccccagtggcatgagaccttgggaagatctgcctagccaggacaccggcagtcccagtagaatgcgcccatggaaagaccctccgtccgatctgctcctactaaagcagtccaactcatcaaaaatccttgtcggccggtggcacctggcatcagaaaaagggtcttatgagattatccaggacacagacgaggacacagcagtgaataattggctgatctctccacagaacgcttcccgcgcctggggcgagtcaacgcctctagccaataaaccgggcaaacagtctgggcacccaaaatttccgcgagtcagacataagagcctacaggtccgccaggacggggggaagtcgcgccttaaaaaatctcaattcctcatcaaaacaagaaaaaaaaagaaggaaaagcatacccatcacgctccactgtcaccccggacctttcaccctctgcggtcggaagcttataacacttttagcgagaggaggcttaaacattccctcgttctgcacaagtctaatgaaactagcttgcccaccgaccttaaccagaccttaccatccatggactttggatggatcgcttcacttccagaccacaatcagaatagttccaacgataccggtcaagcctcatgccctccaggcctttatcagacggttccccccgaagagcattaccagaccttccccatacaggatcccgatcagatgcatagcactagcgatcctagtcacagatccagcagccccgagctttccgagatgctggagtatgatcgttctcataagagctttcccaccgatatttcccagatgtcacccagctctgagcacgaagtctggcagaccgtaatcagtccagacctctctcaagtcactctctcaccggagttgagccagacaaacttgtcccccgacctaagtcacaccacactctcccctgagctaatccagaggaacttgtccccggctctgggccagatgcccattagtcctgatctctcacacacgaccctctcccccgatctgagtcacaccaccctgagtttggacctgagccagacaaatttgagtcctgaactgagccagaccaacctgtcaccagccctagggcagatgccgctcagcccagacctgtctcacacaaccctctcactggatttttcacagaccaatttgagcccggagctgtcacacatgactctgagcccagagctgagccagaccaacctgagcccagctctcgggcagatgcccatatcccctgacctctctcacactactctgtcacttgacttttctcagacaaatctcagtcctgagctgtcacaaaccaatctgtcgccagccctgggacaaatgcctctgtcccctgatcccagccatactacattgtccttggacctaagccagacaaatctgtccccagaattgtcacagaccaacttaagcccagacttgtccgagatgcctctgtttgcagacctgtcccagatccccctgactcccgatctggatcagatgactctgtcaccagacctcggagaaacggacctgtcccccaacttcggacagatgagcctctcacccgacctaagtcaagtaacactgtcgcccgatatctcagatacaaccctgctgcccgatctctcacagatctcccctccaccagacctggaccagattttttatccatcagaatcttcccaaagccttttgctacaggaattcaatgaatccttcccttatccagatcttggccagatgcctagcccctctagtccaacgttaaatgatacatttctctccaaggaatttaatcctctagtcatagtgggactgtctaaggacggtactgactacatcgaaatcatccctaaagaggaggtccagtcaagcgaagatgattatgccgaaatagactacgtgccatacgatgacccgtacaagaccgatgtgagaaccaacattaacagctctcgtgatccggacaacatcgccgcttggtatctcaggtccaacaatggaaataggcgcaattattatatcgccgctgaggagatctcttgggattacagcgagtttgttcagagagagacggatatcgaggactcagacgacattccagaagatacaacctataagaaggtggtatttagaaagtaccttgactctactttcacgaagcgggaccctaggggagagtacgaagagcacctgggcattcttggaccaattattcgcgcagaagtggacgatgtcattcaggtgcgattcaagaatctcgctagcaggccttattccctgcatgcacatggtttgtcctatgagaaatcatcggaggggaagacttacgaggacgactccccagaatggtttaaggaggataatgccgtccaaccaaattcctcatatacctatgtgtggcatgcgactgagcgctcagggcctgaatcccccgggtccgcttgtagagcttgggcctattatagcgcagtgaaccccgaaaaagatatacactctggacttataggacccctgcttatctgccagaagggcatactgcacaaagacagcaacatgcccatggacatgcgggaatttgtcctactattcatgacgtttgacgaaaagaagtcttggtactacgaaaagaaaagccgcagctcgtggcgcttgacatcatctgaaatgaagaaatctcacgagtttcacgccataaatggcatgatctactctctgccaggactgaagatgtacgaacaggagtgggttagacttcatctcctcaacatcgggggctctcaagatatccatgtcgtccatttccacggccagaccctgctcgaaaatgggaataagcagcaccagctaggggtctggccgctacttccaggctccttcaagacgctggagatgaaagctagtaagccaggatggtggttgcttaacaccgaagtgggcgaaaaccagcgggcaggcatgcaaacccctttcctgatcatggatcgcgactgtaggatgcccatggggttgtcaacgggcattataagcgattcacaaattaaggcgagcgagtttctgggctactgggagccgcgcctagccagactgaataatggtgggtcatacaacgcctggtccgtggagaaactcgccgccgaatttgcgtctaaaccatggatccaggtcgacatgcagaaggaagtcatcatcaccggaatccagacccagggggccaagcactatctgaaatcgtgttataccaccgagttctacgttgcgtactcatcgaatcagataaattggcaaatctttaaggggaattccacgagaaacgtgatgtacttcaatggaaactctgatgcctctaccataaaggaaaatcagttcgatcccccaatagttgctagatacatcagaatctcccctaccagggcgtacaatagacctacgctacgactggagcttcaagggtgcgaagtgaacggatgctccacccctctgggcatggaaaatggaaagatagagaataagcagataactgccagtagcttcaaaaagtcctggtggggggactactgggagcctttccgggctcgtctcaacgcccagggtagagtgaatgcctggcaggctaaggccaacaacaacaaacagtggctagagattgacctcctaaaaattaagaagattactgccataatcacccagggctgcaaatcgctgtcctcagaaatgtacgtcaagtcgtacaccatacattattctgaacagggcgtcgaatggaaaccctatcggctgaagagctctatggtagacaagatcttcgagggtaatacaaacactaagggccatgtcaagaattttttcaatcctcctatcataagccggttcatccgcgttataccaaagacatggaatcagtctattgccttgaggctggaactgtttggatgcgatatttac

SEQ ID NO: 2320 - DNA, 6672 bp, Artificial Sequence
  derived and/or modified sequence
atgtttccgggctgtcctagattatgggtactggttgttttgggaacatcatgggtgggctggggctctcagggtacggaagcagctcaattgagacaattttacgtcgccgcgcaggggatctcttggagttatcgaccagagccgacaaacagctctctcaatctgtccgtaacaagcttcaagaaaattgtttatcgcgaatacgagccttatttcaaaaaagaaaaaccacaatcaacaatatcaggcctattagggccaacattatacgcggaagtgggcgacatcatcaaagtacactttaaaaacaaagcggacaagcccttatccatccatcctcaaggcattcgctattctaagctttcggagggagcttcatatctggatcacacattcccggcagaaaaaatggatgacgcggttgcacccggtagagaatatacttacgaatggtcaatttctgaagacagtggcccaacacacgatgatcccccctgcctcacacatatttattattcgcatgaaaatttgattgaggactttaattccggcctcatcggcccgctgttaatctgcaaaaagggcactctgactgagggtggcacccagaagacattcgataaacagatcgtgttgcttttcgctgttttcgatgaatctaaatcttggtctcagtcgagctccttgatgtatacggtgaatggctatgtaaacgggacaatgccagacatcacagtttgtgctcatgatcatatctcctggcatttgttaggcatgagctctggcccagaattgtttagcattcatttcaacggccaagtcctcgaacagaatcatcataaagtaagtgccattacacttgtatctgcaacgtccacaacggcaaacatgacagtaggccctgaaggcaaatggattatctctagccttacgccaaaacatctgcaggcgggcatgcaagcttacatcgacatcaaaaactgcccgaaaaaaacacggaatcttaaaaaaattactcgggagcagcgccgccatatgaaaagatgggaatatttcattgcagctgaagaagtgatctgggattatgcaccggtcattccagcaaatatggataaaaaatatcggagccagcacttagataacttctctaatcaaataggaaaacattataaaaaagtcatgtatactcaatatgaggatgaatcttttactaaacatacagtgaatcccaacatgaaagaagatgggattttaggaccgattattagagcacaggttcgtgatacattaaaaattgttttcaaaaatatggcgtctaggccatattccatctatccgcatggggtaactttcagcccgtatgaagacgaggtcaactcatcctttacatcagggcgaaacaacacgatgatccgtgctgtccaacctggggaaacctatacctataaatggaatattcttgagtttgacgagcctacagaaaatgatgcacagtgccttaccagaccttactattcggacgttgacattatgcgtgacattgcaagtggattgattggactgttacttatctgtaaatctagatctttggatcgtaggggtattcagagagcagccgatatcgagcagcaggcagtgtttgctgtgttcgacgaaaataaatcttggtatttggaagataacattaataaattctgtgaaaacccagatgaagtcaagcgcgatgaccctaaattttatgaaagcaatataatgtccacgattaacggctatgtgcctgaatccattacaacactgggcttttgttttgacgacacagtccaatggcatttctgtagtgtgggaactcagaatgagatcctgactattcatttcaccggacactctttcatttatggaaaacgccatgaggatacactaacactgtttccgatgcgtggtgaatctgtcacggttaccatggataatgttggcacgtggatgctcacgtcaatgaattcatctcctaggtctaaaaaacttagacttaagtttagggatgtaaagtgtatccccgatgacgatgaagattcttatgaaatctttgaaccgccagagtccacagttatggccacacggaaaatgcacgatcgtctggaaccggaagatgaagaaagcgacgcagattacgattatcaaaaccgcttggcggcagctttaggcattagatctttccgcaattcttccttaaaccaagaagaagaggaatttaacctgaccgcactggcactagagaacgggacggaatttgtgtcctctaatacggacattatcgttggttctaattattcgagcccatctaatattagcaagtttaccgttaataacttagctgaacctcagaaggcgccgtctcaccagcaagctacgacagctggttcaccgcttaggcatctgatcggaaaaaatagcgtattgaattcgagcactgccgagcattcttctccgtattctgaggaccctatcgaagatccactgcagccagatgtcacaggcatcagattactgagtctgggcgcaggagaatttaagtcgcaggaacatgccaaacataaaggacctaaggtagagcgcgaccaagccgcaaagcatagattttcttggatgaaactacttgcacataaggttggcagacacttaagccaggatacagggtctccttcgggcatgcgtccatgggaagacttgccgtcacaggataccggaagcccgtcgagaatgcggccatggaaagacccgccatccgacctactgttgcttaaacaatctaattcttccaaaatccttgtcggtagatggcatctggcctccgagaaaggcagctacgaaattatacaggatacggatgaagataccgccgtgaataattggctgatctcaccacaaaatgccagtcgcgcatggggtgaatccacaccgcttgcaaacaagccgggtaaacaaagcggccatcctaagtttccgagggtacgacataaaagtcttcaggttcggcaagatggtggaaaatcacgcctcaaaaaatcccaattcttaattaaaacgagaaagaaaaaaaaagagaagcacacccatcatgcgccgctctctccaagaacgttccacccgttacgtagcgaagcgtacaacacctttagcgaacgccgtttgaaacacagcttagtgttgcataaatcaaacgaaacaagcctaccaacagatctgaatcagacccttccgagtatggattttggttggatagcatcactgccggatcataatcagaattcgtccaatgacaccggacaggcttcatgtccgccgggcttatatcagaccgtgccgccagaagaacattatcaaacgtttccgattcaggacccagatcaaatgcacagcacatctgacccatcacatagatcttcatcaccggagctctcagaaatgcttgagtatgaccgttcccacaagtcctttcccacggacattagtcaaatgagcccgagcagcgagcatgaagtttggcaaacggtcatcagcccggacttgagccaagtaacactgtcacctgaactgagtcaaacaaatttgtctccggatctctctcatacgaccctttcccccgaattaattcaacgtaacttgagcccagcgttgggacagatgcctatttctccagatctctcccatacaaccttgtctccagatcttagccatacaacattatcactcgatctttcccaaacgaatctgagtccggaattatcgcaaacaaacctgagtccggccttagggcagatgcccttatcaccggatctaagccatacgacgttatcgttagatttttctcaaacaaatctttctccggaactgtcccacatgacactgtctccggaattgtctcaaaccaatctgtctcctgccttaggccaaatgcctatctcaccggatctttctcatacaacccttagcttagactttagccagacgaacttatcacctgaactttcacagactaacttatcccctgccttaggccaaatgccgttgtccccggaccctagccatacaacactttctctggacttaagtcaaacgaatcttagtcctgagctctcccaaacaaatctttctcccgaccttagcgaaatgccgctatttgcagatttatcccagatacccctcacgccggaccttgatcaaatgacattgtcacctgatttaggcgaaacagacctttctcctaattttggacagatgtccctgtcgcctgatttatctcaagtcacgctgtctcccgacatcagcgacacgacactgttacctgatttgtcacaaatttcaccgccacccgatttggatcagatcttctatcctagcgaaagcagtcaatcactcctccttcaggaatttaatgaaagctttccatatcccgatctgggtcaaatgccatcgccttcatcccctactttaaacgatacgtttttaagcaaagaatttaaccccttggttattgtaggactgagcaaggatggtacagattatattgaaatcatcccgaaagaggaagtacaatcaagcgaagatgactatgcagaaattgattacgtcccatatgatgatccctataagacggatgtgagaacgaatattaactcatctcgcgatcctgacaatatagctgcatggtacctcagatcaaacaatggcaaccgccgtaactattacattgctgcagaagaaatttcctgggactattctgagttcgtacagcgtgaaactgatattgaagatagtgacgatatcccggaggataccacctacaaaaaagtagtttttcgcaaatatctggacagtacgtttacaaagcgcgaccctagaggagagtatgaagaacatttgggaattcttggaccgattattagagcggaagtagacgacgtaatacaggtgagattcaagaacttggcttcccgcccgtattccttacatgcacatggcctttcgtatgaaaaaagctctgaaggcaaaacatatgaggacgattccccagaatggttcaaagaggataatgcggtacagccaaacagttcttatacgtacgtgtggcatgctacggaacggtctggaccggaatcaccaggcagcgcttgtcgtgcatgggcttattattcagcagtgaacccggaaaaagatattcacagcgggttaataggcccgctcctcatctgtcagaaggggattcttcataaagatagcaacatgccgatggatatgcgggaattcgttttattatttatgaccttcgacgagaaaaaatcttggtattatgaaaaaaaaagtagatcatcgtggcgccttacgtcatccgaaatgaaaaaatcccatgagtttcatgcaatcaatggaatgatctattctctacctggcttaaaaatgtatgaacaggaatgggttcgtttacatcttcttaatatcggcgggtcgcaagatatacatgtcgttcactttcatgggcagacgctgctggagaacggaaataaacagcatcagcttggcgtgtggccgttgcttccggggtcattcaagactcttgaaatgaaagcgtctaagccaggctggtggcttcttaacacagaggtcggtgaaaaccagcgggctggtatgcaaacgccgtttctgataatggaccgagattgcagaatgcctatggggttaagtaccggtatcattagcgacagccaaatcaaagcctctgaatttttaggttactgggagcctcgtctggcccgtctgaataacggtggaagttataacgcctggagcgtcgaaaagctagctgccgaattcgcatcaaaaccgtggatccaggttgatatgcaaaaagaggttatcattaccggcattcaaacacaaggggccaaacattatttgaaatcatgctatactacggaattttatgtcgcttatagctcaaatcaaatcaattggcaaatttttaagggaaactcaacgcgtaatgtgatgtattttaacggaaacagcgatgcttctactattaaggaaaatcaattcgatccgccgatagtggcccggtatattcgcatttctccgacgagagcttacaatagaccgacattacgtctggaattacagggatgtgaggtgaacggctgcagtacgcctcttggtatggaaaacggtaagattgaaaataaacagattacggcaagttcatttaaaaaatcttggtggggagattattgggaaccttttcgcgcacggctcaacgctcaaggaagagtgaatgcgtggcaagctaaagcaaacaataataagcagtggctcgagatcgaccttctcaagattaaaaaaattactgcgattattacacaaggatgtaagtcattgtcatccgaaatgtatgtcaaatcatatacaattcactatagcgaacaaggagtggaatggaaaccatatagattaaagtcaagcatggtcgataaaatcttcgaaggcaacactaataccaaaggacatgttaaaaacttctttaatccgccgattatttcgcgcttcatccgagtaataccaaaaacctggaaccagtccatagctctgagattagaactgtttggctgtgatatttat

SEQ ID NO: 2321 - DNA, 6672 bp, Artificial Sequence
  derived and/or modified sequence
atgttccccggctgcccaaggctgtgggtgctagtggttctaggcacatcttgggtgggctggggcagtcagggcacagaggctgcgcaactgcgccaattttatgtcgccgcgcagggaatatcatggtcctataggccagagcctaccaactcctcattgaacctatccgtcacatcctttaagaagatcgtataccgcgagtatgaaccatactttaagaaggagaaaccgcagagtactatcagtgggttgctgggccctactctgtatgccgaagtgggcgacattattaaggtgcattttaagaataaggcagataaacctctgtccatacacccccaggggattaggtacagtaaactctctgaaggagcctcttacctggaccatacattcccagccgagaagatggacgacgctgtcgctcccggtagagagtatacatatgaatggtctatcagtgaagatagtgggcctacgcacgacgatcccccctgtcttacacatatatattattcccatgagaatctgatagaggacttcaacagcgggctgattggaccgctgctgatctgcaagaaaggcaccttgacagagggcggtacccagaaaacgttcgacaaacagattgtcctgctgtttgcggtgtttgatgagtcgaaaagttggtcgcagtcctcaagccttatgtacaccgtcaatggttacgtcaatgggacaatgcccgacattacggtatgtgcccatgaccacatctcatggcacctcttaggtatgtcctccgggccagagctgtttagtatccacttcaacggacaggtgctcgagcagaaccatcacaaagtctctgctataaccctggtttcagcaacttcgactactgccaacatgacagtgggccccgagggtaagtggatcattagctccctgacaccgaaacatctgcaagctgggatgcaagcctatatagatattaagaattgccccaaaaagactagaaatctcaaaaagattactagggaacagagacggcatatgaagagatgggagtattttatcgctgcagaggaagtcatttgggattatgcaccagtcattcctgccaacatggacaaaaagtataggagccagcatctcgataatttttctaaccagatcggcaaacactataagaaggtcatgtatactcagtatgaggacgagagttttaccaaacacacagtaaatcccaatatgaaggaggacggtatcttaggacctattattcgcgcccaggtgcgcgataccctgaagatcgtattcaaaaatatggcatcccgtccgtactccatttacccgcacggagttacattctcaccatatgaagatgaggtgaactcttcatttacctccggcagaaataacaccatgatccgcgcagtccagcccggtgagacctatacctataagtggaatattttggagtttgatgaacccactgagaacgacgcacagtgcctcactcggccgtactattcagacgttgacataatgagggacatcgccagtggactcatcgggctgctgctgatttgcaaatcacggagtctggacaggaggggcatacagcgggccgcagacattgagcaacaggccgtgtttgcggtctttgacgagaacaaatcgtggtaccttgaagataatatcaacaagttttgcgagaacccggatgaggtcaaacgagacgatccgaaattttatgaaagtaatattatgtctaccataaatggttacgtcccagaatccattacaacactcgggttctgctttgacgatactgtgcagtggcatttttgttccgtgggaacccagaatgaaattctcacgattcattttaccggccattcgttcatctacggaaagcggcacgaggatacactcactctgttcccgatgaggggcgagagcgtcacggttactatggacaacgtcggaacatggatgctgacatctatgaacagcagtcctcgcagcaaaaagctcaggctgaagttccgcgatgttaagtgtatcccggacgatgatgaggactcatatgaaatctttgaaccgcccgagagtactgttatggccacacgaaaaatgcacgaccggttagagccagaggatgaggagtcagacgctgactatgactaccagaatcggctggcagccgcactggggatcagatccttccgcaatagcagcctgaatcaggaagaggaagagtttaaccttacagctttagccttggagaacgggaccgagttcgtatcgtctaatacagacattatcgtgggcagtaactactcttccccaagcaacatctctaaatttaccgtcaacaacctcgcggaacctcagaaagcaccttcacatcagcaagcaactacagctgggagccctctgagacacctgattggtaaaaactctgtccttaacagcagcactgctgagcacagttccccatactccgaggatccgatagaagaccctttgcagccagacgtcacgggtatccggctactgtctctgggggcaggagaatttaagtctcaggagcacgcaaagcataaggggcctaaggttgagagagatcaagcagcaaagcacaggttcagttggatgaagcttctcgcacataaagtggggcggcacctcagccaggatacaggatccccctctggcatgaggccctgggaagatctgcctagccaggacaccgggtcgccgtcacgtatgaggccttggaaagatcctccctctgacctgctgctgttgaagcagtcaaattcaagcaagatactggtaggcaggtggcatctggcctctgagaagggcagctatgaaattatccaggacaccgacgaagacaccgctgtgaataattggctcatctctccgcagaatgcctccagggcttggggagagtctacccccctcgcgaacaagccgggcaaacagtccggtcaccctaagtttccgcgcgttaggcataagtcactgcaggtcagacaggatggaggaaaatcacggctgaaaaagtcacagttcctgatcaaaacccggaagaagaagaaagaaaaacatacgcaccacgccccactcagtccgcgaacgtttcaccccctgaggtccgaggcctacaacactttctctgaaaggcggcttaagcacagtcttgtcctccacaaatcaaatgaaacaagcctcccgacagacctgaatcagacgctaccatccatggactttggctggatcgcgtcccttcctgatcacaatcagaattctagcaatgatactggccaggcctcttgcccacccggcctctaccaaaccgtacccccagaagaacactaccagacattcccaattcaggatcctgatcagatgcattctacttcagatccgtcacatcgatcgtcaagtccagagctctccgaaatgctggaatatgatagatctcacaagtccttcccaaccgacatcagccagatgtcgccaagcagtgagcacgaagtttggcaaactgtcatatcccctgatctgagccaggtcacactctctccagagttgagtcaaaccaacctcagccccgacctctcccataccacattgagccccgaactcatccagaggaatctgtcaccagccctcggccaaatgccaatctctcccgatctctcgcataccaccctaagtcccgacttgagccacacaaccttgagtctagaccttagccagactaacctgtcacccgaactctcacagaccaacctctctcccgcactgggacagatgcccctctcacccgacctttcccatactactctgagcctcgacttttcccagacgaatctctctccagagctgagccacatgacgcttagccctgaactgtcccagacaaatctgtctcccgctctggggcagatgcccatcagccctgatctgagccacacaacactctctctcgacttcagccaaacaaacctcagtcctgagctgagccagaccaaccttagtcccgcactggggcagatgccattaagccccgacccgtcccacacaacattaagcttggatctgagccaaaccaacctcagccctgagctcagtcagactaaccttagccccgacctctcagaaatgcctcttttcgcggacctctctcaaatacctctgaccccagatctggatcagatgaccctgtctccggacctaggtgaaacagacttgtcccccaattttggtcaaatgagtttaagccctgatctctcacaggttaccctgtcacctgacatctctgacactactctattacccgacttgtcccaaattagcccgccgcctgatctggaccaaatcttttatccttctgagagctcacagtctctgcttctccaggagtttaacgaatcattcccctaccccgaccttggccagatgccgtcaccatcctcacccaccctgaatgacaccttcctgtcaaaagaattcaaccccctggtgattgtggggctctctaaagacgggactgattacatcgaaattatccccaaggaggaggtgcagtcgtcagaggatgattatgcggagatcgactatgtcccttatgacgacccttataaaacggatgtccgtacaaacatcaactcttccagggatcctgacaatatcgctgcgtggtacctccggtctaataacggtaacagacgtaattactatattgccgcggaagagatttcttgggattacagcgagttcgtccaaagagagaccgatatcgaggacagtgatgatattcccgaggacaccacatataaaaaagtggtcttccgcaagtacctagactctacatttacaaagcgagaccccagaggggagtatgaagagcaccttggcatattaggcccaataatacgagctgaagtggatgacgtcatccaggtgagattcaagaacctggcatctaggccatattctttgcatgctcatggcttatcttacgaaaagagcagcgagggtaaaacctatgaagacgacagccctgaatggtttaaagaggacaatgccgtgcagcctaactcctcgtatacatacgtctggcacgctaccgagcggtcaggccccgaatcccccgggagtgcatgtcgcgcttgggcttactactccgctgtgaaccctgagaaggatattcatagtgggctgatcgggcctctccttatctgtcagaaaggcatcctccacaaggacagtaatatgcccatggatatgagagaattcgtcctactgtttatgacattcgacgagaagaagtcatggtactacgaaaagaaatctcggtccagctggagactgacttctagtgagatgaagaaaagccacgagtttcatgcaattaacgggatgatttactctctacccggcctaaaaatgtacgagcaggagtgggtgcgcctgcacctgctgaatattgggggctctcaggacattcatgtagtccacttccacgggcagactttgttagagaacggtaacaagcagcatcagctaggtgtctggcctctattgcccggctcatttaagactctcgagatgaaagcttcaaagcctgggtggtggctcctgaacactgaagtcggagagaaccagcgcgccgggatgcaaacgccctttctaataatggacagggactgtcggatgccaatggggctgtccaccggtattatttcggattcccagattaaggctagtgagtttctcggttattgggagcctcggcttgctagactgaacaacgggggcagctataatgcctggagtgtcgagaagctggctgctgaattcgcatccaagccatggattcaggtcgatatgcaaaaggaggtaattataactggaatacagactcagggagccaaacactacttgaaatcatgctacaccacggagttctacgtggcatactctagcaatcagatcaattggcagatctttaaagggaatagcaccaggaacgtgatgtacttcaacggcaactctgatgcgagcaccattaaggaaaatcaattcgatccccccatcgttgccaggtatatcagaatcagcccgacacgggcttataatcggcctaccttaagattggaactacagggctgcgaagtcaatggttgttctacgcccctcggtatggagaacggcaaaatcgagaataagcagatcacagcaagcagtttcaaaaaaagctggtggggtgactattgggaacccttcagagcgcgactgaacgcccagggtcgggtcaacgcatggcaggcaaaagccaataataataaacagtggctggagatagatctactaaaaataaagaaaataactgctattatcacccagggatgtaaatcactcagctccgagatgtacgtgaagtcatataccatacattactctgagcagggagttgagtggaagccgtataggcttaaatcctccatggtggacaaaatatttgagggaaatacgaacacgaagggacatgtgaaaaacttctttaacccgcccatcatctcccggttcatacgggtgattcccaaaacctggaaccagtctattgcccttcgcctagaattgttcggctgtgatatttac

SEQ ID NO: 2322 - DNA, 6672 bp, Artificial Sequence
  derived and/or modified sequence
atgtttccaggctgccctcggctctgggtgcttgtcgtgttaggtacctcgtgggttgggtggggatcccaaggcaccgaggccgcgcagctccggcagttttacgtggcggcacaaggaatttcctggagctaccgaccagagccgacaaacagtagcctgaatctatcagtaacatcttttaaaaaaattgtttaccgcgaatatgagccatattttaaaaaggaaaagcctcagagtaccatcagtgggctcctcggaccaactctttacgccgaggtcggcgatataataaaagtgcacttcaaaaacaaagcagacaagcccctgagtatccaccctcagggcatccgctattccaagctgtctgaaggagcctcataccttgaccacacatttcccgcagagaagatggacgatgcagttgcgcccgggagagagtacacctatgagtggagcatttctgaggactccgggcctactcatgacgaccccccctgtctcacacacatttattacagtcacgagaacctaattgaggacttcaacagtgggctgattggaccccttctgatttgcaagaaggggacactgacagagggaggaacacagaaaaccttcgataaacagattgtgctgctgtttgcagtgttcgatgagtccaagagttggagtcagtcatcaagtctgatgtacacagttaacgggtatgtaaacggcacaatgccagatattaccgtgtgtgcgcatgatcatattagttggcatctgcttggcatgtcgagtgggccagagctgttctctatccacttcaacgggcaggttcttgagcagaatcaccataaggttagcgctatcactcttgtctctgctaccagcacgactgccaacatgacagtgggccccgagggcaaatggattatcagcagtctcacccccaagcacctgcaggccggaatgcaagcctacattgacataaagaactgtcctaagaagactcgcaatctcaagaaaatcactcgggaacagcgccgccacatgaaaaggtgggaatatttcatagctgccgaggaagtgatttgggactatgcccccgtaattcccgcgaacatggacaaaaagtacaggtcacagcacttagataactttagtaaccagatcggtaagcactataaaaaggtgatgtacacacagtatgaggatgaatctttcaccaaacataccgtgaacccaaacatgaaggaagatggaattctcgggccgattataagggcccaggttcgggacaccctgaagattgtgttcaaaaatatggctagtcgcccatatagcatttaccctcacggggtgacattttcaccgtacgaggatgaagtaaactcaagtttcaccagcggcagaaacaacaccatgattcgggccgtccaacccggcgaaacctacacgtataagtggaatatccttgagtttgacgaaccaaccgagaatgacgcacagtgtttgacccgaccatattacagcgatgtggatattatgcgcgacatcgccagcggcttaattggccttttgttgatttgtaaatccagaagtctggatagacgtgggatacagagagccgccgatatagagcagcaagccgtgtttgccgtttttgatgagaataagtcctggtacctggaggacaacataaataagttttgtgagaacccagatgaggtaaaaagggacgatccaaaattctacgagtcaaatataatgtctactatcaatgggtacgtaccagagagcatcaccactcttggcttttgttttgatgacactgtgcaatggcacttctgctccgttggaactcaaaatgagatactcaccattcacttcaccggacactccttcatctacggcaagcggcacgaagatactctaactctgtttcctatgagaggagagagtgtcaccgtcacgatggataacgttgggacctggatgttgacttctatgaattccagtcctaggtcgaagaagttacggttgaagtttcgggatgtgaagtgtatccccgatgatgatgaggacagttatgaaattttcgagccccctgaaagcacagtgatggccactaggaagatgcacgatagactagagccagaggacgaagaaagcgatgcagactacgactatcaaaaccgactcgctgccgccttaggtatccgcagcttcaggaacagttcactcaatcaggaggaggaagagtttaacctcaccgccctcgcccttgagaatggaaccgagtttgtgtcctccaacacagatatcattgtcggcagcaattatagctctcccagtaacatcagcaagtttaccgttaataatttggcagagccacagaaagccccttcacatcaacaagctaccacagccggttctcctctcaggcatctcattggtaaaaacagcgtgttaaactcttctaccgccgagcacagctccccatattctgaggatccaatcgaagacccattacagccagatgtaacaggcatacggctgctgtcattgggcgcaggggaattcaagagccaagaacacgctaagcacaaggggcctaaagtcgagagagatcaggcagccaagcatagattcagctggatgaagctgttggctcataaagtgggcaggcacttatcccaggacacgggcagtccttctggaatgcgcccatgggaagaccttccttcccaggatactggctctccgtcccgaatgcgcccatggaaagatcctcccagcgatttgcttctgctgaaacaatccaattcgtccaagattctggttggacgctggcatctggcttccgagaaaggaagttatgagataatacaggatacagacgaagacacagcggtaaacaactggcttatcagcccgcagaatgcctctcgcgcgtggggcgagtcaacacctctggcgaataagcccggaaaacaatctggtcatccaaagtttcccagggtgagacataaaagtctgcaggtgcggcaagacggaggaaagagccgtctgaaaaaatcgcagtttttaatcaaaactaggaaaaaaaaaaaggagaaacatacgcatcatgcacctctttcccctaggaccttccatccgcttaggtctgaggcctataacacattttccgagagacggctgaagcactccttagtcctacacaagtcgaacgagacgtccctgccaacggatcttaaccagacgctccctagtatggacttcggatggatcgcgtctctgcccgaccacaatcaaaattcctcaaatgatacaggccaggcttcctgccctccgggtctttatcagaccgtaccccccgaagaacattatcagactttccccatccaggatcccgaccagatgcactcaacttcagatccctcacacaggtcatcgagcccggagctctctgagatgttagagtatgataggagtcacaagagttttcccaccgacatctctcaaatgtctccttccagtgaacatgaggtttggcagaccgtcattagccctgacttaagccaggtgaccctctcaccggagctcagccagacaaacctgtctcccgacctctcgcacacaacactatcacctgagctgatacaacggaacctgtcaccagctctgggccaaatgcccatcagtcccgacctctcacataccacactctcccctgacttaagccacaccacattgtctttggacctctctcaaactaatttgagtcctgaactctctcagacgaatctttccccggctttaggccagatgcccttatcaccagacctgtcccacacaacactcagtctggacttttctcagacaaatctgtccccggagttgtcccatatgactctgtctcccgaactaagccagacaaatctgtcgcctgccttgggacagatgcccatatcaccagatctatctcacactacactatcattggacttctctcagaccaacctgtcccccgagctttctcagacgaacctgagtccagcgctgggacagatgcctctgtcaccagacccatcacacacaacgttgagccttgacttgtcacagaccaatctgtctcccgaactaagtcaaactaatctctcacccgacttgtctgagatgcctctatttgcagacctgtctcagattcctctcacaccagatctggaccaaatgacattgtcacctgatttaggagaaacggaccttagcccaaactttgggcagatgtccttatccccggacctcagccaggtcaccttgtccccagacatatctgacaccacgctgttgccagacctgagtcaaatcagtccccctcccgacttagatcagatcttttaccccagtgaaagctcacagagcctgctcctccaggagtttaatgagagtttcccctacccagatctcggacagatgccatcccccagctcacctacacttaacgacacatttctgtccaaggagttcaatcctcttgtgatagtggggctatcaaaggatggcactgattacattgaaatcattcctaaggaagaggttcagagttcagaggacgactatgctgagattgactacgtgccctatgacgatccttacaaaacagacgtccgcacgaacattaactccagcagagacccagacaacatcgcagcctggtaccttagatccaacaatgggaaccgtaggaactactatattgcagccgaggaaattagctgggactattccgagtttgttcagagggagacagatatagaagattccgacgatattccagaggacacaacctacaaaaaggtggtcttccgtaagtacctcgactctacctttacaaaacgtgacccacggggtgagtacgaagaacacctgggaatcctgggcccaatcattcgcgcagaagtggacgacgtcatacaagttagattcaagaatttggcctcaaggccttattcgctgcatgctcatggactttcctatgagaagagcagcgaggggaaaacatatgaagacgattcacccgagtggtttaaggaggacaacgccgttcagcctaattccagttatacatatgtgtggcacgccaccgaacggagcggaccggagtcccccggctccgcatgccgagcgtgggcatattattcggcagtcaaccccgagaaggacatacattccgggctcattggcccacttctgatctgccaaaagggcatattacataaggactctaatatgcccatggacatgagagagttcgtcctactgtttatgacttttgacgagaagaagtcttggtattacgaaaagaaaagtagaagctcctggcgcttgacatcgtccgagatgaaaaagtctcatgaatttcacgcgatcaacggcatgatctactctctgccggggctgaaaatgtatgagcaggagtgggtccgccttcacctgctgaatataggcgggtcccaagatatacacgtcgttcatttccatggacagaccctgctggaaaacgggaataagcaacaccagctcggggtttggccgttgttgcctggctccttcaagactctggaaatgaaggcaagcaagcccggctggtggctcctgaacactgaagtgggcgaaaatcaacgcgcagggatgcagacaccatttctcatcatggacagggattgtcgaatgcctatggggctgagcactggcattatctctgattcccaaatcaaagcctccgagttccttgggtactgggaaccacgcctggccaggcttaacaacgggggatcctacaacgcatggtctgtggagaagctggccgccgagttcgcctctaaaccgtggatacaagtggatatgcagaaagaggtgattatcacagggatccagactcaaggtgccaagcattacctgaaaagctgctatacaaccgagttctatgtcgcctattcgagcaaccagatcaactggcagatatttaaaggtaattccactaggaacgtgatgtacttcaacggtaactctgacgcttctacaataaaagaaaaccagtttgatcctcctattgttgcccggtacatccggatctcccccaccagggcctacaatcggccgactctgcggctcgagctgcagggatgcgaagtgaacggatgctccacacctttaggcatggagaacggaaagattgagaacaagcaaatcactgctagcagtttcaagaaatcgtggtggggggactattgggagccttttcgcgcccggctcaacgcccagggaagagtgaatgcatggcaggcaaaggcaaacaataacaagcagtggctggagatcgacctcttgaagataaagaagattactgcgataattactcagggctgtaaatctctctctagtgaaatgtatgttaaaagctatacaatccactacagtgaacagggtgtggagtggaaaccctaccgattgaagagctctatggttgacaaaatttttgagggcaacaccaacactaaaggacatgtgaaaaattttttcaacccccccatcatcagtaggtttattagggtaatccccaagacctggaatcaatctatagcacttcgactggaactctttggctgcgacatctac

SEQ ID NO: 2323 - DNA, 6672 bp, Artificial Sequence
  derived and/or modified sequence
atgtttccagggtgtccccgcctgtgggtccttgtcgttttagggacttcctgggtcggttggggctctcaggggaccgaagctgcccagcttagacagttctatgtcgccgctcagggcatctcttggagctaccgcccagagccaacaaatagctcactgaatctgtcagtaacaagtttcaaaaagatcgtttacagagagtatgaaccttactttaaaaaggagaaaccacagtccactatctcagggctgctaggccctaccctgtacgccgaggtgggagatatcattaaggtgcattttaagaataaagccgacaaacctcttagtatccatccacaaggaattagatatagtaagctaagtgaaggcgctagctacctggatcatacctttccggctgaaaaaatggacgacgccgtggcaccaggaagagagtacacatatgagtggagcatcagtgaggacagcggacccactcatgacgacccgccatgcctaacacacatttactattcacacgagaatctgatcgaggacttcaacagtggactgatagggccactcttgatctgcaagaaggggaccttaaccgagggcggcacgcagaagacgtttgacaagcagattgtgcttctgttcgcagtctttgacgagtcgaagagttggtcacagagtagtagtctgatgtatacagtgaacggctatgtgaatggcactatgcctgatatcacagtttgcgctcacgaccatatcagttggcacctactcggtatgagctcaggacctgagttgttcagtattcacttcaacggacaggtcctagagcaaaaccaccacaaggtgagtgcaatcaccctcgtgtccgcaaccagtacaaccgctaacatgacggtagggcccgaaggtaaatggattatcagtagcctgactcccaagcacctccaagccggtatgcaggcctacatagatatcaagaattgtcccaagaaaacccggaacctcaagaagatcacccgggaacagcggcgacacatgaagagatgggagtatttcatcgccgccgaggaggtcatttgggattatgccccagtaatccccgctaacatggacaaaaaatacagatctcagcatctggacaacttttctaaccagatcggcaagcactataagaaggttatgtacacccagtatgaagatgagagtttcaccaagcacacagtcaaccctaacatgaaggaggatggcattctggggcccatcatacgggcacaggtgcgggacaccctgaaaattgtcttcaaaaacatggccagtcgcccgtatagtatttacccacacggggtaactttcagcccatacgaagacgaggtgaacagctctttcacttcaggccgtaacaacacgatgatccgtgctgtgcagcccggcgagacttacacatacaagtggaatattctggagttcgatgaacccaccgaaaacgacgcgcagtgcttgactaggccctattattcggatgtggatatcatgagagatatcgcttcagggctcatcggcttgctcctcatatgtaagtcccgctcgctagatcggcgagggatacagcgggcagccgatatcgaacagcaggctgtgtttgctgtattcgatgaaaataagtcttggtatcttgaagataacattaacaaattttgtgagaaccccgatgaggtcaagcgggacgacccaaaattttacgagtctaatatcatgagcacgattaatgggtacgtgccggagtctatcacgactcttgggttctgttttgacgacacagtccaatggcacttttgtagtgtggggacccagaatgaaatcctgaccatccattttaccggacattccttcatctacgggaaacgccacgaggacacccttaccttgttcccaatgcggggcgagtccgtaaccgtgacgatggataatgtcggcacctggatgttgacaagcatgaactcatctcctagatccaaaaagctgagactaaagttcagagacgtgaaatgtatccctgacgatgatgaagactcttacgagatctttgaaccacccgaatctactgtgatggctactcggaagatgcacgataggttggaaccggaggatgaggaatccgacgccgactatgactaccaaaatagactggccgctgccctgggcataagatccttcaggaactcatctctgaatcaggaagaagaagagtttaatctgaccgcactggctctcgagaacggcaccgagttcgtttcttcgaatacagacattattgttggctctaactactcatccccttcaaatatcagcaagtttactgtgaataatctcgccgagcctcagaaggcgcctagccatcagcaggcgactaccgccggatctccactccgtcacctcatcggtaagaacagcgtcctcaacagctctaccgccgagcacagctccccttacagcgaagaccctatcgaagatccattgcagcccgatgtgactgggattcggctactgtctcttggcgccggcgagtttaaatctcaggagcacgccaaacacaaaggccctaaggtggagcgggatcaggccgccaagcataggttttcctggatgaagctcttagcccataaggtggggcggcacttatcccaggacaccgggtccccgtcggggatgcggccttgggaggacctcccatcacaggacacaggcagtccttcacggatgcgaccttggaaagatcccccctcagatttgctgctgttgaaacagtctaattcctcaaagatccttgttggacgttggcacctcgcaagcgaaaagggttcatatgagattatacaggacacggatgaggacacagctgtcaataattggctgatatccccccagaacgcatctagagcatggggggaatcaacaccgctggccaataagccgggcaagcagtcaggccatccaaaatttcccagggtgcgacataaatctctgcaagtcagacaggacggagggaaatccagactgaagaaatcccagtttctgattaagactaggaaaaagaagaaagagaagcacacccatcacgcgccactgagtccacgaaccttccatcccctccgctcagaggcttataataccttttccgagaggcgactgaagcacagccttgttctgcacaaaagcaacgaaacatcactgcctaccgacctgaatcaaacgctccctagcatggattttggttggatcgccagtttgccggatcataaccagaacagcagcaatgatacgggccaggcatcatgcccccctggattgtatcagaccgtgccccctgaggagcactaccagacctttcccatccaggaccccgaccagatgcattcaacttccgatccttcacacagaagttccagcccggagttgagcgaaatgcttgagtacgacagatctcataaaagctttcctactgacattagccagatgtctccctcgtccgaacatgaggtttggcagactgtaatcagtcctgacctttcccaggtaaccttgtctcctgaactgtcccagacgaacctgtccccagacctgtcacataccacattgagcccagagctgattcagcgaaatctgtcgccggctctagggcagatgccaatttcgccagatctgagtcataccacattatcccccgatcttagccacaccaccctaagcctcgatctctcccagactaacctatcccccgagctcagtcagaccaacttatcgcctgcacttgggcagatgcctctgagccctgatctcagccacaccactctgtcactcgacttctctcaaaccaatctgagtcctgagctgtctcatatgaccttatcccctgagctgtcccaaacaaatctgtctcctgccctggggcaaatgccgatatcacctgacttgagccacaccactctgagtcttgacttttcccagactaatctgtctcccgagctctcccaaaccaatctctcccccgctctcgggcagatgccactcagccctgatccctctcatactaccttgagtctggatctctcccagacaaatttgagcccagagctatcgcagaccaacctctcacctgacctgtcagaaatgcccttgtttgcggacctcagccagatccccttaacacccgacctcgatcagatgacactttcccccgatctgggagaaaccgacctgtctcccaactttggccagatgagcctgtcccccgatctctcgcaagtaaccctctcacccgacatatctgatactaccctcctgccagatttatctcagatttcacccccacccgacctggatcagattttttacccctctgagtcatcccagtctttgctgctacaggaattcaatgagtcctttccgtacccagacttggggcagatgccaagtccttctagcccgacactgaatgataccttcctgtcgaaagaattcaaccctctcgttatagtaggtttgtctaaagacggcacagactacatcgagattatcccaaaggaagaggtccaatcttctgaggacgattatgcagagatcgactatgtcccttacgacgacccctacaagaccgatgtgagaacaaacattaactctagtcgtgaccctgacaacattgctgcatggtacctcaggtccaacaatgggaatcggagaaattactatattgcggcagaagagatctcctgggactatagtgagttcgtgcagcgggaaacagacatcgaagactccgacgacatccccgaagacactacatacaagaaagtcgtgttcagaaagtatctggatagtactttcactaagagggaccctaggggagagtacgaggaacacctcggaatcctgggcccaatcatccgggctgaggtggatgatgtgatccaagttcggttcaagaacctcgcatcccgaccgtactcacttcatgctcacggtttgtcatatgaaaaatccagtgaaggaaaaacctatgaagacgacagcccagagtggtttaaggaagataacgccgtgcagcccaattccagctatacctacgtctggcacgcgactgagcgaagtggccctgagtcaccgggatccgcctgccgtgcatgggcatactactcagcagtgaatcccgaaaaggacattcactcgggcttgataggacctctccttatctgtcagaaagggatcctgcataaggattctaatatgcctatggatatgcgagaatttgttctgctgtttatgacatttgatgaaaagaagagttggtactatgagaaaaaaagcagatcttcctggaggctcacctcaagcgagatgaagaaatctcatgagttccatgcaattaatggtatgatctacagtcttcctggcttgaagatgtacgaacaggagtgggtgagactccatctgctgaacatcggtggatcccaggatatccacgtagtgcacttccacgggcagacccttctggagaatggcaataaacagcaccagctgggcgtgtggccccttttaccgggcagttttaagactcttgagatgaaggcaagcaaaccgggctggtggctgctgaacaccgaggttggagaaaatcagcgagcaggaatgcaaacaccatttctgattatggatcgcgactgccggatgccgatggggctctccacagggataatcagcgactcacagattaaagccagcgaatttctgggctattgggagcctaggctggcccggttgaacaatggcggaagttataatgcttggtcagtggagaagctcgcagccgagtttgcctcaaaaccatggatccaggtcgatatgcaaaaagaggtgataatcactggcatccagacccaaggtgccaaacactacctcaagagctgttatacaaccgagttttacgttgcatattctagcaatcagatcaattggcagatctttaagggaaactctaccagaaacgtgatgtacttcaacggcaattccgacgccagtacgatcaaggagaaccagttcgacccccctatcgtggcccgctatatcaggatctcacctactcgagcgtataaccgtcctaccctgaggctcgagctgcaggggtgtgaggtcaatgggtgcagtacccctttaggcatggagaacggcaagattgagaacaaacagatcactgccagtagcttcaaaaagtcctggtggggagattattgggagcccttccgggcacgactgaatgcacaggggcgggtaaacgcctggcaggccaaagccaacaataataagcaatggctggagattgacttactgaagataaagaaaattacggcgattatcacccaaggatgcaagagcctgtcaagcgagatgtatgtgaagtcctacacaattcattatagcgagcagggcgtcgagtggaaaccctatcgtctcaagagctcgatggtagataagatattcgagggcaacacgaacactaagggccacgtgaagaatttctttaacccaccaatcataagtagattcataagggtcattcctaagacttggaaccagtcgatcgcattgcgcctcgaattgtttggctgtgacatctac

SEQ ID NO: 2324 - DNA, 6672 bp, Artificial Sequence
  derived and/or modified sequence
atgttcccaggttgtccacggttgtgggtgttggtcgttcttggcacatcctgggtagggtggggtagccaggggacagaggctgctcagcttagacagttctatgtcgccgctcagggcatctcttggagttaccgcccagagccaaccaattcttctctgaatctgtcagtgacgtcttttaagaagattgtctacagggaatacgagccctattttaagaaggagaagccacaaagcacaatcagtgggctccttgggcccactctttacgcagaagttggcgatatcatcaaagtgcactttaagaataaggcagacaagccattaagcatacatccgcagggcattcggtactccaaactgtctgagggagcaagttacctagatcacacctttcctgctgaaaaaatggacgatgccgttgctcccggacgggagtatacctacgagtggagcatttcagaagattcagggccaacccatgacgaccccccttgccttacccatatatactacagccatgagaatcttatcgaggattttaatagcgggctgatcggacctctgctgatatgtaagaaaggcaccctgacagaaggcggaacccagaaaacttttgataaacagatcgtgctgttgtttgccgttttcgacgagtccaaatcttggtcccagagctcatctttaatgtatacggtgaatggatacgtcaacggtactatgcccgatattaccgtttgcgcgcatgaccacatttcatggcacttgctgggaatgagcagtgggcccgagctattttctatccacttcaacggccaggttctggaacagaaccaccacaaggtcagcgcgatcacactggtctctgccacgagcactactgctaacatgactgtcggccccgaagggaaatggatcattagcagtctgacacctaaacacctgcaggcaggaatgcaggcttatatcgacattaagaattgccctaagaagactagaaatctcaagaagattactcgtgagcagaggagacatatgaaaaggtgggaatactttattgcagccgaagaggtgatctgggactacgcgcctgtgattcccgccaacatggataagaagtatcggtcacagcacctagataacttttccaaccaaatcggaaaacattataagaaggttatgtacacccagtatgaggacgaatcattcactaagcacaccgtcaatccaaacatgaaagaggatggaatacttggaccgatcattcgcgcccaggtccgtgatactctgaaaatcgtttttaaaaatatggcgtcacggccttacagcatctacccccacggcgtgacattttccccctatgaggacgaggtgaatagctccttcaccagcggtcgcaacaacaccatgatccgggcggtgcagcctggcgagacatatacatataagtggaatatactggagtttgatgagcctaccgagaacgatgcccaatgccttactcggccttactactctgacgtggacatcatgcgcgacatagcctcgggcttaattggcctgttgctcatatgtaagagccgctctctggatcgccgcggtatccagcgggcggccgacatcgagcagcaggctgtttttgctgtctttgatgagaacaagtcatggtacctcgaagacaacattaacaagttctgtgagaaccccgacgaagtcaagagggatgatccaaagttttacgagtctaacatcatgtcaacaattaacggctatgtgcctgaatccataacaacgctgggtttctgtttcgacgatactgtgcagtggcacttttgcagcgttgggactcagaacgagattctgacaattcatttcaccgggcacagcttcatttatggtaaacgccatgaggatactctaactcttttcccaatgcgaggagagagtgtaacagtgactatggataacgtggggacctggatgctcacttctatgaacagtagtccccgaagcaagaaactgcggttgaagttccgggacgtgaagtgtatccctgacgacgatgaagatagctacgagatattcgaaccacctgagtcgaccgtgatggctaccagaaagatgcatgaccggctggagcccgaagacgaggaatccgatgctgattatgactatcagaaccggcttgcggccgcactgggtatccgcagtttcagaaactcttcacttaaccaggaagaagaggagttcaacctgacggctttggccctagagaacggcacagagttcgtatctagcaatacggacataatcgttggatccaactactcatcaccctccaacattagcaagtttactgtcaataacttggcagaaccacaaaaagccccctctcaccagcaggccactacagccgggtccccgctccgtcatctcatcggcaagaactctgtgctgaactccagcaccgccgagcacagcagtccttattcagaggatcccatcgaggacccactccaacctgatgtcacagggattaggttactgagcctaggcgctggggagttcaagtcgcaagagcacgccaaacacaagggccctaaagtggagcgagaccaggcggctaaacatcggtttagttggatgaaacttttagcccataaagttggcagacaccttagccaggatacagggtctccttctggcatgcgtccatgggaagacttgccatcccaggacacggggtccccatcgcggatgaggccatggaaggaccccccctcggatctcctgctgctcaagcagtctaactccagcaagattttggtgggcaggtggcatctggcctccgaaaagggttcatacgagatcatacaggacactgatgaggatacggccgtgaataactggctcatttcaccacaaaatgcaagcagggcatggggcgagagtacaccactcgcaaacaaacctggtaagcagagcggccatcccaagttccccagggtgcggcacaagtccctccaggttaggcaggacggaggaaagagtcgacttaaaaagtcccagttcttgataaagactcgtaaaaagaaaaaggaaaaacacacccatcatgcacccctgtctcctaggaccttccaccccctgagatcagaagcctataataccttttccgagagacggttgaagcatagccttgtcctgcacaagtcaaacgaaacatctcttcccacagatctaaaccagaccctgccaagtatggattttggatggatcgcttctctacccgatcataaccaaaactcctcgaatgatacgggtcaggcttcctgtcctccaggactgtatcagacggtcccaccagaggagcattaccaaacctttccaatacaggacccagaccagatgcacagcaccagcgacccttcacatcgtagcagttcaccggagctttcggaaatgctcgaatatgatcggtctcacaagtcattcccaactgacatctctcagatgtccccctcttcagagcacgaggtgtggcagaccgtgatctcaccagacctgtcccaggttacgctgagtccagagctgtcgcagactaatctatcaccagacctttctcataccactttgagccccgagctcatccagaggaacttatcaccagctttgggccagatgcctatcagtcctgacctttcgcacacaactctgtcaccagatctctctcacactactctgagccttgacctttcccagaccaatttaagccctgagttgtcccagaccaacctgagtcctgcgcttggtcaaatgccactgagccctgatttgagccatacaactctgtcactggacttctcacagaccaacctcagccctgaactctcacatatgaccttgagcccagagttgtcccaaacaaacctctcacccgccctcggccagatgccaatctcccctgatctgtcacacaccactctgtcactagactttagtcaaacaaatctttcacctgagctatcccagaccaatctgtccccagcactggggcaaatgcctttatcgcccgatccttcccatacaaccttgtcccttgatctgagccagaccaatctgtctccagagttatcacagactaatttgagtccagacctatccgagatgcccctattcgcggatttgtcccagatcccccttactcccgatttggatcagatgactctgagtcctgacctgggcgagaccgatctgtctcccaacttcgggcagatgtctctgtcaccggaccttagtcaggttactctgagccccgatatctcagatacaacactattgcccgacctaagccagatcagcccccccccagacttggatcaaatcttttacccatctgagtcctcccagagcctcttgctccaggaatttaatgagagctttccgtatcctgatttaggccagatgccttcgccctcaagcccgaccctgaacgacactttcctgagcaaggagttcaatcccctcgtgattgtgggactttcgaaggacggcacagattacattgaaatcattcccaaggaagaagtacagtcatctgaagatgactacgcagaaattgactacgtgccatacgacgacccgtataaaacagatgtgcgcaccaatatcaacagtagtcgtgatcctgacaatattgccgcctggtacctgagaagcaataacggtaaccgccgcaattactacatcgcggctgaagaaatctcttgggattattcggagtttgtgcagagagagactgacattgaggatagtgatgacattcccgaagacacaacctataagaaagtagtgtttcgaaaatacctagattcgaccttcacgaaacgagaccctagaggcgagtacgaggagcatttgggaatcctcggccctatcatcagggctgaggtggatgacgtaatccaggtacggtttaaaaacctggccagccggccgtacagcctgcacgcccacggactgtcctatgaaaagagttccgaaggaaaaacttacgaggacgacagtccagagtggttcaaagaagacaacgctgttcagcctaactcctcttatacctacgtttggcacgctacagagcggtccggccccgagtctccagggtcagcctgtcgggcctgggcatattactctgccgtaaatccagaaaaagacatacatagcggcctgatcggcccactgttgatctgtcagaagggcatcctccataaagattccaatatgcctatggacatgcgcgagtttgtgctcctgttcatgacctttgacgaaaaaaagtcttggtattatgagaaaaaatctcggtcctcatggagacttacctcaagcgagatgaagaagagccatgaattccatgccattaacgggatgatctatagccttcctggtctgaagatgtatgagcaagaatgggtccggctgcacctgcttaatatcggtgggagccaagacattcacgtggtccatttccacggacagactctcctggagaacggcaacaagcagcatcagttgggggtctggccgttgttaccggggtcttttaagactctagaaatgaaggcctcgaagcctggctggtggctgctgaacactgaggtgggtgagaaccaacgcgccggcatgcaaacgcctttcctgatcatggatcgcgactgccggatgcctatgggcctctcgacaggaattatcagtgattcacaaatcaaggccagtgagtttttggggtattgggagccccgtctggcccggttgaacaacggcgggagctacaatgcatggtctgttgaaaaactggccgccgagttcgccagcaagccatggatccaagtggatatgcagaaagaagtgattattacaggaattcaaacccagggcgcaaagcactaccttaagtcctgttacacaacagagttctacgtcgcctactcatccaaccagataaactggcagatcttcaagggtaactctacgcgtaatgtaatgtattttaatgggaatagtgacgctagcaccatcaaagagaatcagtttgatccaccaattgttgcccgatacatacgcatcagcccaaccagggcatacaatagacccacactgaggttagaacttcagggctgtgaggtgaacggctgctcaactcctcttgggatggaaaacgggaagatcgagaacaagcagattacagcgagcagctttaaaaagtcatggtggggagattactgggaaccattcagagcgcggctcaatgcccagggaagggtaaacgcatggcaagcaaaagctaataacaataagcagtggctcgagatcgacctgttgaagattaagaagatcacggctatcataacacagggttgtaaatcactcagcagtgaaatgtacgttaaatcatacacgatccactattccgaacagggagtggaatggaagccttaccgccttaagagtagcatggtagataagatcttcgagggcaatacgaacaccaaaggccatgtgaaaaacttttttaaccccccaatcatatcacggttcatcagagtgattcctaaaacatggaaccaatccattgccctccggttggagttattcggctgcgatatctac

SEQ ID NO: 2325 - DNA, 6672 bp, Artificial Sequence
  derived and/or modified sequence
atgtttcctggatgtcctcgcctgtgggttcttgtcgtactaggcacttcatgggtgggttggggatctcagggtacagaagccgctcagctgcggcagttttacgtggccgcacaaggaataagctggtcctaccggcctgaaccgacaaacagctctttgaacctgagcgtgacctcattcaagaagattgtgtatcgtgaatacgaaccctacttcaagaaggagaagcctcagtccacaatttccggcctgctaggcccaactctttatgccgaagtgggcgacataattaaggtccattttaagaacaaagccgataaacctttgtcgattcatcctcaggggattagatatagtaaactatctgagggcgcttcttatctcgatcatacatttcccgctgaaaagatggacgacgccgtcgcccccggcagagagtatacttacgaatggagtatcagcgaggattctgggccaacacacgacgatccgccatgtctgactcatatttattatagtcatgagaatctgatagaagactttaatagcggccttattggacctttgttaatctgtaagaagggcacactgaccgagggcggaacgcagaaaacctttgataaacagattgtgttgctgtttgccgtctttgacgagagtaaatcctggtcccagtcaagcagcttaatgtacaccgtcaacggctatgtgaatgggacgatgcccgacatcaccgtgtgcgcccatgatcatatctcgtggcacttattgggcatgtcctccggacctgaactgttttcaatccactttaatgggcaggtgctagagcagaatcatcacaaggtatcagccatcacgttggtgtcggccacctctaccactgctaacatgacagtgggccccgaggggaagtggataatatccagcttaacgcccaaacatcttcaagccggcatgcaggcctacatcgacatcaagaactgcccaaagaaaacgcggaatctgaaaaaaatcaccagagagcagcgacgccacatgaagaggtgggagtatttcatcgccgcagaggaagttatttgggattatgccccagtgattcccgccaatatggataagaagtatcggtcacaacacctcgataacttctccaaccagattggcaaacattacaaaaaggttatgtacacacagtatgaagacgagtctttcactaagcacacggtgaaccccaacatgaaggaggatggcatcctggggccaatcatcagagcccaagtgcgggatacattaaaaatagtgtttaagaatatggcctctagaccatattcgatttacccccacggcgtgaccttctccccctacgaggacgaagtaaattcctcttttactagtgggcgcaacaatacaatgattagggctgtgcagcccggtgagacatatacatacaagtggaacatcctggagtttgacgaacctaccgagaacgatgcccagtgcctgactagaccttactactctgatgtggatatcatgcgggatattgcctccggactgattggactgctactcatttgcaagtcccggtcactggaccggaggggtatccagcgagccgccgatattgaacaacaggccgtttttgctgtctttgacgaaaataagagctggtatttggaagataacatcaataagttttgtgagaacccagatgaagtaaagcgggacgaccccaagttctatgagtccaacatcatgtcaaccattaatggatacgtgccagaaagcatcacaaccttaggtttctgcttcgatgacactgtgcagtggcatttctgctcagttggtactcaaaatgaaatcctgaccattcattttactggtcactccttcatctatgggaaaagacatgaagatacattgaccctctttcctatgcgcggcgagtccgtgactgtgacaatggacaatgtagggacgtggatgctgaccagcatgaattcaagcccacgaagtaaaaagctgaggctcaaatttagagacgtcaaatgcatccccgatgacgatgaggacagttatgaaatttttgaaccgcccgaatccaccgtgatggcaacacggaagatgcacgataggcttgagccagaagacgaggaatccgatgcagattacgattaccagaatcggctcgcagccgccctcggaatccgaagcttcaggaactcctcactgaatcaagaggaggaggaatttaatctaacggccttggcacttgaaaatggcacagagtttgtatcctccaatacagacatcatcgtcggaagcaactacagctctccatcgaacattagtaagttcacggtaaacaacctggcagagccacagaaggcacctagtcaccagcaggccactacagccggctcacccctgaggcacctgatcggaaaaaactcagtgctgaattctagtaccgctgaacacagttcaccatactccgaagaccccatcgaggatcccctacagcccgacgtcacaggaatccgcctgttaagcctgggggctggggaatttaagagtcaggagcacgctaagcataaaggacctaaagtggagcgcgatcaagccgcaaaacaccggttctcttggatgaagctactggcccacaaagttggccgacacctgtcccaggacaccggcagcccaagtggcatgcgtccatgggaagatcttccgtctcaagataccggttccccatcgcggatgcgtccctggaaagacccaccttctgacttgctgctgctaaaacaaagtaactcctcaaagatactggtgggacgttggcacttagcctctgaaaaaggatcatacgagataattcaggacactgatgaggataccgcggttaacaactggcttatatcccctcagaacgctagcagagcatggggcgagagtaccccgctggccaacaagcccggaaagcagtcaggccatcccaaattccccagggttagacacaaatctctgcaggtaagacaggacgggggaaagtctcggctgaaaaagtcccagtttcttattaagacacgcaagaaaaagaaagagaaacatacacaccacgcacctctgtcccccagaacctttcacccgctccggtccgaagcgtataacaccttcagcgagcggcgcctaaaacacagcctcgtcctccacaagtctaatgagactagtctgcctacggatttgaaccaaactctgccctctatggacttcggctggatcgccagcctgcctgatcataaccagaatagcagcaatgacactggacaagccagctgtcctccaggcttatatcagacagtgcctccggaagagcattatcagaccttcccaatccaggaccctgatcagatgcactctacttcggacccgtcacatcgtagctcaagtcctgagctctctgagatgctggaatacgatcgatcgcataagtcatttcccacagacatttcgcaaatgtctccctcctctgagcacgaggtttggcagacagtaatatcgcccgacctgagccaagtgaccctctctcccgaattatctcagacaaacctcagccccgacttatctcacactactttgtcaccagagctgattcagaggaacttgtctcctgcactcggccagatgcccatatccccagatctgagtcacacaacactgtcacccgatctgtctcacactaccctcagcttggatttgagccaaaccaacttgagtcccgagctaagtcagacgaatctatctcctgccctcgggcagatgccactgtcacccgacctttcccatactacgctgtctctggacttttcacagacaaacctgtcacccgagctcagccacatgactctgtcccctgagctgagtcagacaaatctgtcccctgcccttggccagatgccgatctctcctgatctctcacataccactttgagcctggacttcagccaaactaatctgagccctgagttgagtcagaccaacctgtcccccgccctcggacagatgcccctatcgcccgatcccagccacactaccctgagcctggatctcagtcagactaatctgtccccagagttaagtcagacgaacctttcaccggatctgtcagagatgccactgtttgctgatctctcccagatacccctgacacctgatctggatcaaatgaccctaagccccgacctaggggaaactgacctctcacccaactttggtcaaatgtctctgtctcctgacctgtctcaggtgacactttcccccgatatctctgatacgacactgctccctgacctcagtcagatttcccccccacccgatctagatcagatcttctacccaagtgagtcttcccaatccctgctattacaagaattcaacgaaagcttcccctatccggacctcggccagatgccctcacccagttctccaacactgaatgacacctttcttagcaaggaatttaatcctctggtgatcgtaggcctctcaaaggatggaacagattacatcgaaattatccccaaagaggaggtccagagcagcgaagacgactacgcagagattgactacgtaccatacgatgacccctataaaactgacgtgcggaccaacatcaattccagcagagatcccgacaacattgcggcctggtacctgagaagcaacaacgggaatagacgcaactattacattgccgcagaggagatcagttgggattactctgagttcgtgcagcgggagacggatatagaggactcagatgatatcccagaagacaccacatataaaaaagtcgtatttcgaaaatacctcgacagcacattcacaaagcgggacccccggggggaatatgaagagcacctagggatcctcggccctatcattcgtgcggaggtggacgatgtgattcaggtccgattcaaaaacctggcatcccgcccatattcactgcacgcccatggtctcagttacgagaagagctcagaaggcaagacttacgaagatgacagcccagagtggtttaaggaggacaacgctgtgcagcctaattcgagttatacttatgtttggcatgcgaccgagcgatctggaccagagtcacctggaagcgcgtgtagagcctgggcatattactccgcagtcaatccagaaaaggacatccactctggattaattggaccgttgctgatttgtcagaaaggaatactgcataaagactctaacatgcccatggacatgagagaattcgtgctcttatttatgaccttcgatgagaaaaaaagttggtattacgagaaaaagtccagaagctcctggcgcctgaccagcagtgagatgaaaaaatcccatgagtttcatgcaattaatggcatgatctacagtctgccggggcttaaaatgtacgaacaggagtgggtccgtctgcatcttttaaatatcggaggcagccaggatatccacgtcgtgcattttcacggacagactctcttggagaatggtaacaagcaacatcagctgggcgtgtggcccctgctgccaggctctttcaaaaccctcgaaatgaaagcaagtaagcctggctggtggctgctcaacactgaggtgggggagaaccagcgagctggaatgcagacacccttcctgattatggatcgggactgtcgcatgcccatgggtctgagcacaggtattatatcggactcccagataaaggccagtgagtttctggggtattgggagcccaggctggcccgactgaataacggcggatcctataatgcctggagtgttgagaagttggcggcggagttcgcaagtaaaccttggattcaggttgacatgcaaaaggaagtgatcatcaccggaattcagacccagggcgccaagcactatttgaaatcttgctacactacagagttctacgtcgcctattctagcaatcagatcaattggcagatctttaaaggaaacagcactcgaaatgtaatgtattttaacggcaatagtgatgccagtacaataaaggagaatcagtttgatcctcccatcgtggcgagatacatacgtatctcaccaacaagggcttacaaccgacctacactgcgcctggaactgcagggctgtgaagtgaatggatgcagcacccccctgggcatggagaacggaaagattgaaaacaaacagattactgcctctagttttaaaaaatcctggtggggcgactattgggaacctttcagagcaaggctgaacgcgcagggacgggtaaatgcctggcaggctaaggcaaacaacaataaacagtggctggaaattgacttattgaagatcaagaagatcacagccattatcacccaaggctgcaagagtctctcgtctgagatgtatgtgaagtcttatacaattcactattccgagcagggggtcgaatggaagccctatcggcttaaatcatcgatggttgacaaaatattcgaagggaacaccaatactaaagggcatgtcaagaatttcttcaatccacccataatcagccggttcataagagttatcccaaagacttggaaccaaagtatcgcactgcggctagagctcttcgggtgtgatatttac

SEQ ID NO: 2326 - DNA, 6672 bp, Artificial Sequence
  derived and/or modified sequence
atgtttccgggatgtccccgactctgggtgctagttgtactgggtaccagttgggttggttggggcagccagggcaccgaggccgctcaattgcgtcagttttacgttgcagcccaaggcataagctggtcgtacagacccgaaccaactaattccagcttgaatctgtcggtcacttcttttaaaaaaatcgtctatagagagtacgagccgtacttcaagaaggagaagccccagtctaccatatccggcctgctgggtccaacgttgtacgcggaggtgggcgacattataaaggtgcatttcaaaaataaggcagacaagccgctatccattcatccccagggcatccgatatagtaagctttccgagggggcgtcctacctggatcatacttttcccgctgagaaaatggatgatgccgttgcgccaggacgagagtatacctatgagtggtcgatatcagaggactcaggcccgacccacgatgacccgccatgcctgacccatatttactacagtcatgagaatttgattgaggattttaattcgggtcttatcggcccgctactaatctgtaagaagggtaccctaacggagggtggaacccaaaagacgttcgataagcagatcgtactgctgtttgccgtgttcgacgagtccaagtcttggagccagtctagctccttaatgtacacggtgaatggctatgttaacggtacaatgcccgacatcactgtgtgcgcgcatgaccacatcagctggcacttgctgggcatgtcatcaggcccggaattgttctctatccactttaatgggcaggtactagagcaaaatcaccacaaagtaagcgccatcaccctggttagtgcaacgtccaccactgccaacatgaccgtaggcccagaaggtaagtggataatctcgtcactgacgccgaagcacctacaggcagggatgcaagcctatatcgatattaagaattgtcccaagaagacaaggaacctaaaaaagatcacacgtgagcagcggcgacacatgaagcgctgggaatacttcatcgccgccgaggaggtgatctgggattacgccccggttataccagcaaacatggacaaaaagtatcgcagtcagcatctagacaatttttccaaccaaatcgggaagcattacaagaaggttatgtacacgcagtatgaagatgaatcctttactaagcacaccgtcaatccgaacatgaaggaagacggcattttgggtcccatcatcagggctcaagtgcgtgatacactcaagatcgttttcaaaaacatggcatcccgtccgtactccatctaccctcacggagtcacattcagtccgtatgaggacgaggtgaactcctctttcacgtcgggacgaaataatacaatgattcgggccgtgcaaccaggggagacatacacgtataagtggaacatcctggagtttgatgagcccacggagaatgatgcccagtgtcttacgcgaccttattattctgacgtcgatataatgcgtgatatcgcttccggtttgattggacttttgttgatctgcaaaagccgatccctggaccgtcggggaatccaacgcgccgctgatatcgaacagcaggctgtattcgcagtgttcgatgagaataagtcctggtatttggaggacaacattaataagttctgcgaaaaccccgacgaggtgaagcgcgatgacccgaagttttatgagtcaaatatcatgtctacgatcaacggctacgtacccgagagcattactacactgggattttgcttcgatgacacggtgcagtggcacttctgctcagtcggtacgcaaaatgagattttgactattcattttacgggccacagctttatttacgggaaacggcacgaagacaccctgacgcttttccccatgcggggcgagtcggtgacagtgactatggataacgtgggcacatggatgcttacgtccatgaacagttccccccgttccaaaaagctgcgcctaaagtttcgcgatgtcaaatgtatcccagatgatgatgaggatagttacgagatctttgagccaccagagtccaccgttatggccacccgaaagatgcatgatcgtctggagccggaggatgaggaaagtgatgccgattacgattatcagaaccgtctagcagcggccttgggaattcgttcgttccgtaactcatcactgaaccaagaggaagaagagttcaacttgacagcactcgctctagaaaacggcactgaattcgtatcttccaacactgacatcattgtgggttcgaactactcaagcccctcaaatattagtaagttcacggtgaataatctggcagagccgcaaaaggccccctcgcaccagcaggccactacagccggctcgccacttcgtcacctgataggaaaaaactcggtactaaactcgtcgacggccgagcactcctccccatattctgaagatcctatcgaagacccactgcaaccggatgttacgggcataaggctcctgtccctgggagctggtgagttcaagagccaagagcatgccaagcacaagggaccaaaagtggagcgggatcaagctgctaagcaccggtttagctggatgaagctcttggcccacaaagtgggaaggcacctgtcacaggacacgggctccccgagtggcatgcgtccatgggaggacttgccatcccaagataccggatcgccgtcgcggatgcgcccctggaaggatccacccagcgatttgttgttgctgaagcagagcaacagctcgaagattcttgtgggcaggtggcatttggcctctgagaagggctcctacgaaatcatccaggacacagatgaagacaccgctgttaacaactggctgatatctccgcagaatgcctcccgagcctggggtgagagcacccccttggccaacaagccaggaaagcaatccggccaccctaagtttccgcgtgtcaggcacaagtccctacaggtgcgtcaggatggagggaaatcccgcctcaagaagagtcaattcctcataaaaacacgcaagaagaaaaaggagaagcacacacatcacgccccgctgagtccccgcacttttcacccactaaggagtgaagcctacaataccttctctgagcgccgcttgaagcacagtttggtcctgcacaaatctaacgagacgtctctacccacggatctgaaccagaccttgccaagcatggacttcggctggattgcatccctgccggatcacaaccagaacagctccaacgatacgggacaagcctcatgtccccccgggctctaccagactgtgcccccggaagaacactatcagacgttccctatccaggatcccgatcaaatgcactcgacctcagatccctctcaccggtcgagctcccctgaattatctgagatgctggagtacgatcgctcacacaaaagcttcccaaccgacatcagccaaatgtccccaagcagcgagcacgaggtttggcaaacggtgatcagtcccgacctatcgcaggtgacactgagcccggagctgtcccaaaccaatttgtcaccagacctgagccacacaacactatcgcctgagctaatccagcgcaacttgtcccccgcactgggtcagatgcccatttcaccggacttgagccatacgacgctgtcccccgatttgtctcacacgactctgtcactggatctgagccagaccaatctatcgcccgaactgagccagaccaacctctccccagccctagggcagatgcctctgtcccccgatctgtcacataccacgctctccctcgatttttcccaaaccaacctatccccggaactgtcccacatgacgctgtcccccgaactcagtcagactaacctgtcccccgccctcggtcagatgcccatcagcccggatttaagtcataccacgctctctctggattttagccagacgaatctgagtccggaactcagccagacaaacctgtccccggctctcggtcagatgccgctgtcgcctgaccccagccacacgacactgtcgttggatttatcgcagaccaacctgtcgccggagctatcccagacgaacctgtcgcccgatctttccgagatgccgctgtttgctgacctgagccagatcccgttaaccccggaccttgaccagatgacgctgtcgcccgatctgggagagacggatctgagcccaaatttcggtcaaatgtcactcagtcccgatctgagccaagttaccctttcccccgatatcagcgacaccacgctgttgccggatctcagtcagatatccccgccaccggatctggaccaaatcttctacccgtccgaaagtagtcagagcttgttactgcaagagttcaacgagagctttccatatccagatctcggacagatgccatccccaagcagtccgaccttgaacgacacgttcctgtcaaaggagttcaatccgctcgtaatcgtgggtctgagcaaggatggcacagactacatcgagattatccccaaggaggaggtgcagtcctccgaggacgactatgccgagattgattacgtgccttacgacgatccctacaaaaccgatgtcaggacgaacataaactccagcagagaccccgacaatattgctgcctggtatttgcgctccaacaacggcaaccggcgaaactactatattgcagccgaggagatttcatgggattactccgaatttgtccaaagggagaccgacatcgaggactccgacgacattcccgaagatacgacctataagaaggtcgtgtttcggaagtatctggactcaacgttcaccaagcgggatcctcgtggagagtatgaggagcatcttggcatactgggaccgatcatccgggccgaggtcgacgatgtgatacaagttcgctttaaaaacctggcctcccgaccttactctctccacgcgcatggactgagttacgagaagtcctccgaaggtaagacgtacgaggatgattcccccgagtggttcaaagaggataatgctgtgcagccaaattcgagctatacctacgtgtggcacgcgacggagcgtagcggtcctgagagtcccggcagcgcttgccgagcgtgggcgtactactccgcagtgaacccggaaaaggatattcacagtggcttaattggcccgctccttatctgccaaaaaggtattctgcacaaggactccaacatgcctatggatatgcgtgagttcgttttgctttttatgaccttcgacgagaagaagtcttggtactacgagaaaaagtcccgctctagctggcgtctgacttctagtgaaatgaagaagtcccatgaattccacgccataaacggcatgatctatagccttcccggtttgaagatgtacgaacaggaatgggtgagactccatctgttgaacattggtggttcgcaggatatccatgtggttcacttccacggacaaacgctccttgaaaatggaaataagcagcaccaacttggagtgtggcccttgttgccaggctcgttcaagacccttgagatgaaagcgtcaaagcccggctggtggttactaaacacggaagtgggtgagaaccagcgcgccgggatgcagactcccttcctcatcatggatcgagactgccggatgcccatgggtctgtccaccggcattatctccgattctcaaattaaagcatccgaatttttgggttactgggagccccgcctggcccgactcaataatggaggatcatataacgcctggtcggtcgaaaagctggccgccgagttcgcctcaaaaccctggatacaggtggacatgcaaaaggaggtcataataaccggcatacagacgcagggcgccaagcattatctgaagagctgctacactactgagttttatgtcgcctactccagtaaccaaatcaactggcaaatattcaaaggcaattcgacccgcaatgtaatgtattttaacggtaactcggacgcctccacgatcaaggagaaccagtttgacccccccatagtggcccgctatattcgcatctcacccacccgggcgtacaataggccgactctgcgcctcgagctgcagggctgcgaggtgaatggttgcagtacaccgttaggcatggagaacggcaagatagagaataaacaaataactgccagtagtttcaagaagtcgtggtggggtgattattgggagccgttccgcgcccgactgaacgctcagggccgggtgaacgcgtggcaggccaaagccaataataacaaacagtggctggagatcgatctgctcaagattaagaagataactgccatcatcacccagggatgcaagtcgctttcaagcgagatgtacgtgaaaagctacacgatccactattcggaacaaggtgtggagtggaaaccctacaggcttaagtccagtatggtggacaaaatctttgagggcaacacgaacacgaagggtcacgtcaagaattttttcaatccgccgattatctcccgcttcatccgagtcattccaaagacatggaaccagagcattgcgctacggctggagttgttcggttgcgatatttac

SEQ ID NO: 2327 - DNA, 6672 bp, Artificial Sequence
  derived and/or modified sequence
atgttccccggatgtccacgactttgggtgctggttgtcctgggaaccagttgggtgggatggggctcacagggtacagaggccgcacagctcagacagttttatgtcgccgcccaggggatatcatggtcatacagaccagagccaaccaatagctcattgaacctgagcgtcacctcattcaagaagattgtgtatagggaatacgagccttactttaagaaagagaaacctcaatctaccatctcgggcttgctaggacccacgttgtatgcagaggtcggcgacatcataaaagtccatttcaaaaacaaggctgataagccgctgtcgatccatccacagggcattcgatatagtaagctgtcagagggcgcatcatatttggaccatacttttcccgcggagaaaatggatgacgcagtggcccctggacgggaatacacctacgaatggtctatctccgaagactctggccccacacacgacgaccccccatgcttaacccacatctactactcccacgaaaacctaatcgaggattttaactcaggcctcatcgggcctctcctgatttgtaaaaaggggacactgaccgaaggcgggactcagaagacttttgacaagcagatcgttctgctattcgccgtttttgacgagtccaagtcttggagccagagcagttcattgatgtatacagtgaacgggtacgttaacggcacaatgccggatatcactgtgtgcgcgcacgaccacatttcctggcatctgctcgggatgtccagcggtcccgagctttttagcatccacttcaatggacaggttcttgaacaaaaccaccacaaggtctcagccattaccctggtgtccgctacatcaaccactgcaaatatgacagtggggcccgaaggaaagtggatcatttcctcactaacaccgaagcatttacaagctgggatgcaggcctatatcgacataaagaactgtcccaaaaagaccaggaatctgaagaaaattactagggaacagagacggcacatgaaacgttgggagtatttcatcgccgcagaggaggttatctgggactacgctccagtgattcctgccaatatggataaaaaatacaggagccagcacctggataatttcagtaaccagattggcaagcattacaaaaaggtcatgtacacacaatatgaggacgagtctttcactaagcacaccgtgaatcccaatatgaaggaggatggaatcctgggacccatcatccgggcccaggtgcgcgacactttgaagattgtgtttaaaaacatggcgtccagaccgtacagcatttacccccacggcgtgacattctctccctacgaagacgaagtcaattctagctttaccagcggccgaaataataccatgattcgggctgtccagccaggcgaaacctacacatacaagtggaacattctcgaattcgatgaaccaactgagaacgatgcacaatgtctgactcgtccgtactactctgacgtggacatcatgcgggacatcgcctcaggcttgatcggattgctcctcatttgcaagtctagatcgctcgaccgacggggtattcagcgagctgccgacatcgagcagcaggccgtcttcgcggtctttgatgaaaataagagctggtatctcgaagataatattaacaaattttgtgagaatccggacgaggtgaaacgtgacgatccaaaattctatgagtccaatataatgagtaccatcaatggctacgtgccagagtctattaccactctgggcttttgttttgacgacactgtccaatggcacttctgcagcgtgggtactcagaacgagatactcaccatacacttcactggtcactcttttatctacggtaagagacacgaagacactctgaccttattccctatgaggggcgagtccgtaactgtcactatggataatgtcggaacatggatgctgacctccatgaattcgtccccaagaagtaagaagctacgtctgaaattccgagatgttaaatgcatcccagatgacgacgaggactcctacgagattttcgagccacctgaaagcaccgtcatggctacccgaaaaatgcacgataggctggagccagaagatgaagagagtgatgcggactacgattaccagaatagactggcggccgctctggggatccggagtttcagaaattcctctttaaaccaagaggaggaagagttcaacttgactgctctggcgctcgagaacggtactgagttcgtgtcaagtaacactgacataatcgttgggtcaaattactctagcccatcaaatatatctaaatttacagtcaataacttggcagaaccacagaaggccccttctcaccaacaggctacaactgcaggaagccctctccgccacttgattgggaaaaactcagtgctaaactccagtactgccgagcatagttcgccctactctgaggatccaatcgaggacccgttgcagccagacgtaacgggaatccgcctactcagcttgggtgctggcgagtttaagagtcaggagcacgccaaacacaagggcccaaaagtggaacgggatcaggcggcaaagcaccggttttcttggatgaaattactcgcccataaggtagggcggcacctgtcacaagatacaggctcccctagcggcatgagaccctgggaagatctgccatcccaagatacagggtccccatccaggatgcggccttggaaggatcccccttccgacttgttgttattgaagcagagtaacagctcaaaaatcttggttgggagatggcacctggcatctgagaagggaagttacgagatcatacaggataccgatgaggacaccgctgttaacaattggctcatctccccccaaaacgcctcacgggcctggggagagtctacaccactggctaataagcccggcaagcagagtggccatcctaagtttccgcgagtgcgtcacaagtctcttcaggtgcgacaggacggcgggaagtctcgccttaaaaaatcccagttcctgattaagacccggaagaaaaagaaagagaaacacacgcatcatgcacctctcagcccccggacttttcaccccctcaggagtgaggcctacaatacattcagtgagcgaaggctaaagcactcattagtgttacacaaatccaatgagaccagcctgccaactgatttgaatcagacacttccatccatggactttgggtggatcgcgagtctccctgaccataaccagaatagtagtaacgacacggggcaagcctcctgtcctccaggattgtaccagaccgttccacctgaggagcactatcaaacttttccaattcaggaccccgatcaaatgcattcaacctccgaccccagccataggagcagctctcctgaattgtcggagatgctagaatatgataggtcacacaagtccttccctacagatatctctcaaatgtccccctcatccgagcatgaggtatggcagactgtgatctcccctgacctcagccaggtgactctgagccctgagctctcgcaaaccaatctgtctcccgacttatcgcatacaacactgagcccagagctgattcagcgaaacttatcccctgcactgggccagatgccaatcagcccggatctgtcacataccacgctgagccccgatctatcacatacaacactttcactggatttgagccaaactaacttgagcccagagctatcccagacgaacctgtcacccgccctgggccagatgccactgagtcccgacctgagccacactacattatcgttagacttttcccagacgaacctgagccccgagctgtcacacatgactttgtcccctgaactgtcccaaacgaatctgagcccagcactgggtcagatgcctatctcgccagacttgtcacacaccacactttcactggacttctcacagacaaacctgtcacctgaactgtcgcaaaccaatctatcgcctgcacttggacagatgccgctttcaccagacccatcacacactactctgtcgcttgatctgtctcagaccaatctgagccctgaattaagccagacaaatctgagccctgacctgtcggaaatgccactatttgctgatttatcccagatccccctcacaccagacctggaccagatgacgctgtcacctgaccttggcgaaacagacctctcccctaactttggacagatgagcctgtcaccagacctttctcaagtcacactctcccccgatatatctgatactactctacttcccgacctatcccagatatcccctccaccggatctggaccagatattttacccctccgagagttctcagagtctgctgttgcaggagtttaatgagtcattcccctacccagatctcggacagatgccttctcccagcagccctacattgaacgacaccttcctgagtaaagagtttaatcctctagtaatcgtaggcctgtcaaaagatgggaccgactacatcgagattattccaaaggaggaggtgcagtcttcggaggacgactatgccgagattgactatgtgccctatgatgatccatataagacagatgtgcgtactaacataaatagcagtagagacccggataacattgccgcctggtacctcaggtctaataacgggaataggcgaaactactacatcgccgcagaagaaattagttgggattatagtgaattcgttcagcgtgaaaccgatatcgaggattctgacgatattccggaagacaccacctacaagaaggtggtgtttagaaagtacctggatagcactttcaccaagagagaccctagaggtgagtacgaggagcatctgggcatccttggacccatcatccgtgcggaagtggatgacgttatacaggtgaggttcaagaatctcgcatctagaccatactccctccatgctcatggcctctcttacgaaaagagtagcgaaggcaaaacctatgaggacgactcacctgagtggttcaaggaggataacgcggtgcagccgaacagctcatacacatacgtgtggcacgctacagaacggtctgggcccgagtcccccggctccgcctgtagagcatgggcttattactcggctgtgaatcccgaaaaggatatccacagcggactcataggcccgctgctaatttgtcagaaggggattctgcacaaggattccaatatgcctatggacatgagagagttcgtgttattatttatgacctttgacgaaaagaagagctggtactatgagaaaaagtcaagatctagctggcgcctgacgagcagcgaaatgaaaaaatcccacgagtttcatgctattaacgggatgatatatagcctcccaggtttaaaaatgtatgagcaggaatgggtgcgcctgcacctcttaaacattggtggctcacaagacattcacgtggttcactttcacgggcagacgctgttggagaatgggaacaaacagcaccaactcggagtgtggccccttctgccgggttcctttaaaactcttgagatgaaggccagcaaaccggggtggtggctcttgaacacggaagttggtgagaatcaacgagccggaatgcagactccattcctgatcatggatagggattgtcggatgcctatgggactctcgaccggtattatttccgatagccagatcaaagcttctgagttcctcggatactgggagcctcgactggctcgtctcaataacggagggtcatacaacgcgtggagcgtggagaagctagcagccgagtttgcctctaagccctggattcaggtggatatgcagaaagaggtgatcatcaccgggattcaaacgcagggggctaagcattatctgaaatcctgttataccaccgagttttacgttgcgtactccagtaatcaaattaattggcaaatcttcaagggcaactccacccggaacgtgatgtacttcaatggaaactctgatgcttcgactatcaaggagaaccagtttgaccccccaattgtggcaagatacatccgcatctcccccacgcgagcctataatcgtccaactttacgcttagagctgcagggctgtgaggtaaacggttgcagtacaccactggggatggaaaacggcaaaatcgagaacaagcagattactgctagcagttttaaaaaatcttggtggggcgattattgggagccctttcgggctaggctgaacgcacaggggcgggttaacgcatggcaggctaaggcaaataacaacaagcagtggttagagattgacttgttaaagataaaaaaaatcacggcgatcattacacaggggtgcaaaagtctttctagtgagatgtatgtaaaatcttataccatacattacagcgagcaaggggttgagtggaagccctatcggctgaaaagttccatggtcgataagatttttgaggggaacacgaacactaagggccacgttaagaatttctttaatccaccaatcatctccagattcataagagtcatccccaagacttggaatcagagcatagccctgaggctggaattgttcggatgtgatatttat

SEQ ID NO: 2328 - DNA, 6672 bp, Artificial Sequence
  derived and/or modified sequence
atgttccctggctgtcccagactttgggtgcttgtcgtgctcggaaccagctgggtgggctgggggtcccaggggacggaggccgcccaactgcgccagttctatgttgccgcacagggaatcagctggtcatatcgccctgagcccactaactcctccctgaatttaagcgtgacttctttcaagaagattgtttatcgagagtacgagccttacttcaaaaaggagaagccacaatctaccatttctggcctcttgggccccactctctacgctgaagttggagatataatcaaggtccactttaaaaacaaggccgacaagccactaagcatccacccgcagggcattcggtactctaagctcagcgagggagcctcatacctcgatcacactttccccgctgagaagatggacgatgccgttgccccgggtagggaatatacctacgaatggtccataagcgaggactctggacccacacatgatgaccctccatgcctgacgcacatttattactcccacgaaaatttaatcgaagatttcaatagcgggctcatcgggccgctgcttatttgtaagaaagggacactcaccgaaggcgggacacagaagacttttgacaaacaaattgtgctgttatttgcagtgtttgacgaaagcaaaagttggtcacagagtagctctttaatgtatacagtgaacgggtacgttaacggaaccatgcctgacataactgtctgtgcccacgaccacatctcttggcatctgctgggcatgtccagcgggcctgagctcttctcaatccatttcaacggacaggtgctggaacagaaccatcacaaggtaagcgctatcaccctggtgagcgcgacttccactaccgctaacatgacagtcggacccgaaggcaagtggattatctcctcgctgacgcctaaacatttgcaggctggcatgcaggcatacatcgatatcaaaaattgtcctaaaaagactagaaacctgaagaaaatcacacgcgagcaacgtcgacatatgaagcggtgggaatactttattgcggcagaggaagtcatatgggattatgcgcctgtgatccccgccaatatggataagaagtaccgctcacagcatctcgataactttagtaatcagatcggcaagcattacaagaaagtgatgtacacccagtatgaggacgaaagcttcacaaaacacaccgtcaacccaaatatgaaggaagatggtattttaggcccgattattcgggctcaggtccgagatacactaaagatagtgttcaaaaacatggcctctcgcccctatagtatctacccacatggagtgacattctcaccttacgaagatgaagtgaactcgagcttcactagcgggaggaataatactatgatcagggcggtgcagccaggcgaaacatatacctataagtggaacattctagagttcgatgaacctaccgagaatgatgcccaatgcctgaccaggccctactacagcgacgtggatatcatgagagacatcgctagtggcctcatcgggttattgctgatttgtaaatcgaggagcctcgacaggcgggggatccagcgggcggcggatattgagcaacaagccgtgtttgcagtatttgacgagaataaatcttggtacctcgaggataacattaataagttctgtgagaatcctgatgaagtaaaaagggatgacccaaaattttacgaatcgaacatcatgtcgacaattaacggctacgtcccagaaagcataactactttagggttttgcttcgacgacacagtgcagtggcacttctgctcagtcggaacccagaacgagatcctgacgattcacttcaccggccattcttttatctacggcaagcggcatgaagacacactgactctatttcctatgagaggtgagtctgtgacggtcaccatggacaatgtgggaacgtggatgcttactagtatgaactccagtccgaggagtaagaagctcaggcttaagtttagggatgttaaatgcattcccgacgacgatgaggatagctacgagatctttgaacccccggaaagcacagtaatggctacacgaaaaatgcacgaccgcctggaaccggaggacgaggaatcagacgctgattacgactaccagaaccgattggccgccgctctgggtatccgatcctttcgtaatagctctcttaatcaggaagaagaggagtttaatctaacagctcttgctctcgagaacggaacagagttcgtctcaagtaataccgatatcatcgtgggatcaaactactcatctccatctaatatttcaaagtttacagtgaacaatctggccgaacctcagaaagccccaagccaccaacaggccaccaccgcgggaagtcctttaagacacctgattggtaaaaatagcgtcctgaattctagtaccgcagaacatagctcgccatactccgaagaccccatcgaggacccactgcaacccgacgtaaccggcatccgtctgctttccctgggcgccggggagtttaaaagtcaggagcacgccaagcataaaggacccaaagttgagcgtgatcaagctgctaaacatcggttctcttggatgaaattactggcccacaaggttggtagacacctgtcacaggacaccggatccccaagtggcatgagaccatgggaagatctgcctagtcaggacaccgggtcccctagcagaatgcgaccttggaaggacccacctagcgatctgcttctgctcaagcagagtaattcctccaaaattctggtcggtagatggcatctcgcctcagagaagggctcctacgagataatccaggatacagatgaagatactgcggttaataactggctgatcagtccccagaacgcctctcgcgcatggggcgaatccacccccctggcaaataaacccggcaagcagagtggccatcctaagttccctcgcgtgcgccataagtcccttcaggtaagacaggacggaggtaagtccaggctgaaaaaatcccagtttctaatcaagacgcgtaagaagaaaaaggaaaaacacactcaccacgcgccccttagtccacgaaccttccatccgctgagatcagaggcttataataccttctccgagcgcagactcaagcacagcctggtgctgcataaaagtaatgagacctcattgcccacagacctcaaccagacactccccagcatggatttcgggtggatcgcatctttacctgatcataatcaaaattcctcgaacgacacgggacaagcatcatgccctccaggactgtaccagactgtgccacccgaagaacactaccagacgtttccaattcaggatcctgatcaaatgcatagcactagtgatcccagccaccgatcatccagtcccgagctatcagagatgctggaatacgaccggtcccataagagctttcccactgatatttcacagatgagcccttcatctgagcatgaggtgtggcagacagtgatctctcctgatttatcacaggtgacactgagccctgaacttagtcagacgaacctgtctcccgacctgagccacaccaccctgtcgccagaactcatccaacggaacttgagtccagcgctggggcagatgcctatatctccagacctgtcccacacaaccctatcgcctgatctcagccacacaacattgtccttagatctgagtcagaccaatctatcccctgaactcagtcaaacgaatctatcacctgctctcggacagatgcccctgagtcctgacctctcacataccaccctctctctggattttagccagacgaatctgtcccctgagctgtctcatatgacgctcagtcccgagctgtcccagaccaacttatcgcctgccctggggcagatgcctatcagtcccgacctgtcacacactaccctttcactggatttcagccaaaccaacctgagccctgaactttcccagacaaaccttagccctgctctcggacagatgcccctgtccccagaccctagtcatactactctgagcctcgatttgtcacagacgaatctgtcgccggaattaagccaaacaaatctgtctccagacctgtcagagatgccgctgttcgcagacctgagtcagatccctcttacacccgacctggatcagatgaccctgtcccccgacctcggagagaccgatctctcacccaacttcgggcagatgtcactgtcacccgacctgagccaggtcaccttaagccccgacatctcggacactaccctcctgccagacctaagtcaaataagtcccccacccgacctcgaccagattttttatccctccgagtcatcacaaagcctcttgcttcaggaattcaatgagagtttcccttatcccgaccttgggcagatgccctcccccagctcacccaccttgaatgacaccttcctctccaaagagtttaaccctctggtgattgtgggtctctctaaagatggcaccgattatattgagattatcccaaaggaggaggttcagagcagcgaagacgattacgcagagatcgactacgttccctacgacgacccttataagactgacgtgaggacaaatataaatagttcccgagacccggataatatcgctgcgtggtacctccggtctaataatgggaatcgcagaaactattatatagccgctgaagagataagttgggactactccgaatttgttcagagggaaactgacatcgaagacagcgatgatataccagaggacactacttataagaaggttgtttttcggaaatacttggactcaacatttaccaaaagagacccaagaggtgagtacgaagagcacctgggaattctgggaccgattatcagggccgaagtcgacgatgtaatccaggtgcgcttcaaaaatctggcctctcgcccatacagtctacacgcccacggtctctcgtacgagaaatcatcagaagggaaaacctatgaggatgacagtccggagtggttcaaagaggataacgcagtgcagcccaatagttcctatacttacgtttggcatgccacagagaggagcggccctgagtctccaggaagtgcatgccgcgcctgggcttattactctgcagttaatccagagaaggatatccacagcggtctgattggacctttgttaatctgtcaaaagggcatcttgcacaaggactctaatatgcctatggacatgagagagtttgtgttgctctttatgacctttgatgaaaaaaaaagttggtactacgaaaaaaagtcaagatccagctggaggctcacgtcaagcgaaatgaaaaaaagccacgagtttcatgcgatcaatggaatgatctactccctcccaggactgaaaatgtatgaacaggagtgggtccgactccacctgctcaacatcggcggctcccaggacattcacgtggtccactttcacggccagacattgttagagaatgggaataagcaacaccagctgggcgtctggccactcttgccgggatcattcaagaccttggagatgaaggctagtaagccaggctggtggctgttgaatacagaagttggcgagaatcagcgggcgggaatgcagacacccttcctgatcatggaccgggattgcaggatgcctatgggacttagcacgggtatcattagtgattctcagatcaaggcctcagaatttctgggctattgggagccgcgcttggctcgactaaataatggggggagctataacgcttggagtgtagagaaacttgccgccgaattcgcttccaaaccctggatccaggtagacatgcaaaaggaggtgataatcacagggatccaaacccagggggcaaagcactacctcaaatcttgctacaccacagaattttatgtggcttatagtagtaaccagatcaattggcagatcttcaaagggaacagcacacgcaatgtgatgtatttcaatggtaatagtgacgctagcaccattaaggagaatcagttcgatcccccaattgtcgccagatacataagaatatctcccacccgggcctataaccggccaactttgcgtctggagctgcagggatgtgaagtgaacggttgctccactccattggggatggagaatgggaagatcgaaaataaacagattactgcatcctctttcaaaaagtcatggtggggagattactgggaacccttcagggccaggctgaacgcgcagggacgcgtcaacgcctggcaggcgaaagctaacaacaacaaacagtggctggaaatcgatcttcttaagattaagaaaattaccgccatcattacccagggctgcaagtcgttatcaagtgaaatgtatgtgaaaagctataccattcactactctgaacaaggcgttgaatggaagccgtatcggctgaaaagctcaatggtagacaaaattttcgaaggaaatactaacacgaagggccacgtcaagaatttcttcaatccccccattatttctcggtttatacgtgttatcccgaaaacctggaaccagagcattgccctgaggctggagttgttcggctgtgacatttat

SEQ ID NO: 2329 - DNA, 6672 bp, Artificial Sequence
  derived and/or modified sequence
atgttccctggttgccctcgtttgtgggtgctggtcgtgctcggtacctcttgggtgggctggggctcccagggaacagaggctgcacagcttcgtcagttctacgtggctgctcaaggaatttcatggtcttatagacctgagcctaccaactcctctctgaatttgagcgtcacatcatttaagaagatcgtgtacagggaatacgagccctacttcaagaaggagaagccccaatccacaatcagcggattgcttggacccacactctacgcagaggtaggagacattattaaggtgcattttaagaacaaggcagataagcccctgtcaatccatccacaaggaatccgctactctaaactgagtgagggagcaagttacttggatcacacatttcctgccgagaaaatggatgatgccgtagcccctggcagggaatacacctacgaatggtctattagtgaggattctggacccacccatgatgacccaccttgcctgacccacatttactattcacacgaaaacctcatcgaggattttaatagcggcctcatcggccccttgctgatctgcaagaagggcacacttactgaaggcggtacacagaagacttttgataagcagatcgttcttcttttcgccgtgtttgatgaatctaaatcatggtctcagagcagtagtctcatgtacacagttaacggatatgtcaacggtaccatgcctgacatcaccgtttgtgctcacgatcacatctcctggcacttgctcggtatgtcctctggacccgagcttttttctatccatttcaacggccaggtcctggagcagaatcaccacaaagtgtccgctatcaccctcgtctcagctacctctactactgccaatatgacagttggcccagaaggaaagtggataattagttcccttactcctaagcacttgcaggccggaatgcaagcttacatcgatattaagaactgtcctaagaagactcgcaaccttaaaaagattacacgtgaacagcgccgtcacatgaagcgttgggagtactttatagctgccgaagaggtcatttgggactatgcacccgttatccctgcaaacatggacaagaagtataggtcccagcacctggacaatttttccaatcagatcggtaaacattacaagaaggtcatgtacacccagtatgaggacgagtcctttaccaagcacacagtaaatcccaatatgaaagaggacggcatcctgggccctattatcagggcccaggtgcgtgacacactcaaaatcgtgtttaaaaacatggcctctcgcccctattccatatatcctcacggcgtgaccttctcaccctacgaagatgaagtcaacagctcatttactagtggaaggaataacacaatgattagggccgtacagcccggcgaaacctacacatataaatggaatattttggagtttgatgagcctactgagaatgacgcccaatgcctcacacgtccctactatagtgatgtcgatatcatgcgcgatatcgcttcaggtctgatcggtctgctccttatctgtaaatcaaggagtctggaccgccgcggaatacagcgtgcagccgacatcgagcagcaggctgtcttcgccgtgttcgacgaaaataaaagctggtacctggaggacaacattaataaattctgtgagaatcctgatgaggtaaagcgtgatgatcctaaattctatgagtcaaacataatgagcactatcaacggctacgtcccagaatctatcaccaccctcggattctgtttcgatgacaccgtacagtggcacttctgttccgtgggtacccaaaacgaaatcctgaccattcactttactggccacagttttatctacggcaagcgccacgaggacaccctgacactgttcccaatgaggggagagagtgttaccgtgaccatggataacgtcggaacttggatgctcactagtatgaactcaagtccaaggtccaagaaactgagactcaagttccgtgacgtgaagtgtataccagacgacgacgaggatagctatgaaattttcgagccacccgagtccaccgtcatggccactcgtaaaatgcacgacaggctcgaacctgaagatgaggaatctgacgctgactacgactaccaaaaccgtctggccgcagctctgggtataaggtcctttcgtaatagcagtctgaatcaggaagaggaggaatttaatctgaccgcacttgccttggagaacggcaccgaatttgtctcctccaataccgatatcatcgtgggaagtaattacagctcaccatccaatatctccaagttcactgttaataacttggctgagcctcagaaggccccatctcaccaacaagccactacagccggcagcccactccgccacctgatcggaaaaaactccgtgctgaacagttctaccgccgaacacagttcaccatactctgaagaccctattgaagacccattgcaacccgatgtcactggaatcaggctgttgagtctgggcgcaggcgaattcaagtcacaggaacacgctaaacataagggcccaaaagtggaaagagaccaggccgctaagcatcgtttctcttggatgaagttgttggctcacaaagtgggacgccatcttagccaggacaccggaagcccaagcggaatgaggccctgggaggatcttccttcccaggatactggatccccttcacgcatgcgcccatggaaggatcctcctagcgacctcctccttctgaaacaatctaactcctctaagatcttggtaggccgttggcatctggcctccgagaagggctcctatgaaatcattcaggacactgatgaagacacagctgtgaataactggctgataagtcctcagaacgcttcaagagcctggggcgaatccactcctctcgccaataagcctggaaagcagtccggccaccccaagttccccagagtaaggcacaagtccctgcaggtcaggcaagatggtggtaagtcacgcctgaaaaagtctcaattccttattaagacccgcaaaaagaagaaggaaaaacacacccaccacgctccactctcaccacgtaccttccatccactcagaagcgaggcttacaacaccttctctgagcgccgtcttaagcactctcttgtgttgcataagtcaaatgagacctctctccccaccgaccttaaccaaacactgcccagtatggatttcggttggatcgcctcacttccagaccataatcagaattcctccaatgacaccggacaagcctcctgtcctcctggactgtaccagactgtccctcctgaggaacactatcagacattccccatacaggatcctgaccagatgcactctacctcagatccttcacaccgttcttctagtcccgagctctctgagatgttggagtacgatagatctcacaagagtttccctaccgacatcagtcaaatgagccctagcagtgagcatgaggtctggcagaccgttattagcccagatctctcacaggtaaccctctctcctgagctctctcagaccaacttgagccccgacctcagtcatactacattgagtcccgagctcatccaaaggaatctttcccccgccctgggtcagatgcctatctccccagacctctctcacacaacattgagccctgatctctcccacacaaccctgtcactggatttgtcccagacaaatctgagccctgaattgtcacaaaccaacctcagtcccgctcttggtcagatgccccttagcccagacctgagtcacacaaccctgtccctggacttcagccagacaaatctgtcacccgagcttagccacatgaccctgtccccagagctgagccagaccaatctctcccccgctctcggtcagatgcctatctcccccgatctgtcccacaccacactctctctcgacttttcccaaaccaacctttctccagagctctcccagacaaatctgtcccctgctctcggacagatgcccctgtctcccgaccctagtcatactacactcagcctcgacctgagtcagacaaatctttctcccgagctgtctcaaactaatctgagccctgacctttccgagatgccactgtttgctgacctgtctcaaattcccctcaccccagatctcgaccagatgacattgtcccccgacctgggagaaactgatctgtcccctaacttcggccaaatgtccttgtccccagacctttcccaagtaacactgagccccgatatctcagatacaacccttttgccagatctttcacagataagcccaccacccgatctcgatcagatattctacccttctgagtcaagccaaagcctccttctgcaggagttcaacgagtccttcccctaccctgacctcggacaaatgccttccccctcctcaccaactcttaatgatacatttctgagcaaggagttcaatcctctggtcatcgtgggtctgtctaaggacggtaccgactatatcgagataatcccaaaggaagaggttcagagcagcgaagacgattacgccgaaattgactacgtgccttacgatgatccatacaagacagacgtaaggaccaatataaactcttcaagggacccagataatatcgccgcttggtacctccgtagcaataacggcaatcgccgcaattactatatcgccgccgaggaaatttcttgggactacagcgaattcgtccagagggagactgacattgaggattccgatgacatcccagaggacacaacctacaaaaaggtcgtgtttcgtaaatatttggactctaccttcactaagcgtgatccaaggggtgaatatgaggaacacctgggtatactcggtcctatcattagggctgaggtggatgatgtgatacaggtccgtttcaaaaaccttgcttctagaccctactccctgcatgcccacggtctctcatatgagaaatctagtgagggcaagacctacgaggacgactcacctgaatggttcaaggaagacaacgcagtacagcctaacagctcctatacttatgtctggcatgcaaccgagagaagcggtcctgagagtcccggtagcgcctgcagggcatgggcttactacagtgctgtcaacccagagaaggacatccactctggtctgatcggtcctttgctcatctgccagaaaggcattctccacaaagactccaatatgcctatggacatgcgcgaatttgtactcctctttatgacattcgatgagaagaaatcatggtattacgagaaaaaatctcgttcttcttggcgtctgaccagttcagaaatgaagaagtcacatgagttccacgctatcaatggaatgatatacagtttgcctggtctcaagatgtacgagcaggaatgggtgaggctgcacctgctgaacatcggcggttctcaggacattcacgtggtgcacttccacggccaaacactgctggagaatggtaataagcagcaccagctcggtgtctggcctcttttgcccggaagttttaaaaccctggagatgaaggcctctaagcccggttggtggcttcttaacaccgaagtcggagaaaaccagcgcgctggcatgcagactccatttcttatcatggaccgcgattgcaggatgccaatgggactgtctactggaattatttccgacagccagattaaggcatctgagttcctgggttactgggagccacgcctggcccgcctgaacaatggcggaagctacaatgcttggagcgttgaaaagttggccgctgagttcgcctctaagccatggatccaagtagacatgcaaaaagaggtgatcataacaggtatccagacacagggtgccaagcactacctgaaaagctgttacaccacagaattttacgtcgcttacagcagcaaccagatcaactggcagatctttaagggaaactcaacccgcaatgtgatgtactttaatggcaactccgacgcatccaccatcaaagaaaaccagttcgaccctccaatcgtggcaagatatatccgcatttcccccacccgcgcatacaacaggcctactttgaggttggagctccagggatgcgaagtgaacggttgttctacacctctcggcatggaaaacggtaagattgagaacaaacaaattaccgcctcctcatttaagaaatcctggtggggtgactattgggaaccattcagagctcgccttaacgcacagggacgcgtcaatgcttggcaggcaaaggctaacaacaataaacagtggctcgaaattgacttgctcaagatcaagaaaataacagccatcatcacacagggctgcaagtccctctcatctgaaatgtacgttaagtcatataccattcactatagcgaacagggagtggagtggaagccatacaggctcaagagcagcatggtggataaaatttttgagggtaatacaaacaccaagggacacgtgaagaattttttcaatccacccatcatctctcgttttatacgcgtcatacctaagacctggaatcagtcaatcgctctgaggcttgagcttttcggatgcgatatatac

SEQ ID NO: 2330 - DNA, 6672 bp, Artificial Sequence
  derived and/or modified sequence
atgtttccgggttgtccgcgattatgggttttagtagttctaggtacgtcgtgggtaggttggggttcgcaaggtacggaagcggcgcaactacgtcaattttatgttgcggcgcaaggtatatcgtggtcgtatcgaccggaaccgacgaattcgtcgctaaatttatcggttacgtcgtttaaaaaaatagtttatcgtgaatatgaaccgtattttaaaaaagaaaaaccgcaatcgacgatatcgggtctactaggtccgacgttatatgcggaagtaggtgatataataaaagttcattttaaaaataaagcggataaaccgctatcgatacatccgcaaggtatacgatattcgaaactatcggaaggtgcgtcgtatttagatcatacgtttccggcggaaaaaatggatgatgcggtagcgccgggtcgtgaatatacgtatgaatggtcgatatcggaagattcgggtccgacgcatgatgatccgccgtgtctaacgcatatatattattcgcatgaaaatctaatagaagattttaattcgggtctaataggtccgttactaatatgtaaaaaaggtacgttaacggaaggtggtacgcaaaaaacgtttgataaacaaatagtattactatttgcggtatttgatgaatcgaaatcgtggtcgcaatcgtcgtcgttaatgtatacggttaatggttatgtaaatggtacgatgccggatataacggtatgtgcgcatgatcatatatcgtggcatttattaggtatgtcgtcgggtccggaattattttcgatacattttaatggtcaagtattagaacaaaatcatcataaagtatcggcgataacgctagtatcggcgacgtcgacgacggcgaatatgacggtaggtccggaaggtaaatggataatatcgtcgttaacgccgaaacatttacaagcgggtatgcaagcgtatatagatataaaaaattgtccgaaaaaaacgcgaaatttaaaaaaaataacgcgtgaacaacgtcgtcatatgaaacgttgggaatattttatagcggcggaagaagttatatgggattatgcgccggtaataccggcgaatatggataaaaaatatcgttcgcaacatttagataatttttcgaatcaaataggtaaacattataaaaaagttatgtatacgcaatatgaagatgaatcgtttacgaaacatacggttaatccgaatatgaaagaagatggtatactaggtccgataatacgagcgcaagtacgagatacgctaaaaatagtttttaaaaatatggcgtcgcgaccgtattcgatatatccgcatggtgtaacgttttcgccgtatgaagatgaagttaattcgtcgtttacgtcgggtcgaaataatacgatgatacgagcggtacaaccgggtgaaacgtatacgtataaatggaatatattagaatttgatgaaccgacggaaaatgatgcgcaatgtttaacgcgaccgtattattcggatgttgatataatgcgtgatatagcgtcgggtttaataggtctactactaatatgtaaatcgcgttcgctagatcgacgtggtatacaacgtgcggcggatatagaacaacaagcggtatttgcggtatttgatgaaaataaatcgtggtatctagaagataatataaataaattttgtgaaaatccggatgaagttaaacgagatgatccgaaattttatgaatcgaatataatgtcgacgataaatggttatgtaccggaatcgataacgacgttaggtttttgttttgatgatacggtacaatggcatttttgttcggtaggtacgcaaaatgaaatactaacgatacattttacgggtcattcgtttatatatggtaaacgtcatgaagatacgctaacgttatttccgatgcgtggtgaatcggtaacggtaacgatggataatgtaggtacgtggatgctaacgtcgatgaattcgtcgccgcgttcgaaaaaattacgactaaaatttcgagatgttaaatgtataccggatgatgatgaagattcgtatgaaatatttgaaccgccggaatcgacggttatggcgacgcgtaaaatgcatgatcgtctagaaccggaagatgaagaatcggatgcggattatgattatcaaaatcgtctagcggcggcgttaggtatacgatcgtttcgaaattcgtcgctaaatcaagaagaagaagaatttaatctaacggcgctagcgctagaaaatggtacggaatttgtttcgtcgaatacggatataatagtaggttcgaattattcgtcgccgtcgaatatatcgaaatttacggttaataatttagcggaaccgcaaaaagcgccgtcgcatcaacaagcgacgacggcgggttcgccgttacgacatctaataggtaaaaattcggtactaaattcgtcgacggcggaacattcgtcgccgtattcggaagatccgatagaagatccgctacaaccggatgtaacgggtatacgactactatcgttaggtgcgggtgaatttaaatcgcaagaacatgcgaaacataaaggtccgaaagtagaacgagatcaagcggcgaaacatcgattttcgtggatgaaactactagcgcataaagtaggtcgtcatctatcgcaagatacgggttcgccgtcgggtatgcgaccgtgggaagatctaccgtcgcaagatacgggttcgccgtcgcgtatgcgaccgtggaaagatccgccgtcggatctattattattaaaacaatcgaattcgtcgaaaatattagttggtcgatggcatttagcgtcggaaaaaggttcgtatgaaataatacaagatacggatgaagatacggcggttaataattggttaatatcgccgcaaaatgcgtcgcgagcgtggggtgaatcgacgccgctagcgaataaaccgggtaaacaatcgggtcatccgaaatttccgcgtgttcgtcataaatcgttacaagttcgacaagatggtggtaaatcgcgtctaaaaaaatcgcaatttctaataaaaacgcgtaaaaaaaaaaaagaaaaacatacgcatcatgcgccgttatcgccgcgaacgtttcatccgttacgttcggaagcgtataatacgttttcggaacgtcgtctaaaacattcgttagtattacataaatcgaatgaaacgtcgctaccgacggatctaaatcaaacgttaccgtcgatggattttggttggatagcgtcgttaccggatcataatcaaaattcgtcgaatgatacgggtcaagcgtcgtgtccgccgggtttatatcaaacggtaccgccggaagaacattatcaaacgtttccgatacaagatccggatcaaatgcattcgacgtcggatccgtcgcatcgatcgtcgtcgccggaattatcggaaatgttagaatatgatcgttcgcataaatcgtttccgacggatatatcgcaaatgtcgccgtcgtcggaacatgaagtatggcaaacggtaatatcgccggatttatcgcaagtaacgttatcgccggaactatcgcaaacgaatctatcgccggatttatcgcatacgacgctatcgccggaactaatacaacgaaatttatcgccggcgttaggtcaaatgccgatatcgccggatctatcgcatacgacgctatcgccggatttatcgcatacgacgctatcgttagatctatcgcaaacgaatttatcgccggaactatcgcaaacgaatctatcgccggcgttaggtcaaatgccgctatcgccggatttatcgcatacgacgttatcgttagatttttcgcaaacgaatttatcgccggaattatcgcatatgacgctatcgccggaattatcgcaaacgaatttatcgccggcgttaggtcaaatgccgatatcgccggatctatcgcatacgacgttatcgctagatttttcgcaaacgaatttatcgccggaactatcgcaaacgaatctatcgccggcgctaggtcaaatgccgctatcgccggatccgtcgcatacgacgttatcgttagatctatcgcaaacgaatttatcgccggaactatcgcaaacgaatttatcgccggatctatcggaaatgccgctatttgcggatctatcgcaaataccgctaacgccggatttagatcaaatgacgctatcgccggatttaggtgaaacggatttatcgccgaattttggtcaaatgtcgttatcgccggatttatcgcaagtaacgctatcgccggatatatcggatacgacgctattaccggatttatcgcaaatatcgccgccgccggatttagatcaaatattttatccgtcggaatcgtcgcaatcgttactattacaagaatttaatgaatcgtttccgtatccggatttaggtcaaatgccgtcgccgtcgtcgccgacgttaaatgatacgtttctatcgaaagaatttaatccgctagtaatagttggtttatcgaaagatggtacggattatatagaaataataccgaaagaagaagtacaatcgtcggaagatgattatgcggaaatagattatgttccgtatgatgatccgtataaaacggatgttcgaacgaatataaattcgtcgcgagatccggataatatagcggcgtggtatttacgatcgaataatggtaatcgtcgaaattattatatagcggcggaagaaatatcgtgggattattcggaatttgtacaacgtgaaacggatatagaagattcggatgatataccggaagatacgacgtataaaaaagttgtatttcgtaaatatttagattcgacgtttacgaaacgagatccgcgaggtgaatatgaagaacatttaggtatactaggtccgataatacgtgcggaagtagatgatgtaatacaagtacgatttaaaaatctagcgtcgcgtccgtattcgctacatgcgcatggtttatcgtatgaaaaatcgtcggaaggtaaaacgtatgaagatgattcgccggaatggtttaaagaagataatgcggttcaaccgaattcgtcgtatacgtatgtatggcatgcgacggaacgttcgggtccggaatcgccgggttcggcgtgtcgtgcgtgggcgtattattcggcggttaatccggaaaaagatatacattcgggtttaataggtccgctattaatatgtcaaaaaggtatattacataaagattcgaatatgccgatggatatgcgagaatttgttctattatttatgacgtttgatgaaaaaaaatcgtggtattatgaaaaaaaatcgcgatcgtcgtggcgtctaacgtcgtcggaaatgaaaaaatcgcatgaatttcatgcgataaatggtatgatatattcgttaccgggtctaaaaatgtatgaacaagaatgggttcgtttacatctattaaatataggtggttcgcaagatatacatgtagtacattttcatggtcaaacgttattagaaaatggtaataaacaacatcaattaggtgtttggccgctattaccgggttcgtttaaaacgctagaaatgaaagcgtcgaaaccgggttggtggctactaaatacggaagtaggtgaaaatcaacgtgcgggtatgcaaacgccgtttttaataatggatcgtgattgtcgaatgccgatgggtctatcgacgggtataatatcggattcgcaaataaaagcgtcggaatttttaggttattgggaaccgcgtttagcgcgtctaaataatggtggttcgtataatgcgtggtcggtagaaaaattagcggcggaatttgcgtcgaaaccgtggatacaagtagatatgcaaaaagaagtaataataacgggtatacaaacgcaaggtgcgaaacattatctaaaatcgtgttatacgacggaattttatgtagcgtattcgtcgaatcaaataaattggcaaatatttaaaggtaattcgacgcgtaatgtaatgtattttaatggtaattcggatgcgtcgacgataaaagaaaatcaatttgatccgccgatagtagcgcgttatatacgaatatcgccgacgcgtgcgtataatcgaccgacgttacgtttagaattacaaggttgtgaagttaatggttgttcgacgccgctaggtatggaaaatggtaaaatagaaaataaacaaataacggcgtcgtcgtttaaaaaatcgtggtggggtgattattgggaaccgtttcgagcgcgactaaatgcgcaaggtcgagtaaatgcgtggcaagcgaaagcgaataataataaacaatggttagaaatagatttactaaaaataaaaaaaataacggcgataataacgcaaggttgtaaatcgctatcgtcggaaatgtatgtaaaatcgtatacgatacattattcggaacaaggtgtagaatggaaaccgtatcgtctaaaatcgtcgatggttgataaaatatttgaaggtaatacgaatacgaaaggtcatgtaaaaaatttttttaatccgccgataatatcgcgatttatacgagttataccgaaaacgtggaatcaatcgatagcgttacgtttagaactatttggttgtgatatatat

SEQ ID NO: 2331 - DNA, 6672 bp, Artificial Sequence
  derived and/or modified sequence
atgttccctggatgccctaggctctgggtcttggtcgttctggggacatcttgggtagggtgggggtcgcagggtaccgaggccgctcagctccgtcagttctacgtcgccgcgcaggggattagttggagctataggccggaacctaccaactcatcgctgaacttgtccgttacatcttttaaaaagatagtataccgtgaatacgaaccttacttcaagaaggaaaagcctcaaagcacaatctccggtctcttggggcctactttgtacgcggaagtcggcgatatcataaaggtgcacttcaagaacaaggcggataagcccctctctatccatcctcagggtataaggtattcaaagctatccgagggggcatcttatttggatcatacatttcctgccgaaaaaatggacgatgccgtggctcccggtcgagagtatacttatgagtggtctatcagtgaagattccggaccaactcatgatgaccccccttgcctaacccatatttattattctcacgagaacctaattgaagacttcaactccgggctgatcgggcctctcctgatctgcaaaaagggtaccctgactgaagggggcacccaaaaaactttcgataagcaaatagtgttgctctttgctgtattcgatgagtcaaagagctggagtcagtccagcagcttaatgtacaccgtgaatggctacgtgaacgggacaatgcctgatatcacagtatgtgcacatgaccatatcagctggcatttgctcggcatgagctctggccctgaactgttttccattcactttaatggacaggtactggagcagaatcatcataaagtttctgccatcacattggtgtctgccacatccaccacagcaaacatgacggtgggtccggaagggaagtggattattagcagtctgacccctaaacacctgcaggccgggatgcaggcttatatcgatattaagaactgcccaaaaaaaacgaggaacttgaaaaagattacccgcgaacagagacgtcatatgaagagatgggagtatttcattgcagcagaggaagtcatctgggattatgcacccgtaattccagcaaatatggacaaaaaatataggtctcagcatctggacaactttagtaatcaaatcgggaaacactacaagaaggttatgtatactcagtatgaggacgaatcctttacgaaacacactgttaaccctaacatgaaagaggacggaatccttgggcccattatcagggcacaggttcgggacacattgaagatcgtgttcaaaaatatggcttcccgaccttactctatatacccccacggtgtgacctttagcccctatgaggatgaggtcaatagttctttcacaagcggaaggaataatacaatgatccgcgccgtgcaacccggggagacatacacctacaagtggaatattctggagttcgacgagcctacggagaatgacgcccaatgcctcaccagaccttattattcggatgttgatattatgagagatatagcatccggcctaattggccttctgctcatttgcaagagcaggagtctggatcgcaggggtatccagcgtgccgccgacatagagcaacaggccgtgttcgccgtgttcgacgaaaataaatcttggtaccttgaggataacattaataagttttgcgaaaaccccgatgaagtgaagcgggatgatcccaagttctacgaaagcaatataatgagtacaattaacgggtacgttcctgaaagcatcactacccttgggttttgcttcgacgataccgtccagtggcatttctgttccgtaggtacacagaacgagatcctcaccatccattttactggccactccttcatatatggtaaacggcatgaggacacattgacactgtttcccatgaggggggagtctgtgaccgtaaccatggataacgtcggcacatggatgctgacgagcatgaactcctccccacgtagcaagaagttgaggttgaagtttcgagacgtgaaatgcatccccgacgatgatgaggattcctatgagatttttgagccccccgaatccacggtgatggctacccggaaaatgcacgataggctggaacctgaggacgaggagtccgacgccgactacgactatcagaacagattggcagcggccctgggaatcaggagcttcaggaattcctcacttaaccaagaagaagaggagttcaaccttacagcactcgccctcgaaaacgggactgaattcgtttcatccaatactgacatcatcgtaggatccaattattccagtccgagtaatatatctaaatttaccgttaataatctcgccgaaccgcagaaggccccgagtcaccagcaggcaaccaccgccgggagtccattacgccaccttattggaaaaaactccgtcctgaatagctctacagcggagcacagcagcccatatagtgaagaccccatcgaagatccactacagcctgacgtgaccggcataagactcctgtcccttggcgccggcgaatttaagagccaggaacatgcgaagcataaaggacccaaagtggagagagaccaggccgctaagcacagattctcatggatgaaactgctggcacataaagtgggcagacatttaagtcaggacacaggctccccaagtggtatgcgaccctgggaagatttgccctcacaggacaccggcagcccaagtcgcatgcgtccttggaaggacccccccagtgatctgctgctactgaaacagtcaaactcttcaaagatcctggttggtcgatggcatcttgcttccgaaaaaggaagttatgaaatcattcaggatacagacgaggataccgccgtaaataactggttgataagcccacagaatgcgtccagggcctggggggaaagtaccccgctggccaacaagcccgggaaacaatctggccaccccaagttcccgcgggtcaggcataagtcgctacaggtgcgacaggatggcggaaaaagtcggctcaagaaatctcaatttctcatcaaaactaggaagaagaaaaaggagaagcatacacatcatgcgccactaagccctcgaaccttccatcccctgaggtctgaggcttacaatacgttcagcgagaggagactgaagcactccctcgtgttgcataagtccaatgaaacgagcctgccaactgatcttaaccagaccctgccctccatggacttcggatggatcgctagcctgccggatcacaatcagaattcatctaacgatactgggcaggcctcctgtccgccgggcctctaccaaacggtccctcccgaagagcactatcaaactttccccatccaggatcccgatcagatgcactccacaagcgacccgtcacacagaagtagttctccggaactcagcgagatgttggaatacgatcggagccataaatcgttccctaccgatatctcccagatgagcccctccagcgaacatgaggtctggcagaccgtgattagcccggatttatctcaagtcacgctgtctcctgagctgtctcaaaccaacctgagccccgacctcagtcatacaacactttcaccagaactgattcaacggaatctaagtcctgccctgggacagatgccgatctctcctgacctttcacacactacgctgtcccctgacctatcccacacgactcttagcctggatttgagccaaaccaatctctcccccgagctgagccagactaacctttcacctgctttaggccagatgcccctctcacccgacttgagtcatacaacattgtcactcgacttttcacagactaacctttctcccgagttgtcacatatgactctgtcgcccgagttgagtcaaactaatctgagtcccgccctgggacagatgcctatttcgcctgacctgtctcacacaaccctaagtctggacttttctcagaccaatttgagtcccgagctgagtcaaacaaatctgtcaccggctcttggacaaatgcctctctccccagatccatctcacaccactctctctcttgatctctcgcagaccaacttatctccagagctgtctcagaccaacctgtccccagatctttctgagatgccgttgtttgcggacctgagccagattcccctcactcctgacctggatcaaatgacactcagtcccgacctgggcgagaccgatctttctccaaactttggacagatgtctttgtccccagacttgagccaggtgacgctgtctccggacatatctgacactacgttgctacccgatctgtcacaaatatcacctcccccggacttagatcagatattttaccctagcgagagtagtcagtctctcctacttcaggaattcaacgaatcctttccttatccggatctggggcagatgccctccccctcgagcccaactttgaatgacacattcctgagcaaagagttcaatccattagttatagttggactctctaaggacggaacagactatatcgaaatcatacccaaagaagaagtgcagtcttctgaagatgattacgcggagattgactacgttccatatgatgacccctacaaaacagacgtccgaacgaacataaattcctcccgggacccagataatattgccgcatggtaccttcgctccaataacggaaatagacggaattactatattgccgccgaggagatttcttgggactattccgagttcgtgcaaagggagaccgacattgaggatagtgacgatattcccgaggacaccacttacaagaaagttgttttcagaaaatacctcgactccacttttactaaacgcgacccccggggtgaatacgaagagcacttgggcattttaggtcccatcataagagctgaagtcgacgacgtgatacaagttcggtttaaaaacctggcttccaggccatatagcctccatgcacacggccttagttatgaaaagagtagcgagggcaagacctatgaggatgacagcccagaatggttcaaggaagataacgccgtgcagccaaatagcagttatacttacgtttggcatgctacagagagatccggaccagagagccccggcagcgcctgtcgcgcctgggcctactattctgcggtcaatccagaaaaggacatccattctggtctcataggtcctctgctgatctgtcagaagggtattctgcacaaggactcgaacatgccaatggacatgagagagttcgttttgctcttcatgacctttgacgagaagaagagttggtattacgagaaaaaaagcagatccagctggaggcttacatcttcggaaatgaaaaaaagccacgagtttcatgcgattaatggcatgatttattccctccccgggctgaagatgtacgagcaagagtgggtgcgactgcatttgctcaacattggtggttcccaggacattcacgttgtccatttccacgggcagacacttctcgagaacgggaacaagcagcatcagctgggcgtgtggccgcttctgcccggatctttcaagacacttgaaatgaaggcgtctaaacccggctggtggctgctgaacacggaggtgggggagaaccagcgggctggtatgcaaacccccttcctcataatggatagagactgccgcatgccaatgggtctcagtacgggcatcatttctgacagccagattaaagcgtccgaattcctcggatattgggaacctagactagctcggttgaacaatggcggaagctacaacgcttggtcagtggagaagctagcagctgaatttgcgagtaagccttggattcaggtcgacatgcagaaagaggtcatcataactggcattcagacccagggagccaagcactatctgaagtcctgttacactacggaattttatgtagcctacagctccaatcagattaattggcagatcttcaaagggaatagtacaagaaacgtgatgtatttcaacggaaacagcgacgcgagcactatcaaagagaaccagtttgatccgcctattgtagctaggtacattaggatctcacctacgcgggcttacaacaggcctacactgaggttggagctgcagggctgtgaggttaacgggtgtagtaccccacttggaatggaaaacgggaagatagaaaataaacagatcacggcgtcctcatttaaaaaaagctggtggggcgactattgggaaccgtttagggctcgtctgaacgcacagggcagagtgaatgcatggcaggcaaaagcaaataataataagcagtggcttgaaattgatctccttaaaatcaagaagattaccgccatcatcactcagggatgtaaaagtctttcttcagaaatgtatgtgaagagttacactattcactacagcgaacagggcgttgaatggaaaccttaccgcctgaagagttccatggttgataaaatttttgaaggtaacaccaataccaagggccatgtaaagaacttttttaatccccctatcatcagtcgatttatccgcgttattccgaagacctggaaccagtcaattgctcttcggctggagctttttgggtgtgacatatac

SEQ ID NO: 2332 - DNA, 6672 bp, Artificial Sequence
  derived and/or modified sequence
atgttcccagggtgcccaagactttgggtcttagtcgtcctgggaacatcttgggtaggatggggatcgcaagggacagaagctgcccagctaaggcagttctacgttgctgctcaggggatcagttggtcatatcgtccagaaccaaccaactcttccctgaacttaagcgtaacttcctttaagaagatagtgtaccgagagtatgagccatactttaaaaaggagaaaccccagtccaccatttcaggcctgctgggacctacgctttacgccgaagtgggagacatcattaaggtgcacttcaaaaacaaggctgataagcccctttcaattcacccacaaggaattcggtattccaaattatccgagggcgcctcttatttggatcacacctttccagccgagaagatggatgacgccgtggccccgggcagagagtacacgtacgaatggtccatcagcgaggacagtggccctacacacgatgatccgccttgcctcactcacatatactactctcacgaaaatctcatcgaagactttaactcgggtttaattggaccacttttaatctgcaagaaaggtaccttaactgagggtggcacccagaaaacgttcgacaagcagatcgtgctgctcttcgccgtgtttgatgaatccaaaagctggtctcagtcttccagtttgatgtacactgttaacgggtacgtgaacgggaccatgcccgacattaccgtctgtgcccatgaccacatttcatggcaccttcttggcatgagctcaggcccagaacttttctctattcacttcaacgggcaggtgctggagcagaatcatcacaaggtctcagctatcactttagtgtccgcaacttccaccaccgctaatatgaccgttggacccgaagggaaatggataatttccagcctgactcctaaacacctccaggccggaatgcaggcctacatcgatatcaaaaactgtccaaaaaagactaggaacctgaaaaaaattacgcgagagcaacggcggcacatgaagaggtgggagtattttatcgcggctgaagaggtaatttgggactacgctccggtcattcctgccaatatggacaaaaagtaccgctcccaacatctggacaacttctctaaccaaatcggaaagcactacaagaaggtaatgtatacgcagtatgaggacgaaagcttcactaagcataccgtaaaccccaacatgaaagaagatggcatcctcgggccaatcatcagagctcaggtgcgtgatacgcttaagattgtgttcaagaacatggcctcaagaccttacagcatttacccacatggggtgacattttccccctatgaagatgaagtgaacagttcatttacctccgggagaaacaacactatgatcagggctgtacagcccggagaaacctacacatacaagtggaatattctagaatttgatgagcctaccgaaaacgatgcgcaatgtctcacacgaccatactattcagatgtggatattatgagggacatcgctagtggcctgattgggttgctgttgatctgtaagtccaggagcctcgaccgccgagggatccagagagctgccgacatcgagcaacaggcagtattcgccgtgtttgacgagaacaaaagctggtatttggaggacaacatcaacaagttctgtgagaatcctgacgaagtcaaacgagacgatcccaagttttacgaatccaacatcatgtcaactattaatggttacgttcccgagtccatcacaactctgggattttgcttcgatgataccgtccagtggcacttttgttctgtggggacccagaatgagatcctcaccattcattttacaggacattcgtttatctacggaaaaagacacgaggacaccttgacgctgttccctatgcgtggagagtctgtcactgtgaccatggacaacgtgggaacgtggatgctgacgtccatgaattcttctcctaggtcaaagaagctaagactgaaatttagagatgttaagtgtataccagacgatgacgaagattcctatgaaatctttgaacctccggagagcaccgtcatggctacccggaaaatgcacgacaggctcgaacctgaagacgaggagtccgacgcagactacgactatcaaaaccgactggcagctgctttgggcatacggtctttcaggaactcatccctaaatcaagaggaagaggagtttaatctcactgccctggctctcgagaacgggactgagttcgtctcctccaacaccgacataatcgtgggcagtaattacagtagcccatctaacattagcaaattcacagtaaacaacctggccgagccacagaaagcaccatctcaccagcaggcaacgacggctggctctccactgagacacctgatcgggaagaacagcgtgttgaattcttcgactgcggaacacagtagtccctactctgaagatcctattgaggacccactgcagcctgacgtcactggcattaggttactctcactcggtgccggggaatttaagtcccaagaacacgctaagcataagggccccaaagtggaacgcgaccaggccgccaagcatagattcagttggatgaagctgctggcccacaaagtcggcagacatctaagtcaagacacgggtagcccttctggaatgcgaccttgggaggacctgcctagtcaggatactggtagtccgagtcgtatgaggccctggaaggacccaccatcagatttgttactgttgaaacagtcaaattcctctaagatcctggtgggccgctggcacctggcttctgaaaagggatcttatgaaatcattcaagatacagacgaagatactgccgtgaacaactggctcattagccctcagaatgcctccagagcgtggggggagagcactccacttgccaacaaacctgggaagcagtccggccaccctaagttccctcgggtacgacataagtcattgcaggtgaggcaggacggcgggaaatctcgccttaagaaatcccagtttttaattaaaaccaggaaaaaaaagaaagaaaagcacacacaccatgcgcctttgtccccaagaacatttcacccactcaggtctgaagcttataatacattctctgagcgtagattaaagcactccctcgttctccataagtccaacgaaacctctttgcctactgacctgaatcaaaccttaccttccatggactttggttggatcgcaagtctcccagaccacaaccagaattcctctaatgatacgggtcaagcgtcatgtcccccaggattgtatcagacagtcccacctgaggaacattatcaaaccttccctatccaagatcctgatcaaatgcatagcacgagtgatccttctcaccgctcttcatccccagaacttagcgaaatgctcgaatatgaccgatctcacaagtcgttcccgacagatattagtcagatgagcccatcaagtgagcatgaggtttggcagacagtgatatcccccgacctgtcacaggttacactgagccctgaactgtctcagacaaatctgtcgccggatttatcacacactacactctcacctgaattaatacagaggaatcttagccctgctctgggtcagatgcccatttcccctgacctgagtcacaccactctttcccctgatctgtcccatacgactctgtccctggatctttctcaaacaaacctgtctcccgagttgtcacagaccaacctgtcccctgcgttgggtcagatgcccctctcccctgatctttcccacacaacattgagcctggatttctcacagactaacttatcaccagaattgagtcacatgacactgtccccggagctgagtcagaccaatctctcccccgccctgggacagatgccaatttccccagacctctcgcataccacactttccctcgatttctcccagacaaacctttcaccggagttgtctcagactaacctctcccccgcgctcggacagatgcctctgtctcccgaccccagtcatactaccttgagcctggacttaagtcagaccaacctttctcccgagctgtcgcagacaaatctaagccctgacctgtcagagatgccacttttcgcagatctttcccaaattccccttactccagacctggaccagatgacattgtctccagatttgggtgaaactgatctgagtcccaactttgggcaaatgtcgctctcccccgatctgtctcaggtgaccctctctcccgatatatctgacacaactctgctcccagacctgtcacagatatcccctccacctgacctggatcaaatcttttatccatccgagagttcccaaagcctgctgctccaggagttcaacgaatccttcccctatccggatttaggtcagatgccctctccttccagccccaccttaaacgatacttttctgagcaaagagttcaaccctttggttatcgtgggcctaagtaaagatggaacagactacatagagatcatccccaaggaggaagttcagtcttccgaggacgactacgccgaaatcgattacgtgccgtatgatgacccgtacaaaaccgatgtacgaaccaacatcaacagttcacgagatcctgacaacatcgccgcttggtacttacgctccaataacggcaatcgcaggaattactacattgccgccgaagagatctcttgggactacagcgaatttgtgcaaagagaaacagacatcgaggattccgacgacataccagaggacaccacttataagaaggtggtttttaggaagtacctggatagcacattcaccaagagagacccgcgcggcgaatacgaggagcacttgggcattttgggaccaattatccgcgcggaagtagatgacgtgatccaggttagatttaagaacctggcttctaggccttattccttgcacgcccatggtttgagttacgagaaatctagcgagggcaaaacatacgaagacgattcccctgaatggtttaaagaggataatgccgtccagccaaactccagttacacctacgtgtggcacgcaactgaaagaagcggtcctgagtcgcctggttcagcatgcagagcatgggcgtactattcggcagttaacccggagaaggacattcattctggcctaatcggtcctctgctcatatgccagaaaggtattcttcacaaggactctaatatgcccatggacatgagagaatttgtgcttctctttatgacatttgacgaaaagaagtcttggtattatgagaagaaaagcagatcgtcctggcgactcacctctagcgaaatgaagaaaagccatgagtttcacgctattaacggcatgatctactcactgcctggactgaagatgtacgaacaagaatgggtccgactacatcttctgaatatcggcggaagccaagatattcatgtggtgcattttcatgggcagacactgctggaaaatgggaataaacaacaccagctcggcgtgtggcccttgttgccaggatccttcaaaacgttagaaatgaaagcctccaaacccggatggtggcttctgaacacagaggtgggggagaaccagcgtgcaggtatgcagacaccctttttgatcatggatcgcgattgccggatgccaatggggctgtcaaccggcatcatttcagacagccagattaaggcatctgaattcctgggctactgggagcctcgacttgccagattaaataacgggggatcctacaacgcatggtcagtggagaagttagccgccgaattcgcttccaagccctggattcaggtcgacatgcagaaagaagtgataattaccgggatacagactcagggcgccaagcactatctgaagagctgttataccaccgaattttacgtggcttatagttctaatcagatcaactggcagatttttaagggaaattctacgcgaaatgtcatgtactttaacggaaatagcgacgcctccaccatcaaagaaaatcagttcgaccctcctattgtggctcgttacataagaatttcgcctaccagagcatataatagaccaacgctacgactcgaactgcagggatgtgaggtgaacggctgtagtactcccctggggatggaaaacggaaaaatcgaaaataaacaaattactgcttccagcttcaagaaaagctggtggggcgattactgggaaccctttagagcacggctgaatgcccagggccgagtcaatgcctggcaagccaaagctaacaacaataagcagtggctggaaatcgacctgctgaagatcaaaaagataaccgctataatcacccaaggctgtaagtccctctcttcagagatgtatgttaaaagttatacaatccactacagcgagcaaggcgtcgaatggaagccatatcggctcaagtcctctatggtagacaagatcttcgaggggaatacgaacacaaagggccacgtcaaaaatttcttcaacccacctataatcagtcgatttatccgagttattccgaaaacctggaatcaatctatcgctctccgactggaactgtttgggtgtgatatatac

SEQ ID NO: 2333 - DNA, 6672 bp, Artificial Sequence
  derived and/or modified sequence
atgttccctgggtgccccaggctgtgggtgctggttgtcttgggaacctcttgggtcgggtgggggtctcaggggactgaggctgcccaactgaggcagttttatgttgccgcccaaggaattagttggtcttatcgacctgagcctacgaactcaagtctgaatctgtcagttactagctttaaaaaaatcgtttatcgcgagtatgagccctattttaaaaaagaaaagccacagtcaactatttctggtctgctcgggcctaccctctacgccgaagtgggtgatatcatcaaggtgcacttcaaaaacaaggccgacaagccactgagtattcatccgcagggcatcaggtattccaagcttagtgagggcgcgagttatcttgatcacacgttccccgccgaaaagatggatgatgccgttgccccggggcgtgaatacacatatgagtggagcattagtgaggactctgggccaacgcatgacgacccgccttgtctgacccacatctattactcacatgagaacctgattgaggacttcaatagtggattgatcggcccgttactcatctgcaagaaggggaccttaactgagggcgggactcagaagactttcgataagcagatcgtcctgctgttcgctgtcttcgatgagtctaagagttggtcccagagttcaagcctgatgtacaccgtaaatggttacgtgaatgggaccatgccagacatcacagtgtgcgcccacgatcatatatcatggcacctgctgggcatgtctagcggtcccgagcttttctctattcacttcaacggtcaagtgctcgaacagaaccatcacaaagtcagcgcgatcacccttgtctctgccacctccacaacagcgaacatgactgtgggacctgagggaaagtggattatttccagtctgacacccaaacatctacaggcaggcatgcaagcctatatcgacattaaaaattgccccaagaagacacggaatctgaaaaagatcaccagagaacaacgacgacacatgaagcgttgggagtactttatagcagctgaggaggtcatttgggattatgcacccgtgattcccgccaatatggacaaaaaataccgatctcagcatttagacaacttctctaatcagattgggaaacactacaagaaggttatgtacacacaatacgaggacgaaagcttcactaagcacacagtcaaccccaacatgaaggaagatgggatcctgggtcctataattcgggcacaggtccgcgacaccttaaaaatagtatttaaaaacatggcctctaggccctacagtatttatccacatggcgtaacattttctccttacgaagatgaggtcaacagctctttcaccagtggcagaaacaacaccatgattcgagcagttcagcccggagagacctatacatataagtggaatatattagagttcgacgaacctacggagaatgacgcgcaatgtcttacccgtccatactacagcgatgtggacatcatgcgagacatcgctagcggacttatcggcctgcttcttatctgtaagagtcggtctctcgataggaggggcatccagcgtgcagctgatattgaacagcaggctgttttcgctgtgtttgatgaaaacaaatcgtggtacctggaagataacattaataagttctgtgagaacccggacgaggtgaagcgcgatgatcctaagttctacgaatctaatataatgagcaccattaatggctacgttccagaatcaatcaccactttgggcttttgctttgacgatacagtccaatggcacttttgcagtgtgggtacacagaacgagattcttactattcactttacaggacatagcttcatctacggaaagcggcacgaggacaccctcactctgtttcccatgagaggggaatccgtcaccgtgactatggacaatgtaggcacttggatgctcacaagcatgaacagttctccacgctccaagaagctgcgccttaagtttagggacgtgaaatgcatccctgatgacgatgaggattcctacgagatcttcgaaccccctgaatctactgtgatggccacaagaaagatgcatgatcgcttggagccggaggacgaagagtccgacgctgactatgattaccaaaatcgcctggctgcagcgctgggtatccgatcttttcgcaactcctccctgaatcaggaagaagaggaattcaacttgaccgcattggccctggaaaacgggactgagtttgtcagctccaacacagatataatcgtcggtagtaattacagttccccctcaaacatctccaagtttactgtgaacaatctcgccgagccccaaaaggcaccttctcaccagcaggcaacaactgctggcagccctcttaggcatctcattgggaagaacagtgtcctcaactcgtccactgccgagcattcctctccctactcagaggacccgatagaggacccattacagccggatgtgaccggaatcagattgctgtcactaggcgccggggaatttaagtcacaggaacacgccaaacacaaaggcccaaaggtggaacgcgatcaagccgctaaacaccggtttagctggatgaagctgctcgcgcacaaagttggacgtcatttgtctcaggacaccgggagcccttctggtatgcgtccctgggaagaccttccctcccaagacaccggttccccatccaggatgagaccgtggaaggatccaccaagcgatctcctgctgctgaaacagagtaactctagcaaaatcctggtgggtcgttggcatcttgcatcagaaaaggggtcttacgaaattatccaggatacagacgaggacaccgctgtgaacaattggctcatctcaccgcagaacgcgtcccgtgcctggggcgagagcacgcccctggcaaataagccagggaagcagtctggccatcctaaatttccacgggttcgccacaagtctctgcaggttcggcaggatgggggtaagtcgcgcctgaaaaagtcacagttcctcatcaagacgcgtaagaaaaaaaaagagaaacacacccaccacgctccactgtctccccggacgtttcacccgcttaggagcgaggcgtacaacacctttagtgaacggcggctgaagcactccctcgtgttacataagtcaaacgaaactagtctcccaaccgatcttaatcagactctaccatctatggacttcggctggatcgcctcactccctgaccacaaccaaaattcctctaatgacacaggccaggctagctgtccgcctggcctataccaaaccgtccccccagaagaacactaccagacgttcccaatccaggatccggaccagatgcatagcacctctgaccccagccacagatcatcttctcccgagttatccgagatgctggaatacgacagatcccataagtcctttcccaccgatatctctcagatgtctccttcgtccgagcatgaggtttggcagaccgtgatctctcctgacttgagccaagtaactctctcacctgagctgtcacaaactaatctctccccagatctctcccacactaccctcagtccggagctaatccagcgtaatctgtcacccgctctgggccagatgcccatttccccggatctgtctcatacaacactgtctcctgacctgtctcacaccactctttcactggatctcagtcagaccaacctcagccccgagctgagtcagacaaatctctcacccgcgctgggtcagatgccactctctcctgacctaagtcataccactttgtctctggacttctctcagaccaacctctcacctgagctgagccatatgacgctgagcccagaactgtctcaaaccaacctgtctcctgccttggggcagatgccaatctcacctgacctatcccatacgacgctgtccctggacttttcccagacaaatcttagccccgaacttagccaaacaaacctcagtccagcactgggacagatgcccctgagtcctgatccttctcatactacactgtccctggatttgtcacagactaatctgagccctgagctgtctcagacaaatctttcaccagatctgagcgagatgccccttttcgctgacttgtctcagatccctttgacgcctgatcttgatcagatgacgctcagccccgatctcggagagacagacctatctcccaacttcggccaaatgagcctctcccccgacctgagccaagtgaccctgtcacccgacattagtgataccactctgctcccagatctgtcacagatttcacccccacccgacctagatcagattttctacccctctgaatccagtcagtccctattgcttcaagaatttaatgaatctttcccttatcccgatctggggcaaatgccctccccaagcagccccacactgaatgatacctttctgagtaaagagtttaacccactggtcattgtgggcctgagtaaggacgggactgattatatcgaaatcatcccgaaagaagaagtccagtctagtgaggatgactacgctgaaatagactacgtgccttacgatgatccgtataagaccgacgtgaggacaaacataaattccagcagggacccagacaatatcgcagcctggtaccttcggagcaacaatgggaaccggcgtaattactacatcgccgccgaagagatctcatgggattactctgagttcgtccagagggagaccgatatcgaggactccgacgatatcccggaagatactacctacaagaaagtcgttttccgaaagtacctcgattccaccttcaccaaaagggaccctcgaggtgaatacgaagagcacctgggcatcttgggtccgattattagggctgaagtcgatgacgtaattcaagtgcgttttaagaacttggcgtctaggccatacagtctccatgctcatggtttaagctatgagaagtcctccgagggcaagacctatgaagacgatagtcctgaatggttcaaggaagacaacgcagttcagcccaattcttcctacacatatgtttggcatgcgactgagaggtctggccctgagtctcccggttctgcttgtagggcatgggcctattatagtgccgtgaatccggagaaggatattcactctggccttatcggtcctctgctgatctgtcaaaaaggcattctgcacaaagactccaacatgcccatggatatgagggagttcgtgctgctgtttatgacatttgacgagaagaaaagctggtattacgaaaaaaaaagcagatcctcgtggcggctgactagtagcgaaatgaagaagagtcacgagtttcatgccatcaatgggatgatctacagcttgcccggtctgaaaatgtatgaacaggagtgggtgcggttacacctgctgaatataggcggaagccaggatatccacgtggtccacttccacgggcaaaccctgctggaaaatggaaacaaacagcaccaactgggggtatggcctctgttgcctggaagttttaagaccctggaaatgaaagcgtccaagcccggctggtggctgctaaacacagaagtgggggaaaaccaacgggcaggaatgcaaacgcccttcctgattatggatcgagactgtcggatgcctatggggttgtctacagggatcatctccgactcacaaattaaagcgagtgaatttctgggctattgggagccaaggttggcaagattgaacaatggcggtagctacaatgcctggagcgttgagaagctagcagccgagttcgctagcaagccatggatccaagttgacatgcagaaggaagtaatcatcacgggcatccaaacacagggagcgaaacactacttgaagtcatgttacaccaccgaattttatgttgcctactcgtccaatcaaatcaattggcaaatttttaagggcaattcaactcgaaacgtgatgtattttaacggcaactcggacgctagcactatcaaggaaaatcagtttgatcctcccatagtggctaggtacattcgtatctcccctacccgggcatacaacaggccaactctgagactagagttgcagggatgcgaggtgaatggctgcagcaccccgctgggaatggagaacggaaagatagaaaataagcagatcaccgcatcaagcttcaagaagtcctggtggggagactattgggagcccttccgtgcacgtcttaatgcgcagggacgcgttaatgcctggcaagcgaaggccaacaataataagcaatggctagagatcgatctgctgaagatcaagaaaataactgccataatcactcagggctgtaagtctctttccagcgagatgtacgtcaagtcttacactatacactattccgagcaaggcgttgagtggaagccatacaggctaaaatcctcaatggtcgataagatcttcgaaggcaataccaatacgaagggccacgtgaagaacttcttcaacccaccgatcatcagtagattcatccgtgtaatccctaagacgtggaaccagtctatcgccttacggcttgagctgttcgggtgcgacatctac

SEQ ID NO: 2334 - DNA, 6672 bp, Artificial Sequence
  derived and/or modified sequence
atgttcccaggctgtccaaggctctgggtcctcgtcgtgctgggtaccagttgggtgggttggggtagtcagggaacagaggctgctcagctcagacagttctatgtggcggcacagggcatttcttggtcatatagaccggagcctactaattccagccttaacttgtctgtgacctcttttaagaagattgtttacagagaatacgaaccatacttcaaaaaggagaaacctcagtcaacaatctcaggtctccttggccctactttgtacgctgaggtgggcgacattattaaggtgcactttaaaaataaggctgataagcctctctcaatacaccctcagggaattaggtattccaaactttccgagggtgccagttacctcgatcacacgttcccagctgaaaaaatggatgacgctgttgcgcccggtcgcgaatacacctacgaatggtccatctcagaggattccggccctacccatgatgaccctccctgtttgacgcatatctattattcccacgagaatttgatcgaggacttcaacagcggactgatcggtccgcttctgatctgcaagaaaggcacgctgaccgagggaggaactcaaaagacatttgataaacagattgtccttcttttcgccgttttcgacgaatcaaagagttggtcacaaagctcttctctcatgtataccgtgaacggttatgtgaacggaaccatgccagatattaccgtgtgcgctcacgatcatatctcatggcatttgctgggtatgtcctcaggaccggagttgttctccatccactttaatggtcaggtcttggagcaaaaccaccacaaagtgtccgcgatcacactggtgtccgctacaagtaccactgccaacatgacggtaggacctgagggcaagtggattatctcaagcctgacccctaaacacttgcaagccggaatgcaagcttacatcgacatcaaaaattgtcctaaaaaaacgagaaacctgaaaaagataacaagagaacaacgcagacatatgaaacgctgggagtattttatagcggcagaagaagtgatttgggactatgcccctgtgatacctgccaacatggataagaagtacagaagtcaacacctcgacaacttcagcaatcagatcggtaaacattacaagaaagtaatgtatacacagtacgaagacgagtccttcaccaagcatactgtgaatcccaatatgaaggaggacggaattttgggccctatcataagggcccaggtaagagacacactgaaaatcgtgtttaagaatatggcatccagaccctatagcatttatcctcacggagtgactttctccccctacgaggacgaggtgaatagttcctttacatctggtagaaataacactatgatcagagcggtccaacccggtgaaacctacacatacaagtggaacatcctcgaattcgacgagcctaccgagaacgacgcccagtgccttactagaccgtattattctgacgtagacatcatgagggatatagcatccggcttgataggtctgcttctgatttgcaagtccaggtcattggacaggcgcggcattcagagagcagctgacattgaacaacaggctgtgtttgccgtttttgacgagaacaagtcatggtacctggaggataatataaacaagttctgcgaaaatcctgacgaggtgaagagagacgacccaaagttttacgaaagtaatattatgagcactattaatggatatgtcccggaatctattacaacgctgggattctgctttgatgataccgtgcagtggcacttctgttccgtgggtacgcagaatgagatcctgaccatccacttcactggtcattccttcatctacggaaaacgccatgaagatacacttacgctctttccaatgaggggtgaatctgtaacggtcaccatggataatgttggcacgtggatgctcacgagtatgaactcttccccacgctctaagaagctccgccttaagtttcgcgatgtgaagtgcatacccgacgacgatgaggattcttacgaaattttcgaaccgccagagtcaaccgtaatggcgaccagaaagatgcacgacaggctcgagcctgaggacgaagagagtgacgcagattacgactaccagaacaggctcgccgctgccctcggaatccgctccttcaggaactcttcactcaaccaggaggaggaggagttcaacctcacagcgttggccctggagaacggtacggaattcgtttcaagtaatactgacattattgttggaagcaattactctagcccgtcaaacatcagtaagttcacggtcaacaatttggctgagccacagaaggccccctctcatcagcaagcgaccacagcgggatctcccctgagacacctgatcggtaaaaattccgtattgaattcatccactgccgagcactcctccccttactctgaagatcccattgaagaccctttgcagcctgacgtgaccggtattcgccttctctccctgggcgcgggcgagttcaagtcccaggagcacgctaaacacaaaggaccaaaggtagagagagaccaggctgccaagcatagattcagttggatgaagttgctggctcacaaagtgggaagacatctgagtcaggacactggatcaccttcaggaatgagaccttgggaagaccttccatctcaggacacgggaagcccaagtaggatgcgcccatggaaggacccacctagcgacctgctgctcttgaaacaaagtaacagttcaaagatcctggtcggacgctggcatctcgccagtgaaaaaggttcttatgagataatccaggatactgatgaagacacagccgttaacaactggctcatcagcccccagaatgcaagcagggcttggggcgagtctacgcccctggctaataaaccaggcaagcagtctggtcatcctaagtttccaagggtcagacacaaatccctgcaggtcaggcaagatggcggtaagtcccgcctcaagaagagtcaattccttatcaaaacacgcaagaaaaaaaaagagaagcacacccaccatgcccctctgtctcctaggacttttcatccattgagaagtgaggcatacaacacctttagcgaaaggagactgaagcattctttggttttgcacaagtccaacgagacttctctgccaactgatctcaaccagacgctgccaagcatggactttggttggatcgccagtctgcccgaccataatcaaaactcatccaacgatacgggacaggcctcatgccccccaggcctttaccagaccgtccccccagaggagcactaccagacctttccaatccaagaccctgaccaaatgcactctacttctgatccatcccataggagtagctcacctgaactctctgagatgctggagtacgacagatcccataagtccttcccgaccgacatctctcaaatgtctccatcaagcgaacacgaagtatggcagactgtaatctcaccggacttgtcccaggtgacgctgagtcccgagcttagccaaaccaacctcagccccgatttgtcacacactactttgagccccgaattgatccagcgcaatctgtctcccgccctcggacagatgccaatctcccccgacctctcccatacaactctcagtccagatctctcccacacaactctttctttggacctgagccaaaccaacctttcacccgagcttagccagaccaacctgtctccggcattgggccagatgcctctgtccccagatctcagccacaccaccttgagcctggattttagccagacgaacctgagtccggagctttctcacatgactctgagtcccgagctttcccaaaccaatctttctccagccctgggtcagatgccaatctcacctgaccttagtcataccaccctttcactggatttttcccagaccaatttgagtccagagctgagccagactaacctttcacctgcacttggtcagatgcccctctctccagatccatcacacactaccttgtcattggatctgtcacaaaccaacctgtcacctgagctctcccaaacaaacttgtctcccgatctgtcagagatgccgttgtttgctgatttgtctcagattcctctgactccggaccttgaccagatgacactcagccctgaccttggagagacggatcttagtcctaatttcggccagatgtccctgagccccgatctgagccaagtgacattgtccccggatatctcagacacaaccctcttgcctgatctgagccagatctccccgcccccagatctggaccagatcttttacccttccgagagcagtcagtcactgctgctgcaggaatttaacgaatccttcccttatccggacctgggacagatgcctagcccgagcagccctaccctgaatgacactttcctgtccaaagagtttaaccctctggtgatcgtgggtttgtccaaggatggcacggactacattgagattatccctaaagaggaagtgcaatcatccgaggatgactacgccgaaattgactacgtcccatacgacgacccttacaagaccgatgtacgcacaaacattaacagtagtcgcgacccggataatatagctgcctggtatttgaggagcaataatggtaatcgcagaaactactatatcgccgcagaagagatcagctgggattactccgaatttgttcaaagggagacagatatcgaggactctgacgacatcccggaagacaccacttacaagaaagtcgtctttagaaagtatcttgactctaccttcaccaagagagatcctagaggcgagtacgaagaacacctcggaattctgggaccaataattcgcgctgaggtggacgacgttatccaggtcaggttcaagaatctcgcctcccgcccctactctttgcacgctcacggtctgtcttacgaaaagtcctctgagggcaagacttacgaggacgatagtcctgagtggttcaaggaggacaatgccgtccaacctaactcatcctatacatatgtctggcacgcgacagagagatctggacccgagtcccccggcagcgcatgtcgcgcatgggcatattacagtgcagtgaatccagaaaaagatatccacagcggcctgatcggtccattgcttatttgccagaaaggcattctgcacaaggattctaacatgccaatggatatgagagagttcgtgctgctgttcatgacgttcgacgaaaagaagtcctggtactacgaaaagaaatcccgctcatcctggcgccttactagtagcgagatgaagaaaagtcacgagtttcacgctatcaatggcatgatttactctttgccaggtttgaaaatgtacgaacaggaatgggttaggctgcatcttctgaacatcggaggatcccaggacattcatgtggtgcattttcacggtcagacactgttggagaatggaaataagcagcaccaactgggagtttggcctctcttgcccggttctttcaagaccctcgaaatgaaggcaagtaagcccggttggtggttgttgaataccgaggtcggcgaaaatcagcgcgcaggaatgcagaccccattccttattatggacagagattgcaggatgcccatgggcctgtctacaggcataatatccgattctcaaattaaagcctcagagtttctgggatactgggaaccacgcctcgcccgccttaacaacggaggttcatacaacgcatggagcgtcgagaagttggccgctgagttcgcaagcaaaccatggatccaggttgacatgcagaaggaagttattatcacaggcatccagactcagggagcaaaacactacttgaaatcttgctacacaaccgagttttacgtagcatactctagtaaccagatcaactggcaaatcttcaaaggcaattctacacgcaatgtgatgtacttcaacggcaattccgacgcttcaaccatcaaagaaaaccaattcgatccaccgattgtagctcgctacatacgcatcagtcctacgagagcatataaccgccctacgctgcgcctcgagctgcagggctgcgaggtaaacggttgctcaacaccactgggcatggagaatggaaagattgaaaataaacaaatcacagcttcatcctttaaaaagagttggtggggtgattactgggagcctttcagagccagactcaacgcccagggcagggtaaacgcttggcaggctaaagcaaataacaacaagcagtggttggagatcgacttgctgaagatcaaaaaaattactgcaatcatcacccagggatgcaaatccctgtctagtgagatgtacgtgaagtcctacacaatccattattcagaacagggcgtggaatggaaaccgtacaggctgaagagttccatggtagataagatctttgaaggtaacactaacactaaaggccatgtgaagaatttttttaatccccctatcatttccaggttcatccgcgtgatccctaagacctggaatcagagcatcgcccttaggctcgaactttttggttgcgacatctat

SEQ ID NO: 2335 - DNA, 6672 bp, Artificial Sequence
  derived and/or modified sequence
atgtttccaggctgtcccagactgtgggtgcttgtggtacttgggacatcgtgggttggatggggatcacaggggactgaggctgcccagctgaggcagttctacgtcgcggcacaggggattagctggagctatcgacctgaaccaaccaatagctcactcaacctatctgttacttcctttaagaaaatcgtatatcgtgagtacgaaccttattttaaaaaggaaaagccccaatctacaatctccgggctgctgggcccaaccttgtacgccgaggtgggggatatcattaaggtgcatttcaagaacaaagcggacaagccactttctattcatcctcagggaatcagatactctaaactgagcgaaggcgccagctatctggatcacacattcccggcagagaaaatggatgacgccgtggcacctggacgcgaatatacgtacgagtggagcatctccgaggatagcggccccacacatgacgatcctccttgcctcacacatatctattacagtcacgagaacctcatcgaagattttaactccggcctgattggcccccttctcatctgtaaaaaagggaccctcacggaaggcggtactcagaaaaccttcgacaaacagattgtgctgctcttcgccgttttcgatgaatctaagtcttggtcccagtccagttcccttatgtacacagtgaatggttatgtaaacggaacgatgcccgatatcactgtatgtgcccatgatcacatctcatggcaccttctggggatgagtagcggtcccgaattgttctccatacactttaacggccaggtcctggaacagaatcaccataaggtcagcgctatcactctggtcagtgctaccagcactaccgctaatatgacggtgggaccagagggcaagtggatcatctcttcattgacgcccaagcatctgcaggccgggatgcaggcatatattgatatcaaaaactgcccaaagaaaacaaggaacctgaaaaagattacgagggagcagagacgacatatgaaaagatgggagtatttcatcgcggccgaagaagttatttgggactatgcccccgtgatcccagccaacatggacaaaaaatatagatctcagcacctggacaactttagtaaccagatcgggaaacactacaagaaggtgatgtacacacaatacgaggatgaaagcttcacaaagcacacggtcaacccaaacatgaaggaagacggcatcctcggtcctatcataagggcgcaggtgcgtgatacactcaagatcgtgttcaaaaatatggctagcaggccttactcaatttacccccatggtgtcacattcagtccatacgaagatgaggtcaactcctcatttaccagtgggcgtaataatacaatgattagggcagtacagccaggtgagacatacacgtataagtggaacattctcgagttcgatgaacccaccgagaatgatgcccaatgcctcacaagaccatattattccgatgtagatatcatgagagatatcgcatctggcctcattggcctcctgctcatctgcaaatcccgaagtctcgatcgaagggggatccagcgcgcagccgatattgaacagcaggcagtctttgccgtttttgatgagaataagagctggtatctcgaggataacattaataaattctgtgaaaatccagacgaagtaaaacgcgacgatccaaagttctacgaatctaacattatgtctacgattaatgggtacgttccagagagtatcaccacactgggcttctgctttgacgatactgtacaatggcatttctgttccgtcggcactcagaacgaaatcctgacaatccacttcaccggccattcatttatctacggtaagagacatgaagatacgctcaccctgttcccgatgcggggcgagtccgtcacggtgaccatggataatgtgggaacttggatgctcaccagcatgaatagctctccacgcagcaagaagctgcgattaaagtttcgggacgtgaagtgcatcccggacgacgatgaagatagttacgaaatttttgaacctccagagagcactgtgatggcgacacgaaagatgcacgatcggctcgaaccagaggacgaagagtccgatgcagattacgactaccagaatcgcctggctgcagcactgggtatacgctcatttcgcaattcctcccttaaccaagaggaagaggaattcaatctgacagctctggcgctggaaaatggtactgagttcgtgtcatcaaacaccgatatcatagtggggagcaactatagtagccctagcaacataagcaaattcacggttaataatcttgctgagcctcagaaagctccatcccaccagcaggccacaaccgcgggctctcccctgcgccatctgatcgggaaaaacagcgtcctcaacagcagcaccgccgaacactcaagcccttactctgaagaccctatagaagaccccctgcagccagacgtgaccggcataaggcttctcagtttgggggccggagaatttaaatcccaggagcacgcgaaacacaaaggaccaaaagtggagagagaccaggccgccaagcacagatttagctggatgaaactcctcgcccataaggtggggagacatctgtcccaagataccggaagtccgtctgggatgcgcccctgggaagatctcccttcccaggatactgggtccccatctaggatgaggccttggaaagatcctcctagtgatctgctcctcttaaaacagagcaattcatcaaagatcctcgtgggcagatggcatttggcttctgagaaagggtcctacgagatcatccaggacactgatgaagatactgcagtgaataactggctcatctccccccaaaacgcatcacgtgcatggggggaatcaacgccattggcaaataagccagggaagcagtcggggcatcccaagtttcccagggtgcgacacaaatccttacaggtgcgccaggatggtgggaaaagccgcctgaaaaaaagtcagttcctgattaaaacccggaaaaagaaaaaagagaagcacacgcatcatgctcccctgagcccacggaccttccaccccctgcgcagtgaagcatataacactttcagcgagagacgcctgaagcacagcctggtgttgcataaaagcaatgagacttcgctcccaaccgatctcaatcagacgcttccttcaatggatttcgggtggatcgcttctctcccggatcacaaccagaactcctcaaatgacactgggcaggccagttgcccgccggggttatatcagacagtaccgcccgaggaacactatcaaaccttccccatccaggacccggatcagatgcattcaacatccgatccatcccaccggagctcttcgccggaactgagcgagatgctcgagtacgacaggtcccacaagagcttccccacagacataagccaaatgtctccctcatcagagcacgaggtttggcagactgtcattagtcccgatctctctcaggtgacgctttcaccggagctgtcccagaccaatctgtctccggacttgtctcacacgacattgagccccgaactaatccaaagaaacttgtctcctgcgctaggacagatgccgatttctccagacctgtctcacaccacgctgtccccggacctctcacatacgacgctgtcattggatctctcccagaccaacctgtcgcctgaactgtcacaaactaatctctcccccgcgctgggccagatgccacttagccctgaccttagtcacacgacactatctcttgacttctcccagaccaacctttcccccgaacttagccacatgaccttgtctcccgagctgtctcaaaccaacctgagccccgccctcggccaaatgccgatatcacctgacctgagccatacaacattgtcactggacttctctcaaacgaatctgtccccagagctgagccagacaaacctcagcccggccctcgggcagatgccgctctcccccgatccgtcccatacaacactctcactggatctttcccagacaaatttgagccctgagttgtctcaaaccaatctgtctccagacctgtccgagatgcctctattcgctgacctgagccagatcccccttacgcctgacctggatcagatgaccctttcgcccgatctgggcgaaaccgatctaagtccaaatttcggccaaatgagcctttcccccgatctctcccaagttacgttgtccccagatatctccgacacaactctgttacctgatctgtcccagatctcgccacctccggacctagaccagattttttacccctcagagtctagtcagtcgctgctgctacaggagtttaatgagtctttcccatacccagatttaggccagatgccatccccgtcctcaccaactttgaacgataccttcctttctaaagaatttaatccactggtaatcgtggggttgagcaaagacggcacagattacatcgagattatcccaaaagaagaggttcagagtagtgaggacgactacgcggagatagactacgtaccatacgacgacccctataagacggatgtgaggactaacatcaactcatctcgggaccccgacaacatagccgcttggtatcttaggagtaataacgggaatagaaggaattattacattgcagctgaagaaataagctgggactattccgaattcgtgcaaagggaaactgacattgaagattctgacgacattccggaagacacaacatacaaaaaagtggtgttccggaaatacctggacagtacatttaccaagcgggacccacgcggggagtacgaggaacacctgggcatcctcggtccgattattcgagccgaggtggatgacgttattcaggttcgtttcaagaacctggccagcagaccctatagcctgcacgctcacgggctctcttacgagaaaagctccgaagggaaaacgtacgaagatgattctccggaatggtttaaagaagacaacgcggtacagcccaacagttcatacacttatgtttggcacgctaccgagcgctccggacctgagtcgcccggctcagcatgtagggcttgggcctactactcagccgtgaaccccgaaaaggatattcactccggattgattggccctctccttatatgtcagaagggtattctacataaggattccaacatgcctatggacatgcgcgaattcgtattgctgtttatgacatttgacgaaaaaaaaagctggtactatgagaagaaatcccgaagctcatggcggctgacttcctctgaaatgaagaaatcccacgagtttcatgccataaatggcatgatttacagcctgccagggttgaaaatgtacgaacaggaatgggtcaggttgcatttgctcaacatcggggggagccaagatatacacgttgtgcacttccatgggcagacactcctagaaaatggcaacaagcagcatcagctcggagtatggccactcttaccaggtagctttaagaccctcgagatgaaagctagcaaaccaggctggtggttgctgaacaccgaggtaggtgagaaccaacgggctgggatgcaaaccccattcttaataatggatcgggattgtcggatgccaatgggcctctccacgggcatcataagtgattcccaaataaaggcatccgagttcctgggatactgggagcctagattagcacgcctgaataatggagggtcttataacgcttggtcggttgagaaactggccgccgagtttgccagcaagccctggatccaggtcgatatgcaaaaagaagtgattattaccggaatccaaacacaaggagctaagcactatctgaagtcttgttacaccactgaattttatgtggcatactccagcaaccaaataaattggcagattttcaagggcaactccactagaaatgtaatgtacttcaatggcaatagcgacgcctcaacaataaaggagaatcagttcgatccccctattgtcgctcgctatatcaggattagcccaactagggcgtacaaccgacccacattacgtctggagttgcaaggctgcgaagtcaatggctgctctacccctttaggcatggaaaatggcaaaatagagaacaagcagatcaccgcctctagttttaaaaaatcctggtggggagactactgggaaccgttccgagcccgcctgaatgcgcaggggcgcgtcaatgcttggcaagcaaaagccaacaataataagcaatggctggaaattgacctcttgaagataaagaaaattaccgctattattacccagggctgtaagtcactcagcagcgagatgtacgtcaagtcttatacaattcattatagtgagcagggagtagaatggaagccatatagattaaagagctcaatggtggacaagattttcgagggcaatactaataccaaggggcatgttaaaaatttttttaatcctcctattatctctcgattcatacgggtgatacccaagacttggaatcagagtatcgccttgcgcctcgaactcttcggttgcgacatttac

SEQ ID NO: 2336 - DNA, 6672 bp, Artificial Sequence
  derived and/or modified sequence
atgttcccaggatgtccacggctttgggtactagtagtgctaggtaccagctgggtgggctgggggagtcagggcacagaggccgcccagctgcgccaattctacgtagctgcgcagggtatctcttggagttacaggccagagccgactaactcttctctgaacctgtcagtgacttcgtttaagaagatcgtctatagggagtacgaaccctattttaagaaggagaaaccgcagtcaacaattagcggactgctcggaccaaccctctacgccgaggtgggcgatatcatcaaagtacacttcaagaacaaggcggacaagcccttatctatacatccccagggtatccgctatagcaagctctctgagggggcctcctaccttgaccacaccttccccgccgaaaagatggatgacgctgttgcgcctggtcgagagtatacctatgagtggagtatcagtgaggactctggaccaacacacgatgaccctccctgtcttacccacatctattactcccatgagaatctgattgaggacttcaactcaggtcttatagggcctttgctcatctgcaaaaagggtaccctgacagaaggcggaacgcagaagacatttgataaacaaattgtgcttctctttgcagtgttcgacgaatcgaaaagctggagccaatcaagctctctgatgtacacagtgaacggttatgttaatggcacaatgcccgatataactgtgtgcgctcatgaccacatcagttggcacttgctcggaatgtcgagcgggcctgaattgttcagcattcatttcaatgggcaggtgctagagcaaaaccaccacaaggtatccgctattactctggtatcagctaccagcaccactgcaaacatgacagtggggccagaagggaagtggataatcagctctttaacacccaagcacctgcaggcaggaatgcaggcatacatagacatcaaaaattgcccaaagaagacaagaaatttgaagaagattacacgagaacaaaggagacatatgaagcggtgggagtattttatagcagcggaggaagtcatttgggattacgcccccgtgattcctgcaaacatggataagaaatacaggagccagcatctcgataacttttcgaaccaaattgggaaacactataaaaaagtcatgtacactcagtatgaagatgagagcttcacaaagcacactgttaatcctaacatgaaagaagacggcatcttaggtccgatcatccgcgcccaagtgcgggacactctgaagatcgtattcaaaaatatggcgtctagaccttactccatataccctcatggcgttactttctcaccatatgaagacgaagtaaacagcagcttcacgtctggtaggaacaacacaatgatccgcgctgtacagcccggggagacttatacatataagtggaacatcctagagttcgacgaacctaccgagaacgacgctcagtgtctcactagaccatactatagcgacgtggatataatgcgcgacatcgcttctggactgatcggccttctgcttatttgcaagtccaggtcgctcgatagacggggaatccagcgagccgccgacatagaacagcaggcagtgtttgctgtcttcgacgagaacaagtcctggtatctcgaagataacattaacaagttttgcgaaaatccagatgaggtgaagagggatgatccaaagttttacgagtccaacatcatgtccacgattaacgggtatgtacccgagtccataacaactctcggattctgttttgacgataccgtccagtggcacttttgctcagtgggaacccagaatgaaatcctcactattcatttcacgggacactccttcatttacggaaaacggcatgaggatacactgaccttgtttcccatgcgcggcgaaagtgttactgttacaatggataacgtgggtacgtggatgttgacaagcatgaattccagcccacgcagcaaaaaattgaggcttaaattccgagacgtgaagtgcatcccagacgatgatgaggactcctacgagattttcgaaccgcctgagtccacggtcatggcgactcgtaagatgcacgatcgattagagccagaggacgaggagagtgatgccgactatgattaccaaaacaggctggccgcagcccttggaataagatcttttaggaattcctctttaaaccaggaggaggaagaatttaacctgaccgccctggccttggagaatgggactgaatttgtctctagtaacaccgatataatcgttggaagtaactattcaagtcctagcaacatatccaagttcacggtgaacaaccttgccgagcctcaaaaggcaccttctcaccaacaggcaactaccgcaggctctcctctgcggcacctcatcgggaaaaacagcgttctgaacagcagtactgccgagcactcaagcccctacagcgaggaccccattgaggacccccttcaaccagatgtgactggcattaggctactctctcttggagccggcgagttcaagtctcaggaacacgcaaagcataagggcccaaaggtcgaacgcgatcaagcagctaagcacagattcagttggatgaagctcctcgctcacaaggtgggccgccacctgagccaggacacgggctcaccttccggaatgagaccctgggaggacctgccaagccaggacaccgggtcgccatccaggatgcgtccatggaaggacccccctagtgatttgctgttgctgaagcaatctaactcctccaagatcctggttggcaggtggcatttggccagtgaaaaggggagttatgaaatcattcaggataccgacgaagatactgctgtgaataactggctgatcagcccccagaacgcttcgcgtgcttggggcgaatcaacccctctagccaataaacctgggaagcagagcggacacccaaaattccctcgcgtgagacacaagagtttgcaggtgaggcaggatggcggtaagtcacgcctcaaaaagtctcagttcctaatcaagacacgaaagaagaagaaggagaagcatacccaccatgccccgttaagccccagaacctttcacccactgagatctgaggcctataacaccttcagtgaacggcgcttaaagcattctctggtgcttcataaatctaacgagacctcactcccgaccgaccttaatcagacactgcctagtatggattttggctggatcgcatccctccctgaccacaaccaaaattcttccaatgatactggtcaggcctcctgccccccgggcctgtaccaaacggttccgcccgaggaacactaccagacgttccccattcaggaccccgaccagatgcactcaacaagcgatccctcccataggagttcttctccggagctgtctgaaatgctggagtacgacagaagccataaatccttcccgaccgacataagtcaaatgtcgcctagctctgagcacgaagtctggcagacagtgattagtcccgatctttctcaggtgaccctgtctccagaactgtcccagacgaacctctcacctgacctctcccacaccacgctgtcccccgaactgattcagaggaacttgtcccccgccctgggtcagatgcccatttcacctgacttaagtcacaccactctaagccccgatttgagtcatactacactgtccctcgatctgtcacagaccaatctgagtcccgagctgagccagaccaatctgagtccagcgcttggccagatgcccctatctcccgacctgagccacaccaccctttccctggatttctcacagaccaatctctcgcctgagctgtcacatatgacgctgtcgccagagctgtctcagacgaacttatctcccgccttagggcaaatgcccatcagccctgacctgtcccacacaacactaagtcttgacttctcccagacgaatctgtcccccgagctctcacagactaatctatcccccgcgctggggcagatgcccctgtcgcctgaccctagccatacaaccctcagcctcgacctatcccagactaatctgagtcccgaactaagccagactaatctttcccccgacctctccgagatgcccctgttcgctgatctgtcacaaatacctctgactcctgaccttgaccagatgaccctatcccccgatctaggggaaactgaccttagccccaacttcggacaaatgtccttatctcctgatctcagccaggtgacactctcacccgatatcagcgacacgacactgctgcccgatctgtcgcagatatccccgccaccagacctcgatcagatcttttatccaagtgaatcatcccagtctcttctactccaagagttcaatgagtccttcccctaccctgatctgggccaaatgccttccccctcttctcccacactaaatgataccttcctttcaaaagagtttaatcccctcgtgatagttggtctgagcaaagatggaacagactacatcgaaataataccgaaggaggaggtgcagtcctcggaagatgactacgctgagatcgactacgtgccttacgatgatccctataaaacagacgtgcgtaccaatatcaacagctctagggacccagacaatatcgcagcgtggtatttacgcagcaataacggcaaccgtcgcaactactatatcgccgcggaagagatatcatgggattattcagagttcgtgcaacgcgaaaccgatatagaggattccgacgacatacctgaggacacaacatataagaaggttgtatttcggaagtacctggactccactttcaccaaaagagacccacggggagagtatgaagaacacttgggtattctgggccctattatccgagccgaggttgacgatgtgatccaggtgcggttcaagaacctggccagtcgcccttacagcctccacgcgcatgggttgtcctacgagaagagcagcgagggtaaaacatatgaggacgatagtccagaatggttcaaagaggacaatgctgtgcagcccaattcaagctacacatatgtatggcacgcaacggagcgttccggccccgaatcccccggatctgcatgtagagcctgggcctactatagtgccgtcaaccctgagaaagatatccacagtgggctgattggcccactgctgatttgtcagaaagggatcttgcataaggacagtaacatgccaatggacatgagggagttcgtgcttttgtttatgaccttcgatgaaaagaagagttggtactatgaaaaaaagagccggtcgtcatggagactcactagttcagagatgaagaagtcgcacgaattccacgcgatcaatgggatgatctacagtctcccagggctgaagatgtacgaacaggagtgggtccggttgcatctcctgaatatcgggggctctcaggacatccatgtcgttcattttcacggccaaactctactggagaatgggaacaagcagcaccagttgggcgtctggccactgttgcctggtagctttaagaccctggagatgaaagcttctaaacccggttggtggctcctgaatacagaggttggcgagaatcagagagccggcatgcagacgccctttctgatcatggaccgggattgccggatgccgatgggactgagtacagggatcatttcggatagccagattaaggcctccgaatttcttggatactgggagcctcggcttgctagattgaacaatggaggaagctacaacgcctggtccgtggagaagttagctgcagagtttgcaagtaaaccctggatccaggtagatatgcagaaggaggttattataaccggaattcagacgcaaggcgccaagcactacttgaagtcttgctacacaaccgagttctatgtggcctactccagtaaccagattaactggcaaatttttaaggggaatagtactcgcaacgttatgtactttaacggaaacagcgatgcatctacaatcaaggagaatcagttcgatcccccaatcgtcgctcgatatatccgtatctccccaacgcgtgcttataatcgaccgacactgcgactggaactgcagggatgcgaagtgaatggctgttctacccccctgggtatggagaacggaaaaatcgaaaacaaacaaatcactgccagtagttttaagaagagctggtggggggattactgggaaccgtttcgagcgcgcctgaacgcacagggacgagtaaacgcctggcaagcaaaagcaaacaacaacaaacagtggctggagatcgacctcctcaagatcaaaaagataacggcaattattactcaaggatgcaaatcactcagtagcgagatgtacgtgaagtcttataccatacactacagcgagcaaggtgtagagtggaagccctaccgcctcaaaagcagcatggttgataagatttttgaaggcaacacaaacacaaaagggcacgtcaagaacttctttaatcccccaataattagcagattcatccgtgtgatacccaagacctggaatcagagcattgccctccggctcgaactttttggctgtgacatatat

SEQ ID NO: 2337 - DNA, 6672 bp, Artificial Sequence
  derived and/or modified sequence
atgtttccaggctgcccgcgactttgggtcttagtggttcttggtacgagttgggttggttggggttcccaggggacagaggccgcccagctccggcaattttacgtcgcagcacagggtatctcttggtcgtaccgccccgaacccacaaattcatcactcaatctttctgtcacgagcttcaagaagattgtctaccgcgagtatgagccatacttcaagaaagagaagcctcagtccacgatatctggccttttggggcctactttatacgcggaggtcggtgatatcattaaggtccatttcaagaacaaggcggataaaccgctctccatccacccacagggtattcggtactccaagctctccgaaggggcctcctacctggatcacacatttcccgcggagaaaatggacgatgcagtcgccccggggcgggagtacacgtacgagtggtcgatctctgaagactcgggacctactcatgatgatcctccttgtctgactcatatctattatagtcacgagaatcttatcgaagatttcaattccggtctcatcggaccacttctcatatgtaagaagggcacgctgacggagggcggtacacagaagacatttgacaagcagatagtgctgctttttgcagtctttgatgagtctaagtcctggagtcagagctcgtcgcttatgtataccgtcaatggctacgttaacgggactatgcctgacataaccgtttgtgcgcacgatcatatctcatggcacctgttagggatgtcgtccggtcctgaacttttctccatacattttaatggtcaggtgcttgagcaaaatcatcataaggtatctgcgattacccttgtcagcgctaccagcaccacggccaatatgaccgtcggccctgagggtaagtggatcatttcgtcactcactccaaagcatctacaagcggggatgcaggcctatatcgacatcaaaaattgcccaaagaagactcgtaatctgaaaaagattaccagggaacaaaggagacacatgaagcgatgggagtactttatcgccgcagaagaagttatctgggattacgcacccgtgatccctgctaacatggacaaaaagtatcgctcacagcacctggacaatttctcaaatcagattggtaagcattataaaaaagtgatgtacacgcagtatgaggatgaaagctttactaagcatactgttaatcctaacatgaaggaagatggtatcttgggtcccattatccgtgctcaagtccgcgatactctaaagatcgttttcaagaatatggcaagccggccttactctatatatccgcacggcgtgacgttttccccatacgaggatgaagtcaattcatctttcacgtccggtcgcaacaacactatgattcgcgcggtacagcctggagaaacctacacctacaaatggaatatcttggagtttgatgagcctaccgaaaatgatgcccaatgccttactcgtccgtactatagtgacgtcgatataatgcgtgacattgcgagcggactcattggcttgctcctcatatgcaaaagccgctcgctggatcgacggggtatccaacgagctgctgatatagagcagcaagcagttttcgctgttttcgacgagaacaaatcatggtacctggaggataatataaacaaattctgtgagaaccccgacgaggtcaagcgtgatgatccaaaattctatgagagcaacatcatgagtacgataaacggctacgtccctgagagcatcaccaccttgggcttttgcttcgacgataccgttcagtggcatttctgtagtgtaggtacacagaacgaaatcctcacgattcattttacggggcattcttttatttacggcaagcgacacgaggatacactaacactgttccctatgcgtggcgagtcagtaaccgttacaatggataatgtgggcacgtggatgctgaccagcatgaactcttctccacgctcgaaaaagttgaggcttaaattccgtgatgttaagtgcattccagacgatgatgaggattcatacgaaatttttgagccgcctgagagcaccgtcatggcgacacgcaagatgcatgacaggctggagcctgaggatgaggaatccgatgccgattacgactatcagaacagattggcggctgctttgggcataaggtcgttcaggaattcttcgttgaatcaggaagaagaagagttcaatttgactgccttggcactggaaaacggtactgaattcgtctcgtcaaacacagacattatcgtaggcagtaattattctagccccagtaacattagtaagtttacggtgaacaatctcgccgagccccagaaagctccgtcgcatcagcaggcaaccaccgccggctcccctctgcgtcacttgattggcaagaattctgttctaaattcatccaccgccgagcactcttccccctatagtgaggatcctatagaagatccactgcaaccagacgtaacggggatacgtctgctatctctcggtgcaggggaattcaaatcccaggagcacgcgaagcataaagggcctaaggttgaacgagatcaggcagccaagcaccgtttctcatggatgaagttgcttgcacataaagtcgggcgacatctctcgcaagacaccgggtcgccctctggcatgcgaccgtgggaggatttgccatcccaggataccggctctccttcacgtatgcgcccttggaaagaccctccatcggatcttctgcttctaaagcagtcgaacagtagcaaaatcttagtcgggcggtggcatttggcttctgaaaagggaagttatgaaatcatccaggatacagatgaagatacagccgtgaacaactggcttatctcccctcagaacgcctcaagagcttggggtgagtccacgcctctcgctaacaaaccaggtaagcagtcaggccatccgaaattcccacgagttagacacaagtctctgcaagtcagacaagatggcggaaaaagtcggttgaagaagtctcaattcctgatcaaaacacgtaagaagaaaaaggagaagcacacccaccacgcacctttgagtccgcgaactttccaccctcttcgttctgaagcctataacactttttctgagcgccgcttgaagcattccctagtcctccataagtccaatgagacctccttgcccactgatcttaatcaaaccctcccctccatggattttggttggattgcaagtctgccggatcacaaccaaaattcatcgaacgacacgggtcaggcaagttgcccccctggattgtaccaaactgttccgccggaggagcattatcagaccttccccatacaggatcccgatcagatgcatagtacttcggaccctagccacaggtcgtcctcgccggaactttccgaaatgctcgaatatgatcggtctcataagtcgttcccaactgacatatcccaaatgagtccctcaagtgagcatgaagtatggcagacagtgatcagcccagatctctcgcaggtgaccttgtcgccagagttatcgcaaacgaatctttccccggatcttagtcatactactctctctcccgagttgatccaacggaaccttagccccgcgctgggccagatgcccatctctccggacctgtcacataccacactctccccggatttgtcacacaccaccctgtctctcgacttgtcgcagacgaacctgagccctgagttgtctcaaaccaatctttcgccagccctcggtcagatgccgcttagtcccgacttgtcccacactacactgtccttggattttagtcaaactaacctcagtccagaactcagccatatgacactctctccagagcttagtcagactaacttgtcccctgcgttggggcaaatgccgatctccccggatcttagccacaccaccctgtcactggacttttctcagaccaaccttagcccggagctgtcccaaaccaatctctctccggcactgggacagatgccactctccccagacccatctcacacaaccctctctctcgacctttcgcaaactaatctatcgcctgaactatcccaaaccaatttgtcgcctgacctgtccgaaatgccattgttcgcagacttgtcacaaatcccactgacccctgatctcgaccaaatgaccctttcccctgacctgggcgagacagaccttagtcctaatttcggacagatgtctttgtcacccgatctctcgcaagtaacactcagcccagacatctccgacactaccctcctgcccgacctcagccagatctcgcccccgcctgatctggatcagatattttacccatcggagtctagccagtccttgctgcttcaagaattcaatgagagtttcccttaccccgatctgggccaaatgccctcgccctcctcaccgaccttaaatgataccttcctgtcaaaggagttcaatccccttgtgattgttggactctctaaggacggtactgattacatcgaaatcattcccaaggaagaagtgcagagctccgaggacgattacgctgaaattgattacgttccttatgacgatccttacaagactgacgtcaggacgaacatcaattcatctcgagacccagataatatcgcagcctggtatctgcgatcgaataacggtaacagacgcaattattacatagctgctgaggagatttcttgggactatagtgagtttgtccaaagagagacagatattgaggatagtgatgatatccccgaagatacaacatacaagaaggtggtgtttagaaaatatctcgattcgacttttacgaaacgtgatcctcggggagaatatgaagagcatctgggaatcctcggccccattatccgggcggaagtggacgatgtaattcaggtcaggttcaaaaatctcgcgtctcgtccctactcactgcatgctcatggtctttcatatgaaaaatcgtctgagggcaagacatacgaggatgattcccccgaatggtttaaagaagacaatgctgtccagcctaatagttcatacacatatgtctggcacgccactgagcgttcgggtccagaatcgccggggagcgcttgtcgtgcgtgggcctactactcggccgtgaacccggagaaggacatacatagtgggctcattggtcccctactgatatgtcagaaaggaatcctccataaagactctaacatgccgatggatatgcgggaatttgtattattgttcatgacctttgacgagaagaagtcctggtattacgagaagaaaagcaggtcgtcgtggcgtctcacatcctcggagatgaagaaaagtcacgaattccatgctataaacggaatgatttactcgcttcctggacttaagatgtacgaacaggaatgggtaagattacaccttctcaatattggcgggagccaggacattcacgtcgtgcatttccacggccagaccttactcgaaaatggaaataagcagcaccagctgggtgtatggccgctgttgcctggttcattcaagacgcttgagatgaaagcgagcaaaccaggatggtggctcctaaataccgaggtcggtgaaaaccagcgcgcgggcatgcaaactcctttcctgattatggatcgcgactgccgcatgcccatgggcctttcaactgggattatttccgatagtcagataaaagcaagcgaattcttggggtactgggagccacggctcgccagattgaacaatggaggttcttataatgcctggagcgttgaaaaattggcagccgagttcgcgtccaagccctggattcaggttgacatgcaaaaagaggttatcattacgggcatccagacacagggtgccaaacattatttgaaaagctgctataccacagagttttacgtcgcgtattcatctaaccagatcaactggcagatctttaaagggaactctacacgaaatgtgatgtacttcaacggcaactcagatgcctcgactatcaaagagaaccagtttgatccaccgattgtggcacgttacattcgcatatctccgactcgtgcttataaccggcctactctgcgcctggagcttcaaggctgtgaagtgaacggctgctcgacaccattaggaatggaaaatggtaaaatcgaaaataagcagattaccgccagttccttcaagaagagttggtggggagactactgggaacccttccgggcgcgtctcaatgcacagggacgagtcaacgcctggcaggctaaagcgaacaacaacaaacaatggttagaaatagacctcttgaagatcaagaaaatcaccgcaatcatcactcaaggctgtaagagtttgagtagcgaaatgtatgtgaaatcttatactattcattacagcgagcaaggagtggagtggaagccttataggctgaaatcgtctatggtagataagatcttcgagggcaacactaatactaagggccacgtcaagaacttctttaacccgcccattatctcgcgattcatacgagtaattcctaaaacgtggaatcagtcaattgcattacgccttgagctttttggctgcgatatctat

SEQ ID NO: 2338 - DNA, 6672 bp, Artificial Sequence
  derived and/or modified sequence
atgtttcctgggtgcccacgactttgggttcttgttgtgttgggcacgtcttgggttggctggggcagccagggaactgaggcagcccagctccgtcaattttacgtagccgcccaggggatttcttggtcctacagacccgagcctactaattcatctctgaacctgtctgttactagttttaagaagatagtgtatcgcgagtacgaaccttactttaagaaggagaaaccacagtccaccatttctgggttgctgggcccaactttgtatgcggaggttggagatataattaaggttcacttcaagaataaggcagacaagcctttgagtatacatccccaagggatacgttactcgaagctgagcgaaggtgcaagctatctagaccacactttcccagcagagaagatggatgatgctgttgcccctgggcgggagtacacttatgaatggtctatctcagaggacagcggacctacccatgacgatccgccatgccttactcatatctattactctcacgagaatctgatcgaggacttcaacagtggcctgattgggcccttgctgatctgtaaaaagggaactctgacagaaggcggcactcagaagacttttgacaaacaaattgtgctattgttcgcagtgttcgacgagtcaaaaagctggagccaatcgtcttctttgatgtatactgtcaacggctacgtgaatggcacaatgcccgacattactgtctgcgctcacgatcacatttcctggcacctcctcggaatgtctagtggtcctgaactgttttccatacacttcaacgggcaagtcctcgaacagaaccaccacaaggtatcagcgatcactctggtttctgcaacgagtaccacagctaatatgacagtcgggcctgagggcaagtggatcatcagctccttaacccccaagcacttacaagcggggatgcaggcttacatcgacattaaaaattgcccaaagaaaacacgcaacttgaagaagatcacaagggagcaaaggcgacacatgaagcggtgggagtacttcatcgccgctgaagaggtgatatgggactacgccccagtgatccctgcaaacatggacaaaaaatacagatctcagcacttagataacttttccaaccagattggcaagcactataaaaaggtgatgtatacccagtacgaggatgaatcgttcaccaagcatactgtgaatcctaatatgaaagaggatggtattctcggaccaatcattagggcccaggtgcgagacacgctgaaaatcgtgtttaagaatatggcatctcgcccatactccatctatcctcacggagtcacattttcgccctacgaggacgaggtgaatagctcatttacctccggacgcaataataccatgatccgtgctgtgcagcctggtgagacctacacctacaagtggaatatactggagtttgacgaacctactgagaatgatgcccagtgtttgacccggccctactattctgatgttgacatcatgagagacatcgctagcggcctcataggcttgttacttatctgcaaatctcgcagtcttgacagaaggggcatacagcgcgccgccgacattgagcagcaagctgtctttgccgtcttcgatgaaaacaaaagctggtatctggaggataacataaataaattctgcgagaatccagacgaagtgaagagggatgaccctaagttctacgagagcaacattatgtccactattaatgggtacgttccagaaagcatcactaccctcggtttctgcttcgatgataccgtgcaatggcacttctgcagcgttggcacacaaaacgagatcttaacgatacattttaccgggcatagtttcatctatggcaagcgtcatgaagacacactcacactgttccccatgagaggcgagtcagttacggtcacgatggacaatgttgggacttggatgctgacctcaatgaattctagtcctaggtccaaaaagcttcgtctcaagttcagggacgtgaaatgcatcccagacgatgacgaagactcttacgaaatatttgagcctcctgagtcaacagttatggctacccgcaaaatgcatgacagactggaaccagaggacgaggaatccgatgcagattacgattaccaaaaccgtttagctgctgcgttaggcattcggtcgtttcggaattcttctctgaaccaagaggaagaagagttcaatttgaccgcactagccctggaaaacgggaccgagttcgtgagcagcaacaccgacattatagtgggaagcaactattccagtccaagcaatatctctaagttcacagtgaacaacctcgccgagccacagaaggctcccagccaccagcaagctaccacagctgggagcccactgagacatttgattggcaagaacagtgtgctaaattcatccactgctgaacactcctcaccttactctgaggaccccatcgaagaccccctgcagccagacgtaacgggaatcaggctcctgtccctgggagccggggagtttaagtcacaggagcacgccaaacacaaggggccaaaagtcgagcgcgatcaggccgctaaacataggttcagttggatgaaattgctcgctcacaaggtcggtcgtcacttgtcccaggatacgggcagcccaagcggcatgagaccgtgggaagatctgccgtcacaagataccggctctccaagtcgcatgcgcccctggaaggaccctccttctgacctgctgttgttgaaacaaagcaattcctccaagatcctcgtgggtcgctggcatctggctagtgagaaagggtcctatgagatcatccaggacacagacgaagatacagccgtgaataactggttgattagcccacagaacgcttctcgtgcctggggagagtctaccccactcgcaaacaagcctggtaagcagagtgggcatcctaaatttcccagagttagacataagtccctccaggtccgccaggacgggggcaagtctaggctgaagaagagccagtttctgattaaaacccgcaagaagaaaaaagagaagcatacacaccacgcacctttgagtccgagaacattccatcccctccggagcgaagcctataacaccttttctgaacgaagactcaagcacagcttagtcctgcataaatcgaatgagacctccctgccaactgatctgaatcaaacgctcccctctatggattttggatggattgcttcgctaccagaccacaaccagaattcctcaaacgatacaggccaggcatcgtgccccccaggcctctaccaaacggtaccgcctgaggaacattaccagacattccccatacaggatcctgatcagatgcacagcacaagtgacccatcgcatcggagctccagccccgaactctcagaaatgttagagtatgacaggagccacaaatcgttccctacagacatcagccagatgagtccgtcatccgaacacgaagtatggcagaccgtcatctctccggatctctcccaggtgacccttagcccagaactttcccagacaaatctgagtcccgatctttcccacaccacgctcagcccggagcttatacagaggaacctgtcaccggctctgggccagatgccaattagtccggatttgtcccacaccaccctgagtccagaccttagtcatacaacgctttcactggaccttagtcagacaaacctctctcccgagctgagccagacgaacctctcacccgccctgggtcagatgcccttgagtcctgatctgtctcacactactctttcacttgacttctctcagaccaatctcagtcctgagcttagtcatatgaccctctcaccagaattatcgcagacaaatttgtctccagccttggggcaaatgccgatatcacccgacctctctcatactacgttgagtctggattttagccaaactaacttgagtcccgaactgtcgcagacgaacttgagtccagcccttggacagatgcccttgtcccccgacccttctcacacgaccctgagcttggatctgtcccagactaacctaagccccgaactgtctcagaccaatttgtcccctgacctgtccgagatgccgttattcgccgacctgtcacagatcccgctcacacccgatttggaccagatgacactttccccagatcttggagagacagatctgtcccccaattttggccagatgagcttgtcgccagacctgtcccaggtgaccctctcccccgacatcagcgacaccaccctgttaccagacctttcccaaatctcacctccacctgatctagaccagattttttatccatccgagtcatcacaaagccttttgctgcaagagttcaatgaatcatttccctacccagacttagggcaaatgccctcacccagttcccccaccctgaatgacacctttctttctaaggagtttaatccattggtcattgtcggactgtccaaggatggaacggactatattgagattatacctaaagaagaggtgcaatcatctgaagacgactatgcagaaatcgattacgtcccttatgatgacccttacaagactgacgtgcgaacaaacattaattcctcgagggatcctgacaacattgcggcctggtacctgagatcaaacaacgggaatcggcggaactactacattgctgctgaagagatctcatgggactatagcgaattcgtgcagcgagaaacggatatcgaggactctgatgacatcccagaagatacgacctataaaaaagtagtctttcgaaagtacctggattccaccttcacaaaacgagacccacgcggcgaatacgaggagcatcttggaattctggggccgattatcagagccgaggtggatgacgtgatccaggtgcgattcaaaaatttggcaagcaggccttacagtttacacgctcacggcctgtcatatgaaaaaagcagtgaggggaaaacatatgaggacgacagtccagaatggtttaaggaggacaacgccgttcaaccaaacagtagttacacctatgtgtggcacgcaaccgagcgcagcggccccgaaagcccaggcagtgcatgccgggcatgggcatattattcagcggtcaacccagagaaggacattcatagtggcctgattggtcctctccttatatgtcagaagggaatcctccacaaagactccaatatgccaatggatatgagagagtttgtgctcctgttcatgactttcgacgagaaaaaatcctggtattacgagaaaaagagtaggtccagttggcgactgacttcgtccgaaatgaagaagagtcatgagtttcatgcaattaacggcatgatttacagtctgccaggactcaaaatgtatgagcaggagtgggtgagactgcatctgctgaacatcggaggctcccaagacatacacgtggtgcactttcacgggcagaccttactggaaaatgggaacaagcaacatcaactgggagtatggccactgctgcctggttcctttaagacacttgagatgaaagcctccaagccaggttggtggttactcaacaccgaggtcggcgaaaaccagagggctggcatgcagacacctttcttgattatggaccgcgactgccggatgcctatgggcctgtctaccggaattatttccgattctcagataaaagcttcagaatttctggggtattgggaaccccgactggctaggctaaataacggcgggagttataacgcctggagcgttgaaaagctggccgctgaatttgccagtaaaccctggatccaagtagacatgcagaaagaggtgataatcactgggatccagactcaaggtgcaaaacattacctcaaaagttgttataccactgagttttacgtggcctattctagcaatcagattaattggcagatcttcaagggcaacagcaccaggaatgttatgtattttaacggcaacagcgacgctagcaccatcaaagagaatcagttcgacccacccattgttgctagatatatccggatttctcccactcgtgcatacaacaggcccacactacgactggagttgcagggatgcgaagtgaacggctgtagcactcctctgggaatggaaaacggcaagatcgaaaacaagcagattaccgcttcctccttcaaaaagtcgtggtggggcgactattgggagcccttccgagctcggctcaatgctcaggggcgggttaatgcatggcaggcgaaagccaataataacaagcagtggctggagattgatctgctaaaaatcaaaaagatcactgcaattataacccaggggtgcaagagtctcagctctgaaatgtacgtgaaaagttacactatccattacagcgagcagggagttgaatggaaaccataccgtctcaaatccagtatggtggataagatatttgagggtaacacgaatacaaagggtcatgttaagaatttttttaaccctcctattatatcccgatttatcagggtgatccccaaaacttggaaccagtccattgcattaaggctcgaattatttggctgcgacatttac

SEQ ID NO: 2339 - DNA, 6672 bp, Artificial Sequence
  derived and/or modified sequence
atgttcccaggttgccctagactatgggtcctggtcgtgctcggtacctcttgggtagggtgggggagtcaggggaccgaagccgctcagctcagacagttctacgtggcagcccagggcatttcttggtcttatcgtccagagcccacaaactcatccctgaacctgtctgtgacttccttcaaaaaaattgtgtatagagagtatgaaccctattttaagaaggagaaaccacagtcaaccattagcggcctcctagggcctaccctgtacgcagaagtgggagacattatcaaagtccatttcaagaacaaggccgacaaacccttgtctatccaccctcagggcattaggtattccaagctgtcagaaggcgcaagctacttagaccatacattccccgcagagaagatggacgacgcagtcgcccctggacgagagtatacttacgagtggtccatcagcgaagactccggaccgacgcacgatgacccaccatgtcttacccatatttactattctcacgaaaacttgatagaggatttcaactcaggactgataggaccacttctgatttgtaagaaaggcacactgactgagggaggcactcagaagacctttgataaacagattgtgttgttatttgccgtgttcgacgaatccaagtcctggtcgcagagttccagcctgatgtacaccgtcaacggctacgtgaacggtactatgccggacattactgtctgcgctcacgatcacatcagctggcatctgttagggatgtcaagcgggcccgagctcttctctatacatttcaacggacaggtgctggagcaaaaccatcataaagtctctgccatcactctggtatccgccacttcgaccacggccaacatgacggtgggcccggagggcaaatggatcatcagcagcctgacacccaagcatctgcaggccggaatgcaagcctatattgacatcaagaactgccctaaaaagacacggaatctcaaaaagatcacccgggaacagcggcgacatatgaagcgatgggagtatttcatcgctgctgaggaagtgatatgggactatgcccctgtaatccccgcgaacatggacaagaagtatcgctcacagcatctcgataacttctccaatcagatagggaagcattacaagaaagtgatgtacactcagtatgaggacgaatccttcaccaaacacaccgtcaaccccaatatgaaggaagacggaatcctgggtccaattattcgcgcacaagtccgcgataccctgaagatagtatttaagaacatggcatctaggccctatagcatatatccacatggcgtgactttctcgccttacgaagacgaagtaaacagttctttcacctctggccgcaacaacacaatgatccgcgccgtgcagccaggtgaaacctatacatacaagtggaatattcttgaattcgacgagcccacggaaaatgatgctcaatgcttgactcgaccctattattctgacgtggatatcatgagagatatagcctccggactgatagggctactactgatctgcaagagccgcagtttggacaggcgtgggatacagcgagccgccgacattgagcagcaagcggtgttcgcagtgttcgacgaaaataagagctggtatctggaggataacattaacaaattttgtgagaaccccgatgaggtgaagcgcgacgatccgaagttctatgaatcgaacatcatgagcacaatcaacgggtacgtaccagagagtatcacaacactcggattctgtttcgatgatacagtccaatggcacttctgcagtgtggggacgcagaacgaaatcctgactatacatttcaccggccactcattcatttatgggaagcggcacgaagacaccttaacgctgttccccatgcgcggggaatccgtgacagtaaccatggacaacgtaggcacgtggatgctcacttcaatgaactcctcaccacgcagcaaaaaactccgcctcaagtttagagacgtgaaatgtatcccggatgatgacgaggacagctatgaaatctttgaaccccctgaatccaccgtgatggccacacgcaaaatgcacgatcggctcgagccagaggacgaggagtctgatgcagactatgactaccagaacaggctggcagccgctctagggatccgaagctttagaaactcgagcctgaatcaggaggaggaagagttcaacctgacggcccttgccctcgaaaatggaaccgagttcgtgtcctctaacaccgatatcatcgtgggaagcaattattcatcgcccagtaatatatccaaattcactgtcaataatctcgctgagcctcagaaagccccctctcatcagcaggctacaaccgccggcagccccctcagacacttgattgggaagaactccgtgctgaactcaagcacagcggagcactcttccccctactctgaggatccaattgaggatcctctgcagcccgatgtcaccgggattcgtctgctgtcactgggagccggcgaattcaaatcccaggaacacgccaagcataaaggtcctaaagtggagcgagaccaggccgccaaacacagattctcttggatgaagctcttggcacacaaggtaggcaggcacctttctcaggacaccggatctccttccgggatgcgcccttgggaagacctgccatcccaggataccggctccccctctcgcatgcgtccatggaaggatccgcccagtgacctgctgttgctcaaacagtcgaacagttccaagatcttagtcggtagatggcacttggcctccgagaaggggtcctatgaaatcatccaagacacagacgaggacaccgccgtaaacaattggctaatttccccccagaacgcctcaagagcctggggcgaatctaccccactcgctaataagccagggaaacagtctggacacccaaagttcccacgggtccgtcataagtctctgcaggttcggcaggacggtgggaaaagcaggctgaagaagtcccagttcctcattaagacgcgcaagaagaaaaaggaaaagcacacacatcatgcacctctgtcgcccaggacattccaccctctgcggtctgaagcgtacaataccttttctgaacgcaggctgaagcactccctggtgctgcacaagagcaatgagacatccctgccaaccgaccttaaccaaacactgcctagtatggacttcgggtggatcgccagcctgcccgatcacaatcagaattcctctaatgataccggccaggctagctgccccccggggctgtaccagacagtgccacctgaggagcattatcagacattccctattcaggaccctgatcagatgcactccacgagtgacccgagtcaccggagctcgtctccggagctttccgaaatgctggaatatgacagatctcataagagcttccctacagatataagccagatgagtccttctagcgagcatgaggtctggcagacggtgatctcaccggacctgagtcaagtgaccctctccccagaattgagccagacgaacctaagtccagatctgtcacatactaccctgagcccagaactcattcagcggaaccttagccctgcgctgggtcagatgcccatcagtcctgatctgagtcacaccaccctaagcccagatctgtcacacacgactctgagcttggatctgagccaaactaatctgagcccggagctgtcccagacaaacctgagccccgcactggggcaaatgcctctgtcgccagacttatcccacacgactttgtccctggattttagtcaaactaacctctccccagaattgtctcatatgaccctgtcacccgagctgtctcagaccaacctttccccggccctgggacagatgccaatttcacccgacctttctcacacaacactgtcactagacttctctcagactaatctgtcacctgaattgagccagacgaacctgagtccggcgcttggtcagatgcccctcagccccgacccctctcacactaccctaagcctggacctctcccagactaacctgagccctgagctgagccagacaaacctgtcccccgacctcagcgaaatgcctttgttcgcggacttgtctcagattccgctgacgcctgatctagaccagatgacgctgtcccccgacttgggcgagaccgacttgtcccccaattttggacagatgagtctgagccctgacctgtcccaggtcactctgtcccccgacatcagcgatactaccctgctgcccgacctgtcccaaatctcccccccacctgatctggaccagattttttaccccagtgaatcttctcagagcctgctgctgcaggaatttaacgagagcttcccttatcccgacctgggccagatgccgagccctagcagtcctacgctcaatgacacttttctgagcaaggaatttaatcctctcgtgatagttggcctgtctaaagatggcacagactatatagaaatcatccccaaggaggaagtgcagagctcagaggacgattacgccgagatcgactacgtcccgtacgacgacccctacaagaccgacgttaggacaaacatcaattcaagcagggatcctgataacatcgccgcctggtatctgaggtccaacaacgggaatagacgaaactattatattgctgccgaggagatcagttgggactactctgagtttgtgcaacgggaaacggatattgaggactccgacgacattcctgaagataccacttacaagaaagtggtgttccgtaagtatctcgactcgacattcaccaagcgggatccaaggggagaatacgaagaacatttgggcatcctgggaccaattattcgcgccgaggtggacgacgtcatacaggtccgcttcaagaatttggcgtcgcgcccatactcactccatgcccacggactgtcatacgagaagagttccgaaggtaaaacctatgaggacgactcccccgagtggtttaaagaagacaacgccgtacagccgaacagttcctacacatatgtatggcacgcaaccgaacgaagtggacccgaatcaccggggagcgcatgtagagcgtgggcctactatagcgcagtaaatccagagaaagacatacactctggacttataggacctctgctcatctgtcagaaggggatcctacacaaggactccaacatgcccatggacatgagggaatttgtgctcctttttatgacctttgatgaaaaaaagtcatggtattacgagaagaagtctaggtcctcttggcgactgacaagcagtgagatgaagaagagccacgagttccatgccattaacggcatgatctactcactccctggcctcaaaatgtatgaacaagagtgggtacgcttgcatctgttaaatatcgggggcagccaggatatccacgttgtccacttccatgggcagactctacttgagaatggaaacaagcagcaccagctcggcgtttggccattgctgcctggaagctttaaaactttggaaatgaaggcctctaagcctggttggtggctactgaacaccgaagtgggggagaaccagagagccggcatgcagaccccattcctgataatggatagggactgcaggatgcctatgggactgagtactggtataataagcgactcacagattaaagcatcagagtttctggggtattgggagccacggttagcccgactgaacaacggagggtcttacaatgcgtggagcgttgagaaattggccgccgaattcgcctccaaaccctggattcaggtggacatgcaaaaggaagtgattattaccggaatccagacccagggagccaaacattacttaaaatcctgttacaccactgagttctacgtggcctacagctcgaaccagataaactggcagatcttcaaaggtaatagcaccaggaacgtgatgtactttaatggcaactcagatgcatccacgattaaggagaatcagttcgatccacccattgtggctcgctacatacgtatcagtccaacccgcgcctacaataggcctactctgcggttggagctgcaggggtgcgaagtcaatggctgcagcactccgctggggatggagaatggcaaaatcgagaacaaacagatcacagcaagttcctttaagaaatcgtggtggggtgactattgggagccttttagggccaggctgaatgctcagggccgcgtcaatgcctggcaggccaaggctaacaacaataagcagtggctagaaatcgacctcctgaagatcaaaaaaatcaccgccataatcactcaggggtgtaagagcctatcgagcgagatgtacgtgaagtcctacaccattcactatagtgaacagggcgttgaatggaaaccatacagactgaaatcttccatggtcgataaaatatttgaggggaacactaataccaaggggcacgtgaagaacttcttcaatccccctatcatctccagatttatcagagtgatcccaaaaacttggaaccaaagcattgctctgcggctcgaacttttcggctgtgacatttat

SEQ ID NO: 2340 - DNA, 6672 bp, Artificial Sequence
  derived and/or modified sequence
atgttccccggatgtccgaggctctgggtcttagttgtactgggcacttcctgggtggggtggggctcacagggcaccgaggctgcccagctgcggcagttctacgtcgctgcacagggtatcagctggtcatataggcctgagcccacaaactcttcactgaacttatccgtgacgagtttcaagaaaatagtctacagagaatacgaaccatattttaaaaaagaaaaacctcagagcacaatctctggactgttgggacctaccctatatgcagaggtaggtgacatcattaaggtccattttaagaataaggccgacaaacccctgtcaatccacccacagggcatcagatattccaagctgtcagagggggcaagttacctggaccacaccttcccagctgagaaaatggacgatgccgttgctcccggtcgggaatatacatacgagtggtcaatctccgaagactccgggcctacacacgacgaccctccttgcctgactcacatctactattctcatgaaaaccttatcgaagatttcaactcaggactgatcggcccactcctaatttgtaagaagggaacgttgaccgaaggcggaacccagaaaacctttgataaacagatagtgctgttattcgctgtctttgacgagagcaagagctggtcacagagttctagtctcatgtacactgtcaacggctatgttaacgggaccatgccggacatcaccgtgtgcgcacatgaccatatttcctggcatctgttgggaatgtcaagtggaccagagctgtttagcatccacttcaatgggcaggtcctcgaacagaatcatcacaaagtgagtgcgataacactggtaagcgcgacctcaacgactgccaatatgacggtgggccccgaggggaagtggattattagctcgctgactcctaagcaccttcaggccgggatgcaagcgtatattgacattaaaaactgccctaagaagacacggaacttaaagaaaatcaccagggagcagagacgtcatatgaaacgctgggagtacttcatcgccgcagaggaggtcatctgggactatgcaccggtcattcccgctaacatggacaaaaagtatcgttcccagcacctggacaatttctcaaatcagataggtaaacactacaaaaaggtgatgtacacacagtatgaggatgagtcgttcaccaagcataccgtcaatcctaatatgaaggaagatggtattctgggtccgataatacgggcgcaggtccgggatacacttaagattgtttttaagaatatggcgtctaggccttactcaatttaccctcacggtgtaacttttagcccatacgaggacgaggtaaactcaagcttcacaagtggcaggaacaacacaatgattcgcgccgtgcagccaggggagacatacacttataagtggaatattctcgaatttgatgagccgactgagaatgacgctcagtgtcttacccgcccctattactccgacgtcgacattatgcgcgatattgcatctgggcttattgggttgctactcatctgcaagagtaggagtctggatagaaggggcattcagcgagccgccgatatcgaacaacaagcggtgtttgcagtatttgacgagaataaatcctggtacctggaagataacattaacaaattctgtgagaaccccgacgaggtaaagcgggacgaccccaaattctacgaatctaatatcatgagtactattaatggatacgttccagaaagcataacaaccctgggattctgctttgacgatactgtccaatggcacttttgtagtgtggggacccaaaacgagatccttaccatccactttaccggtcactcttttatatatggcaagaggcacgaggacacactgacactcttccctatgagaggcgagagtgtaacggtgaccatggacaatgtcgggacttggatgttaacttctatgaattcatctccaaggtcgaagaagcttcgccttaagttcagggacgtgaagtgcatacctgatgacgatgaggattcctatgagattttcgaaccccctgagtctactgttatggcaaccagaaagatgcatgacagacttgaacccgaagacgaagagtcagacgctgactacgattatcaaaacaggttggctgctgcgctgggcattaggtcattcaggaattccagcctgaaccaggaggaagaagagtttaatctcacggctttggcacttgaaaatggaacagagtttgtgtcgagcaataccgacatcatcgtcgggtccaactatagttctcctagcaatatctcaaaatttaccgtcaataatctggcggaaccacagaaggctccaagccaccaacaggccacaactgctgggtctccacttcgtcatctaattggcaagaattccgtccttaatagcagcacggcggagcattccagtccatactccgaggatcccatcgaagatcctctgcaaccggatgttacagggatccggttactatcattgggggccggtgaattcaagagccaggagcacgccaagcataaagggcctaaggttgagagggatcaggccgctaagcatcgattttcatggatgaagctccttgcccacaaggtcggcaggcatttgtcccaggataccgggtccccgtcagggatgaggccatgggaagacctgccttcccaggataccggcagtccgtccaggatgcggccgtggaaggatccacccagtgacctcttacttctgaagcagtccaattcttctaagatcctggtgggccggtggcacctcgcatcggagaaagggtcctatgagatcattcaggacacagatgaagatacagccgttaataattggctcatcagcccgcaaaatgcctccagagcttggggtgagagcactccccttgcgaacaaaccaggtaaacagtccgggcatccgaagttcccgagggtgcgccacaaatctttgcaggtccgccaggatggcgggaaatcaaggctgaagaaatcacaattcttgatcaagaccaggaagaagaaaaaggaaaaacacacgcatcatgcaccattgagtcctcgaacttttcacccccttcggagtgaggcgtataataccttttcagaacggcgacttaagcacagcctcgtgctgcacaagtcaaacgagacctcgcttcccacagatctgaatcagactttaccctcgatggatttcggatggatcgcctccctgcctgaccataatcagaactcttccaacgatacaggacaagcatcctgtccacccggactctatcagactgtccccccggaagagcactatcagacatttcctatccaggaccccgaccaaatgcactctactagtgacccctcccataggtcaagctctccggaactctccgagatgctcgagtacgaccgctcacacaaatcctttcctactgatatcagccagatgagcccttcatccgagcatgaggtgtggcagaccgtgatctctccggacttgtcccaggtgacgttgtcacccgagttatctcagaccaacctgtcccctgacctctctcatactacgctgagccctgagctgattcagcggaacctgtctcccgcacttggacagatgcccatctctccagatctttcccacacaaccttgagccctgacctgtcacacacaaccctctcgctcgacctgagccagacgaacctgagccctgagctgtctcagacgaatttgagcccggcactggggcaaatgccactaagtcccgacttgagccatactacattgtcactagacttcagtcagaccaacctgtctcccgaacttagccatatgaccctgagccccgaactgagccagaccaacctttctccggcgctcggtcaaatgcctatatctccagacctgtcccacacaaccctgtctctggatttcagtcagaccaatctctcgccagagctcagccaaaccaatttgtccccagcattgggccagatgccacttagtcctgaccccagccacacgactttgagtttggacctgtctcaaactaatctatctcctgaacttagccagacaaacctgagtcccgacttgagcgaaatgcccctttttgccgacctgtctcagatacctttgactccagacctggaccagatgaccctcagtcccgacctgggggaaacagacctgtctcccaacttcggacagatgagtctatcccctgacctcagccaggttactctgagcccggacatttcagacaccacactgctgcctgacctgagccagatttctcctccaccagatctggaccagatcttctacccgtccgaaagttcacagagcctcttgctccaggagttcaatgaatctttcccctatcctgacctgggacagatgcccagcccaagctcaccgaccctcaacgacaccttcctgtcaaaggaattcaatccccttgtgatcgttgggttgtccaaggacgggacagattacatagagattatccccaaggaagaggttcaaagttctgaagatgattacgccgaaatcgattatgtcccctacgatgatccgtacaaaaccgacgtccgcaccaacattaacagctcccgcgatccagataacatcgcggcctggtatctgcgaagcaataatgggaaccggcggaattactatatcgctgcagaggaaattagctgggattactcagagtttgttcagagagaaacggacattgaggatagtgacgacattcctgaggataccacttataagaaggtggtgttcagaaagtacctggactcaacgttcacaaagcgggacccaagaggggagtacgaggaacacctcgggatattgggccccatcatccgcgcagaagtggacgatgtcattcaagtgcggttcaagaacctcgcttcccggccttactccctgcatgcacacggactctcgtatgagaagtctagcgaagggaaaacttatgaggatgactcaccagagtggttcaaggaagacaacgcggtgcagcccaattcgtcatacacttacgtgtggcacgccactgagcgcagcggccccgaatctcccggttcagcatgtagggcatgggcatactacagtgctgtgaacccggaaaaggatatccacagcggactgatcgggcccctcctgatttgtcagaaggggatcctccataaggattctaacatgcctatggacatgcgggagttcgtgttgctgtttatgacatttgacgagaaaaaatcttggtactacgaaaagaagtcacgaagtagttggaggctcacctcaagcgagatgaagaagagccacgaattccacgcaattaatgggatgatatactctcttccggggctgaagatgtacgagcaggaatgggttagattgcacctgcttaatatcggcggatctcaggatatccacgtggtgcatttccatggccaaactctactggagaatggcaacaagcagcaccagttgggggtgtggccactactgcccggctcctttaaaaccctcgagatgaaagcctcaaagcccgggtggtggttgctaaatacggaggtcggtgaaaatcagagagctggaatgcagacgcctttccttattatggatagggactgccgcatgcctatgggactgagcacgggtatcatttctgactcgcagataaaagccagcgaattcctgggatactgggagcccagactcgcacgactaaacaatggcggatcctataacgcgtggagtgttgaaaagcttgctgctgaattcgccagcaaaccttggattcaggtcgatatgcagaaggaagttatcataactggtatccagacacagggcgctaagcactatctcaagtcttgctatactaccgaattctacgtggcctacagctctaaccaaatcaactggcaaattttcaagggtaacagtacccgaaacgtgatgtacttcaatggaaacagtgatgcatcaacaatcaaagaaaatcaattcgacccccccattgttgctcggtacataaggatcagccccactcgggcgtacaacaggcctacattacgactcgagctgcaaggatgtgaggtgaatggttgttctacgcccctggggatggagaacgggaaaatcgaaaacaagcagatcacggcgtctagctttaaaaagtcatggtggggcgactactgggaacctttcagggcacgccttaatgcacagggccgggttaacgcctggcaggctaaggcaaacaataacaaacaatggctggagatcgatctactgaagattaagaagattacggccatcattacccaggggtgcaaatccttgtcctccgagatgtacgtgaagagctacacaatccattattcagaacaaggagtggagtggaagccgtatcgtctaaaatcctccatggtggataagatcttcgagggtaataccaacactaaaggccacgtaaagaatttctttaaccctcccattatttctcggtttattagggtcattccaaaaacttggaatcagagtatcgccttacgcctggagttattcgggtgtgacatatac

SEQ ID NO: 2341 - DNA, 6672 bp, Artificial Sequence
  derived and/or modified sequence
atgtttcccggatgtccaaggctttgggtcttggtagtactagggacaagttgggttgggtgggggtcacaggggacagaagctgcacagctgcgccagttttatgtggctgctcaggggatctcttggtcctacagacctgaacccactaactcttcactgaacctatcagtgacatcctttaaaaaaatagtgtatcgagaatatgaaccttactttaaaaaggaaaaacctcaatcaacaatctcaggattactaggaccaacactatatgccgaagtgggggatataattaaagtacactttaagaacaaagccgataaacctctttccatacacccccaggggatcaggtattcgaaactgtctgagggggcttcctatctcgatcacactttcccagctgaaaaaatggatgatgccgtcgcaccaggacgtgaatatacttacgaatggtcaatctccgaagattctggaccaacgcatgatgatcccccatgtctgacacatatctattattcgcatgaaaacctaatagaggacttcaacagtgggctgattgggcccctactgatttgcaaaaaagggactttaactgaagggggaacacagaaaacatttgataaacagatcgtgcttttattcgctgtcttcgatgagtctaaatcttggagtcagtcctccagtttgatgtacacagtcaacgggtacgtgaatggaactatgcccgacatcacagtgtgcgctcatgatcatataagttggcatctcctggggatgagtagtggacctgaattgttctctatccactttaatggacaggtccttgaacagaatcatcataaagtctccgcaattactctagtctccgccacttcaacaacagctaatatgacagtcgggcctgaaggaaagtggataatctcctcgttaactcctaaacatctccaagcggggatgcaggcttatatcgatataaaaaattgccctaaaaaaactcgcaaccttaaaaagatcacacgggaacagcggcgacacatgaaaaggtgggaatattttatcgccgccgaagaagtgatatgggattacgcccccgtaatccccgctaacatggataaaaaatatcgatctcagcacctcgataatttttcgaaccagattgggaagcattataaaaaggtcatgtatacacagtacgaagacgaatcttttactaaacatacagtgaaccctaacatgaaagaggatggaatcctggggccaataatccgtgcccaggttcgcgatacactcaaaatcgtgttcaaaaacatggcgtctaggccatattctatctatcctcacggggttacatttagtccctatgaagatgaagtaaacagttcttttactagtggaaggaacaatactatgatacgcgccgtgcagcccggggaaacttacacttataaatggaatatcctggaatttgatgaacctacagaaaatgatgcacagtgtctgactaggccctattactccgatgtggatattatgcgggatattgcctccgggctgatcgggctactactcatttgtaaatccaggtccttggataggagagggatccagagggcagccgatatagaacaacaggccgtcttcgcagtattcgatgaaaacaagagttggtacctggaagacaatattaataaattttgtgaaaaccccgatgaggtgaaaagagacgatcccaagttttatgagtctaacatcatgtcaactattaatggatacgtacctgagtctatcacaactttaggattctgttttgatgatacagtgcagtggcacttttgttccgtagggacgcagaatgagattctcacaatacatttcactgggcattcattcatctatggaaaacgccacgaagatacattgactcttttccccatgaggggagaatctgtgacagtaactatggacaatgttggaacttggatgctaacatctatgaatagtagtcctcggtctaaaaaactccggttgaaattcagagatgttaaatgcattcctgatgatgatgaggattcttacgaaatattcgagccacccgaatcaactgtgatggctacacggaagatgcatgatagactagaacctgaggatgaggagtccgacgccgattatgattatcagaacaggctagccgctgccttagggatacggtcttttcgaaactctagtctgaatcaggaagaagaagaatttaatcttacagcattagctctggagaatgggacggaattcgtgtcctctaatactgatatcatagtgggatcaaactattcaagtccttcaaatatctccaaatttacagtgaataaccttgctgaacctcagaaagcccccagtcatcagcaggccacaacagcagggtctcctttacggcatctcatagggaaaaattctgtacttaactcctcaacagccgaacactcctccccctatagtgaagatccaatagaagatccactgcagcctgatgtgactgggataagattgctctcactaggagcaggagaattcaaatctcaggagcacgctaaacacaaagggcccaaagtcgagcgagaccaggcagccaagcatagattctcttggatgaaattacttgcccacaaggtgggacggcacttatcccaggatacagggtccccttcagggatgaggccatgggaagacttacctagtcaggatactggatctccctcccggatgcgaccatggaaagatcctccaagtgacctccttctactgaaacagtccaattcttcaaaaatactcgtcggaaggtggcaccttgcctcagaaaaggggagttatgaaattatccaggatacagatgaggatacagctgtgaataattggctcatcagtccccagaacgcctcccgagcctggggggaatcgactccccttgctaacaaacctggaaaacagtcagggcaccccaaattcccacgggtcaggcataaaagtctccaggtaagacaggacgggggaaaatcacgccttaaaaaatcccagttcttaatcaaaacaaggaagaaaaaaaaagaaaaacatacacaccatgctcccctgtctccccggacattccaccctctgaggtccgaagcttataacactttctccgagcgacggctgaaacactccctcgtgctgcacaagagtaatgagacgagtcttcctacagatttgaaccaaacactgccttcaatggacttcggatggatcgcgtcactcccagaccataatcagaacagttctaacgatacagggcaggcttcgtgtccaccaggactctatcagactgtcccccccgaggaacattatcaaacgttcccaatccaggatcctgatcaaatgcatagtacttcagatccctctcacagatcttcttctcctgaactttccgaaatgctagaatatgatcggtcccacaaatccttcccaactgatatcagtcagatgtctccttcttccgagcacgaagtctggcagactgtgatctctccagatctctctcaggttacacttagtcctgagctgtctcaaacaaatttgagtcccgatctgtctcacactacgctgtctccagaactcatacagaggaatctcagtcccgctttggggcagatgcccatctcccctgatctctctcatactactctcagtccagacctttcccatacaacactctccctcgatctctcccagacaaacctgtcccctgaactctctcagacaaatctgtccccagcacttggacaaatgcctctctcaccagatttgtcgcatacaacgctgtctctcgatttttctcagactaacctttcgccagaactgagtcatatgacgctctcccccgaattaagtcagactaatctgtcccctgcgctcggacaaatgcccatatcaccagatctaagtcacactacgttatctctcgattttagtcagacaaatctctctcctgagctctctcagacgaatctgtcaccagccctcgggcagatgccactatcccctgatcctagtcacactacattatcactagatctcagtcagacgaacttgtcaccagaactttcccagacaaatctttcccctgacctcagtgaaatgccactattcgccgatttatcccaaattccactgacacctgatttagatcagatgacactctccccagacctcggggagactgatttatcccctaactttggacagatgtccctgtcccccgatttgtcacaggtgacactttcaccagatatatccgatactacactcttgcctgatctgtcccagatatcacccccgccggatctagatcagatcttctacccaagtgaatcatctcagtcactcttacttcaggaatttaatgagtcctttccttaccctgacttgggacagatgccttctcccagttccccaactcttaatgatacatttctaagtaaggaattcaaccctctggtaatagtgggattatctaaagatgggactgactatatagagatcatccccaaagaggaagtgcaatcatctgaggatgattatgcagaaatcgattatgttccatatgatgatccctataaaactgatgtgcgaacaaacataaactcatcacgagacccagataatatcgcagcttggtatcttcgctcaaacaatggaaacaggcgaaattattatatagccgccgaggaaatatcatgggattattcagaatttgtacagcgagaaacagatattgaagattccgatgatattcccgaagatacaacatacaaaaaagtggtgttcaggaagtatcttgattccactttcactaaaagggatccccggggggaatatgaagaacatctaggaatacttgggcccataatacgagccgaagtagatgatgtaatacaggtgcgctttaagaatctagcgtcaaggccttactccctgcatgctcatggactgagttacgagaaatcttctgaagggaaaacttatgaagatgattccccagaatggtttaaagaagataatgcggttcaaccaaatagttcatacacatatgtatggcatgcaacagaacggtctggacccgaatctcccgggtccgcttgcagggcctgggcttattatagtgcggtgaatcctgagaaagatatccactccgggctgattggacctctgctcatttgtcagaaggggatcctccataaggattcaaacatgccaatggatatgcgagaattcgttctcctattcatgacattcgatgaaaaaaaatcttggtattatgagaagaaatcgcgatcatcctggcgattaacatctagtgaaatgaaaaaaagtcacgaattccatgcaatcaatgggatgatctatagtcttcctggactgaagatgtatgagcaggaatgggtaagactccatctcctgaatataggggggtctcaagatatacatgtggtccatttccacggacagactcttctcgaaaacggaaacaagcagcaccagttgggggtgtggcccctacttcctggatccttcaaaacacttgaaatgaaagctagtaaaccagggtggtggctactgaacacagaagtaggagagaatcagcgcgcaggaatgcagactccttttctcataatggaccgggactgtagaatgccaatgggactgagtactgggataatcagtgattctcagataaaagccagtgaatttctcggatattgggaacctcgactcgcccggcttaataacggagggtcatacaacgcttggtctgtcgaaaaactcgctgccgaatttgcctctaaaccttggatccaggtggatatgcaaaaggaagtgataatcacaggaatccagactcagggggccaaacactatctgaaatcttgttatacaactgaattctatgtggcctactcctccaatcagataaactggcagatcttcaagggaaatagtacacgtaacgtgatgtattttaacggaaattcagatgcatccactataaaagaaaatcagttcgatcctcccatagtggcccggtatatcagaatttcccctactcgggcgtataatcggcccactctccgcttggagttacaggggtgtgaagttaacgggtgttcaactcctcttggaatggagaacgggaaaattgaaaacaaacagatcacagccagttctttcaaaaagagttggtggggagattattgggagccattccgagcacgccttaacgcacaggggcgagtaaacgcctggcaggctaaagccaataacaataagcagtggctcgaaatagatctgctgaaaattaaaaaaattactgcgatcatcacacaggggtgcaaaagtcttagtagtgaaatgtatgtgaaatcatacactatacattactcggaacagggagtggaatggaaaccctataggcttaaatcttctatggttgataaaatattcgaagggaacacaaacacaaaagggcatgtaaaaaatttttttaatcctcccattatatctcgattcatccgagtcattccaaaaacttggaatcagtcaatcgccttaagactcgaactatttgggtgtgatatctat

SEQ ID NO: 2342 - DNA, 6672 bp, Artificial Sequence
  derived and/or modified sequence
atgtttccaggatgtccaagactatgggttttagttgttttaggaacaagctgggttgggtggggaagtcaaggtacagaagcagctcaattaagacagttttatgtagcagctcaagggataagttggtcatatagaccagaaccaacaaattcttcattaaatttatcagttactagttttaaaaaaattgtatatagagaatatgagccttacttcaagaaggaaaagccacaatctactatttcaggacttttaggaccaactttatatgcagaagttggagatataattaaagttcatttcaaaaataaagcagacaaacctttatccatacatcctcaaggaattagatactcaaaattatcagaaggagcaagttatcttgatcatacttttccagcagaaaaaatggatgatgcagtagctccaggtcgtgagtatacttacgaatggagtatttcagaagactcaggtcctactcacgatgatccaccatgtttaacacatatttattatagtcatgaaaatttaattgaagattttaactctggattaattggtcctttacttatttgtaaaaagggaactcttacggagggtggaacacaaaaaacatttgataaacaaattgtgcttttatttgcagtattcgatgaatcaaaatcatggtcccaatcaagttcacttatgtatactgtaaatggatatgttaatggaactatgccagatattacagtttgtgctcatgatcatatatcttggcatttacttggaatgtcttctggaccagaacttttttctatacattttaatggtcaagttcttgaacaaaatcatcataaagtatcagctattactttagtttcagcaacatcaactactgctaacatgacagtgggaccagaaggaaaatggattatttcttcattaactccaaaacacttacaagctggtatgcaagcatacattgatattaaaaattgtcctaaaaaaacaaggaatttaaaaaaaattactagagaacaacgtagacatatgaagagatgggaatactttattgcagctgaggaggtcatttgggattatgcaccagttataccagcaaatatggataaaaaatatagatcacaacatttggacaatttttctaatcaaattggtaaacattataaaaaagttatgtatactcaatatgaagatgaatcatttactaaacataccgttaatccaaatatgaaagaagatggtatattaggtccaattattagagctcaagttagagatactcttaaaattgtttttaaaaacatggctagtagaccatattctatttatccacatggagtaactttctctccatatgaagacgaagttaatagtagttttacatctggacgaaataatacaatgataagagctgttcaaccaggagaaacatatacttacaaatggaacattttagaatttgatgaaccaactgaaaatgatgcacaatgtttaacgagaccatattatagtgatgtcgatataatgagagacattgcaagtggtttaattggtttacttttaatctgtaaatcaagatctttagacagaagaggaattcaaagagcagctgatattgaacaacaagctgttttcgctgtatttgatgaaaataagagttggtatttagaagataatattaataaattttgtgaaaatcctgatgaagttaaaagagacgaccctaaattctatgaatctaatattatgtctacaattaatggatatgttcctgaaagtataacaactttgggattttgttttgacgatactgtacaatggcatttctgtagtgttggaacacaaaatgaaatcttgacaatacattttacgggtcatagttttatttatggaaaaagacatgaagatacacttactttatttccaatgagaggtgaatctgtaacagtaacaatggataatgttggaacttggatgttaacatcaatgaacagttctcctaggagtaaaaaattaagacttaaattcagagatgttaaatgtattccagatgatgatgaggattcttatgaaatcttcgaaccaccagaatcaactgttatggctacaagaaaaatgcatgatagattagaaccagaagatgaggaaagtgatgctgattatgattatcaaaatagattagcagcagcattgggtattagatcatttagaaattcttctcttaatcaagaagaagaagaatttaatttaacagcattagcattagaaaatggtactgaatttgtatcttctaatacagatattattgttggatctaattattcatcaccaagtaatattagtaaatttacagtaaataatttagcagaacctcagaaagctccatctcatcaacaagctacaacagcaggaagtccacttcgtcatttaattggaaaaaattctgtattaaattcatctaccgcagaacatagctctccatattcagaagatcctatagaagatccattacaaccagatgttactggaattagacttctttcacttggagcaggagaatttaaatctcaagaacatgcaaaacataaaggaccaaaggttgaaagagatcaagctgctaaacaccgtttctcttggatgaaattattagctcataaagtaggtagacatcttagtcaagatacaggatctccaagcggaatgagaccatgggaagatttaccatcacaagatactggaagtccatcacgtatgagaccatggaaagatccaccatctgatttgctattattaaagcaaagtaattcatctaaaattctagttggtagatggcatttagcaagtgaaaaaggatcatatgagattatccaagacacagatgaagatacagctgttaataattggcttatttcaccacaaaatgctagtagagcttggggagaatcgactccacttgcaaacaaacctggaaaacaaagtggacatccaaaattcccaagagttagacataaatctcttcaagttcgtcaagatggaggaaaatctaggttaaaaaaatcgcaatttttaatcaaaactaggaaaaaaaaaaaagaaaaacatactcatcatgctccattatcaccacgaacatttcatcctttaagaagtgaggcttataatacattttcagaacgaagattaaaacatagtcttgttcttcacaaatcaaatgaaacttctctccctacagatcttaatcaaacactaccatctatggattttggatggattgcatcattaccagatcataatcaaaattcatctaatgatactggtcaagcttcttgtccaccagggttatatcaaactgttccaccagaagaacattatcaaactttcccaattcaagatccagatcaaatgcatagtacttcagatccttcacatcgaagtagtagtccagagctaagtgaaatgttagaatatgaccgtagtcataagtcattccctacagatatttctcaaatgagtccttcaagtgaacatgaggtttggcaaacagtcattagtccagatttatcacaagttactttatctccagaattatcacaaactaatctatcaccagatttatctcatacaactttgagtccagaacttattcaaagaaatttatctcctgccttaggtcaaatgccaattagtccagatttaagtcatactacgctttcaccagatttatcacatactactttgtcattagatctttcacaaactaatttaagtcctgaattatcacaaacaaatttaagtccagcacttggacaaatgccattaagtcctgatttatcacatactacactatccttagacttctcacaaacaaacttgtcaccagaattatctcatatgacactttcaccagaactatcacaaactaatctttcaccagctttaggacaaatgccaatttctccagatctttcacatacgactcttagtttagacttttctcaaaccaatttatcaccagaactttcacaaactaatttgtcacctgcattaggacaaatgccattatcaccagatccttcacataccactctttcacttgatttatcacaaactaatttatcaccagaattaagtcaaacaaatctttcaccagatctttcagaaatgccattattcgcagatttatctcaaattcctttaactccagatttagatcaaatgacacttagtccagatttaggagaaactgatttatctccaaatttcggacaaatgtcactttctccagacctttcacaagttacattgtctccagatatatctgatacaacattattacctgatttgtctcaaatttctcctccaccagatttagatcaaattttttatccatcagaatcttctcaatcattacttttacaagaatttaatgaaagtttcccatatccagatttaggacaaatgccatctccaagtagtccaactcttaatgatacctttttatctaaggaattcaatcctttagttatcgtaggattatcaaaagatggaactgattatattgaaattatcccaaaagaagaggttcaatcatcggaagatgattacgcagaaattgattatgtaccatatgatgatccatacaaaactgatgttagaactaacattaattcatcaagagatccagataatattgctgcatggtatttaagatcaaataatggaaatagaagaaattactacattgctgctgaagaaattagttgggactatagtgaatttgttcaaagagaaacagatatagaagattcagacgatattcctgaagatactacatataaaaaagtagtttttagaaaatatcttgattcgacattcacgaaaagagatcctagaggagaatatgaagaacatcttggaattttaggtccaattattagagcagaagttgatgatgttattcaagttagatttaaaaatttagcttcaaggccatatagtttacatgctcatggactttcatatgaaaaatcatctgaaggaaaaacatacgaagatgattctccagaatggtttaaagaagacaatgctgttcagccaaattcaagttatacttatgtttggcatgcaactgaaagaagtggaccagaatctccaggaagtgcttgtagagcttgggcatattacagtgcagtcaatccagaaaaagatattcattcaggattgatcggaccacttcttatatgtcaaaagggaattttacataaagattcaaatatgccaatggatatgagagaatttgttttactttttatgacttttgatgaaaagaaaagttggtattatgaaaaaaagagcagatctagttggagattaacatcaagtgaaatgaaaaaatctcacgaattccatgctattaatggaatgatttattctttaccaggtcttaaaatgtatgaacaagaatgggttagattacacttgttaaatataggaggaagtcaagatattcatgtagttcattttcatggacaaactttattagaaaacggtaataaacaacatcaattaggagtctggccacttcttccaggatcttttaaaacattagaaatgaaagctagtaaaccaggatggtggctattaaatacggaagttggagaaaatcaaagggcaggtatgcaaactccattccttattatggatagagattgtagaatgcctatgggactttctacaggtattatttcagattctcaaattaaagcttcagaatttttaggttattgggaaccaagattagctagattaaataatgggggatcttataatgcatggtcagttgagaaattggctgcagaattcgcttctaaaccatggatacaagtcgatatgcaaaaagaagttataataactggaattcaaacacaaggagctaaacattatcttaaaagttgttatactacagaattctatgttgcttattcttcaaatcaaattaattggcaaatttttaaaggaaactctacaagaaatgttatgtattttaatggaaattcagacgcaagtacaattaaagaaaatcaatttgatccaccaatcgtagctaggtacattagaatctctccaacaagagcttataatcgtccaacattaagattagaacttcaaggatgtgaagttaacggatgttcaaccccattaggaatggaaaatggtaaaattgaaaataaacaaattacagcatcatcttttaaaaaatcatggtggggagattattgggagccattccgtgctaggttaaatgcacaaggaagggtaaatgcttggcaagctaaagcaaataataacaaacaatggcttgaaattgatttacttaaaattaaaaaaattactgcaataattacacaaggttgcaagtcactttcatctgaaatgtatgttaaatcttatactatacattatagtgagcaaggtgttgaatggaaaccatatagacttaaatcttctatggtcgataaaatattcgaaggaaatacaaatactaaaggtcatgttaaaaatttctttaatcctccaattatttcacgattcattcgagttattccaaaaacatggaatcaatcaattgctcttagattagagttatttgggtgtgatatttat

SEQ ID NO: 2343 - DNA, 6672 bp, Artificial Sequence
  derived and/or modified sequence
atgtttcccggatgtccccgactgtgggtgctcgtcgttttaggcacgagttgggttggctggggcagccagggtacggaggctgcacagttgcggcagttttacgttgcagcgcaggggatcagctggtcatatcgacctgagccaacaaattctagcctgaatcttagtgtgacatcatttaaaaaaatcgtgtaccgagaatacgagccttactttaagaaggaaaaaccccagagcaccatcagtggtctcctgggacctactctgtatgctgaggtaggtgacatcataaaagtacattttaaaaataaggctgacaagcccctcagtatccatccccaggggattcgctatagcaaactgtccgagggggcctcttatttggatcataccttcccagctgaaaaaatggatgacgcagtcgctcctggccgagagtacacatacgagtggtccataagcgaggattcaggccctactcatgatgatcctccgtgtctgacccacatatactacagtcacgaaaatctgatcgaagactttaatagcggactcattggaccactcctgatctgtaaaaagggtacacttactgagggcggaacccagaagacgttcgataagcagatcgtgctgcttttcgccgtgtttgatgagtctaagtcttggtcccagagttcaagtctgatgtacactgtcaatggatacgtaaatgggaccatgcctgacatcacagtgtgtgcacacgaccacattagttggcatctcctaggaatgtcttccggcccagagctgttttcaattcacttcaatggacaggtcctggaacagaaccaccacaaggtgtccgctattactctggtatccgctacttccacaacggcaaatatgacggtgggacccgagggcaagtggatcatctcttcactgacgcctaaacacttacaagcaggcatgcaggcttatatcgacatcaagaactgtcctaaaaaaacccggaacctgaaaaagatcacccgagagcagagaaggcatatgaagagatgggagtactttatcgctgccgaagaggtcatttgggattatgccccagtcatccccgcaaacatggataagaaatatcgatcccagcacctggacaacttctcgaatcagattgggaaacattataagaaagtgatgtacacccaatacgaggatgagagcttcaccaaacatacagttaatccaaatatgaaagaggacggcatcctcggtccaattattagagcccaagtgagggataccctcaaaatagttttcaaaaacatggcttcccgtccttattccatttacccccacggcgtaaccttttccccctacgaggatgaagtcaactctagttttacctccggacggaacaacaccatgatcagggctgtccaacccggcgagacatacacgtacaaatggaacatattggagtttgacgaacccacagaaaatgatgctcagtgcctaacccgaccatactattctgacgtggacattatgcgagatattgcctccggcctgattggcctgttgcttatctgcaagtccaggagccttgacaggcgaggcatacagcgcgccgccgacatagagcagcaggcggtgttcgctgtttttgatgaaaacaagagctggtatctggaagataatattaacaaattctgcgagaaccctgatgaagtaaaaagagacgaccccaaattttatgagtctaacatcatgtccactattaacgggtacgtgcccgaatcgataaccacactggggttttgttttgatgacactgtacagtggcacttttgctctgtgggaacacagaatgaaatcttaactatacacttcactggacattcatttatctacggaaaacgccacgaagatacgttgacgctttttcccatgcgcggcgaatcagtcactgtgaccatggacaacgtgggcacctggatgttaacgagcatgaattctagccctaggagtaaaaaacttcggctaaagtttcgcgacgttaagtgtattccagacgatgatgaagattcttatgaaatatttgagccacctgagtctacagttatggccacgagaaaaatgcacgacaggctggagccggaagatgaagaaagcgatgcagattacgattaccaaaatcggctagccgcggccctgggcatcaggagctttcgaaattctagcctgaatcaggaggaggaagaatttaacttgacagcactggctctggaaaatggcacagaattcgtctccagcaatactgatatcattgtgggctcaaactattcctctcctagcaatatctccaaatttaccgtaaataatctagcggagccgcagaaggcaccttctcatcagcaggccacaacagccggttcacctctccgccatctcattgggaagaatagtgttctcaactcctctactgccgagcactcctccccctactctgaggacccgatcgaggatcccctgcagcctgatgtaactggtataagattgctctctctaggggccggagagttcaaaagccaggaacatgccaagcacaagggccctaaggtggagcgtgatcaggcagctaagcaccgattcagctggatgaagcttctggcccacaaggttggcaggcatctgtcacaggataccgggtccccctctggaatgcgtccctgggaggatctcccatcacaagacaccggtagccccagcagaatgagaccatggaaggatccgccctcggacctgttattacttaaacagagcaactcaagcaagatactggtggggagatggcatctggcgtcagagaagggctcatatgaaatcatacaggacacagatgaagacactgctgtgaataactggctgattagtccccagaacgcgtcccgggcctggggcgagagcacgccactggcgaataagcctggaaaacagtctgggcaccctaaattccctagggtgcgccacaagagcctccaagtgcggcaggacggtgggaagagtcgcttgaaaaagtcccagttcctgattaagacgcgaaaaaaaaagaaagagaaacatacacaccatgccccactgagcccacgcacgttccatccgctccgctctgaggcatacaatacattttccgagaggaggcttaagcatagtctggtgctgcacaaatccaacgagacttcactccctacagacctaaaccagaccctgcccagtatggacttcggatggatcgcctccctccctgaccacaaccagaactcatccaacgacactggacaggcctcctgtccaccaggattataccagactgttcctccagaagagcactaccagacctttccaatccaggatccagaccagatgcattccacaagtgacccctcacatcgaagctcctcccctgaacttagcgaaatgttggagtatgacaggtctcacaagagctttcctaccgatatttcccagatgtccccttcctccgagcatgaggtgtggcaaacagtgatcagtccggacctgtcccaagtcacgctgtcgcccgagcttagccaaactaatctgagtcccgatttgtctcacacaaccctgagccctgagctcatccagcgaaatctgtctccggctttggggcagatgcctatatctcccgacctttctcatacgacgttaagtcctgacctatcacatacaacccttagcctggatctcagtcagactaatctctctcctgagctgagtcaaactaatctgtcacctgccctggggcagatgcccctatccccagatctgtcacataccacactgtctcttgacttctctcagacaaatttatcccctgaattatcccatatgaccctctcgcccgagcttagtcagactaacctttcccccgccctgggccaaatgcccatttcaccggatctgagtcacaccactctgtccctcgatttctctcagaccaacctctctcctgaactttcccagacaaatttgtcccccgctcttggtcagatgccactcagccccgatccgagccacacgactttgtcattggatctgtctcagacaaacctgtccccagaattgagccagacaaatctgagtcctgatctgtctgagatgcccctctttgccgatctctcacagatccctctgactccagatctagatcagatgaccctgtctccagatctcggagagacagacctttcgccaaactttggccagatgagcctctccccggacctgagtcaggttactctgtctccggatatttccgacacaactctcctccctgacctatcccagatctcccccccacccgacctggatcagatcttttaccctagcgaatcttctcaatccctccttctgcaggagtttaatgaaagcttcccttaccccgacctcggccagatgccatccccgtcatctccaacactgaacgacacgtttctttccaaggagttcaaccctcttgtcatcgtgggactaagcaaggacggaacggattacatcgaaatcatccctaaagaggaggttcagtcttcagaggacgattacgccgagatcgactacgtgccctatgacgacccttacaagacagatgtaagaacaaacatcaattcctccagggatcctgacaatatcgctgcctggtacttgagatcaaacaacggcaatcgcaggaattactacattgctgccgaggaaatttcttgggactactcagagttcgtgcagcgagagaccgacatcgaagacagtgatgacatcccggaagatacaacttataagaaagtagtgttcaggaaatatctggactcaacctttactaaacgcgacccccgaggggagtatgaagagcatctcggcattctcgggcctatcattcgcgctgaagttgatgatgtgatccaggtacgttttaagaacctggctagccggccttactcgttgcatgcccacggactttcttatgaaaagtcctctgaggggaagacatatgaagatgacagcccagagtggtttaaagaagacaacgctgtgcagcctaatagctcctatacctacgtgtggcacgctacagagcgaagtggcccggagtctcctggatcagcgtgtcgcgcatgggcatattactcagccgtgaaccccgagaaagacatacattctggcttgatcggtcccctgctcatttgccagaagggcatcctgcacaaagattcaaacatgccaatggacatgagggagtttgtcctgcttttcatgacattcgatgagaaaaaaagctggtattatgagaagaagtcccggtcctcttggcgacttactagcagcgaaatgaagaagtcccatgagtttcacgcaatcaacggaatgatttactctttgccgggtcttaaaatgtatgaacaggagtgggtcagactgcatctgctcaatattggaggatctcaggacattcacgtggtccacttccatggtcagactcttctggagaacggcaacaagcagcatcagctcggcgtgtggcccctgctgccaggctcattcaaaacactggagatgaaagcaagcaaacccgggtggtggctgttgaataccgaggtgggggagaaccaacgggcgggaatgcaaacaccctttctgatcatggacagagactgtagaatgccaatgggtctctccaccggaatcattagcgatagccagatcaaagcctctgagttcctcggttactgggagcctagactcgcaaggcttaacaatggcggctcctacaacgcatggagcgtggagaaactggcagctgaattcgcctccaaaccatggatccaagtggatatgcagaaagaggtgatcatcaccggtattcagacccagggggcgaaacattacctcaagagctgctatactaccgaattctacgtggcctattcgagtaaccagataaactggcagatctttaagggaaacagcacgcgaaacgtgatgtactttaatggcaattcagatgcttctaccattaaagagaaccagttcgatcctcctattgtcgcaagatacattcgtattagtcccactcgcgcgtacaataggcccacgctacgcctcgagttgcagggttgcgaggtcaatgggtgcagtactccacttgggatggagaacgggaagatcgaaaacaagcaaataacagcaagcagtttcaagaagtcttggtggggtgattattgggagccattcagggcaagactgaacgcccagggtagggttaacgcctggcaggcgaaagccaacaataacaagcagtggctcgagatagatctgttgaaaatcaagaaaatcacagccattattacacagggatgtaagtccctatctagtgaaatgtacgtaaaatcttatacgatacactactccgagcagggcgttgagtggaagccttatcgcttgaagtcttctatggtggacaaaatcttcgaggggaacactaacaccaaaggacatgtgaagaacttcttcaacccaccaatcatctctcgcttcattcgcgttattcctaagacttggaatcagtcaattgctttgagactggagctcttcggctgcgacatttac

SEQ ID NO: 2344 - DNA, 6672 bp, Artificial Sequence
  derived and/or modified sequence
atgtttccaggatgtcccaggctatgggtgctcgtggtgctgggtaccagttgggtggggtggggttcacagggcacggaggccgcccagctgcgacagttctacgtcgctgcccagggcatctcgtggagctacaggcctgaaccaaccaattcaagccttaatttatctgtgacctccttcaagaagattgtgtatcgggaatatgagccttactttaagaaggagaagcctcaaagcacaatctccggcctgctgggccccacactgtatgccgaagtcggcgacattattaaggtgcattttaaaaataaggcggacaagcccctgtctattcacccacaggggattcgttattctaagctgtcagagggagcctcatacctggaccatacgtttccagccgagaaaatggacgatgcagtcgccccagggcgtgagtacacctatgaatggagcatctcggaggattcagggcctacgcatgatgatcccccctgcctgacccatatttactattctcatgagaacctgatcgaggattttaatagtgggctaattggtcctcttctcatctgcaagaaaggcaccttgactgagggagggacacagaagactttcgataagcaaatcgtccttttgtttgccgtctttgatgagagtaaatcatggagccagtccagtagcctgatgtatacggtcaatggatacgtgaacggcaccatgccagatatcaccgtgtgcgctcacgaccatatatcttggcatctgctgggcatgtcctcagggcctgagcttttttcaatccactttaatggccaagtgctggaacagaaccaccataaagtttctgcaataaccctcgtcagcgccacctctaccaccgctaatatgacagtgggccccgaaggcaagtggataatctccagtctgactcctaagcatctgcaagccggaatgcaggcctacattgacataaagaattgtccaaaaaaaacccggaacctgaagaagattacacgagaacaaaggaggcatatgaagaggtgggagtattttattgcagcagaggaggttatctgggattatgccccagtcataccagctaacatggacaagaagtaccgctcgcagcaccttgataactttagtaaccaaattggcaaacactacaagaaggttatgtatacacagtacgaggatgagagtttcacaaagcacacggtcaaccctaacatgaaggaggacggcatactcgggccaatcatccgggcacaggtgcgggataccctgaagatcgtattcaagaacatggcctctagaccttactctatctatccgcacggcgtaacattctctccgtacgaagatgaagtcaatagttctttcactagcggacgtaacaacaccatgatcagggctgttcagccaggagaaacatatacctataaatggaacatcctggaattcgacgaaccaactgagaacgacgcacagtgcctgacccggccctactacagcgatgtggacattatgcgagacattgcctccggcctgattggtttgttgctgatctgcaaaagccggagtctggaccgccgcggtatccaacgggctgctgatatagaacaacaggcagtatttgcagtgttcgatgagaacaaatcctggtaccttgaagataatattaacaaattctgcgaaaatcctgatgaggtcaagcgggatgatcccaaattctatgaatccaatatcatgtccacaatcaacggctacgtgcctgagtccataaccacactcggattctgtttcgacgatactgttcagtggcacttctgctcagtgggcacccaaaatgaaattcttacaatccattttactggccattcatttatctacggcaagcggcatgaggacacacttactctgtttcccatgaggggcgaatcagtaacagtcacgatggacaacgtaggcacctggatgttgacctctatgaattcatcccctcgaagcaagaagctgcgcctgaagtttcgcgacgttaagtgtattcctgatgacgacgaagattcgtacgagattttcgaaccccctgagtcgaccgtaatggctactcgaaagatgcacgaccggctagaaccagaggacgaggaaagtgacgccgattacgattatcagaatcgcctagcggcagctctaggaattcggtccttccgtaacagtagcctgaatcaggaagaggaggagtttaacctaacagccctggctctcgaaaatgggaccgagtttgtgtccagtaatactgatatcattgtcggcagtaattactcctcacctagtaacatttcaaaatttaccgtcaataacttggctgagcctcaaaaagccccatctcaccagcaggccaccactgccggcagtcctctacgccaccttatcgggaagaactccgtgttgaactcgtctacggcggaacactcttccccctatagcgaagaccctattgaagatcctttacaacctgacgttaccggcattcggctcctgagcctcggcgcgggcgagtttaaatctcaggaacacgccaagcataaaggacccaaagtcgaaagagaccaggctgcgaagcatcgctttagttggatgaagctcctggcccacaaagtgggccggcatcttagccaggacacaggaagcccctctgggatgcggccatgggaggatctgccctctcaggacacaggctccccatccaggatgcggccatggaaagatcccccaagcgatctgctcctactgaaacaaagtaatagcagtaagatactcgttggtagatggcacctggcctcagaaaaaggttcctatgagattatccaggataccgacgaagatacagcagtgaataactggctgatttctcctcagaacgcgtcccgagcctggggagagagtactcctttagccaataaaccagggaaacagagtggacatcccaagttccccagagtccggcacaaatccctacaggtacggcaggacggtggaaagagtagattgaaaaagagccagttcctgattaagacacggaagaagaagaaagagaagcacacacaccatgccccgttgtcaccccgaactttccatcctcttagatctgaagcttacaacacattctctgagcgcaggctgaagcacagcttagtgctgcataagagtaatgagacttccctgccaactgatttgaatcagaccctaccatctatggactttggctggatcgcaagcctcccagaccacaatcaaaattcctctaatgacaccgggcaggcgagctgtccgccaggcctgtatcagactgtaccgccggaagaacactatcagacctttccgatacaggacccagaccaaatgcattctacaagcgatcccagtcaccgaagcagtagccccgaactgtctgagatgttggagtacgaccggagccacaagtctttccccaccgatattagccaaatgtctccatcatcagaacatgaagtctggcagactgtgatttccccagacctatcccaagtgacattgagcccggagctttcacagactaatctttctcctgacctgagccacacgaccctaagccctgaactgatacagaggaacctaagccctgctctcggacaaatgccaatttcccctgaccttagccacacgactctgtcccccgacctctcgcataccactctgtctttagatctgagtcagacaaacctgtcaccagagttatcacagaccaacctttcaccagcactcggccagatgcccttatcacctgacctgagtcacaccactctaagcttagatttctcccaaacgaatctgtcgcccgaactcagccacatgactttgtctccagaattaagccaaactaatcttagccctgcactcggccaaatgcccatctcccctgacctttcccatacaactttgagtctggatttttcccagaccaacctgtctccagagctatcccagaccaacttgtcgcccgcgcttgggcaaatgcccctaagccctgatccctcccacacaaccctctccctggacctctctcagactaaccttagcccagagctcagccaaaccaatctcagtcccgacctttcggagatgcccctcttcgcagatctctcccagattcccctcactcccgaccttgaccagatgaccctgtcaccggacttgggtgagactgacctctctccaaactttgggcagatgtctctgtcccccgatctgtctcaggttactctgtcccccgacatctccgacacaacactgctgccggatctgtcacagatttcgcctcccccagatctcgatcaaattttctaccctagcgagtctagccagtctctgctgctgcaggagtttaatgagagtttcccataccctgacctgggacagatgccctccccttcgtctcccacactgaacgatacatttctctctaaggaatttaacccgctcgtgatagtaggtctgtctaaggatggtacggattacatagagattatcccaaaagaggaggtccagagtagcgaagatgactatgccgagattgattatgtgccttatgacgacccttataagacagacgtgcggacgaacataaacagtagccgggatcctgacaatattgccgcctggtatctccggtccaataatggaaaccgacgcaactattatatcgccgcagaggaaatcagttgggactatagcgagtttgtacagcgcgagacggatattgaagattcggatgacatcccggaggataccacctataagaaggtagtctttcgtaaatacctcgactctacttttactaaacgggatcccagaggcgagtacgaagaacacctgggcatactggggccaatcattcgagccgaagtagacgacgtgattcaagtgaggtttaaaaacctggcctctcgaccatactccctgcatgcacatggtctgagctacgaaaagtcctccgagggaaagacctatgaagatgactcaccagaatggtttaaggaagacaacgccgtgcagccaaattctagctatacctatgtatggcatgccacggaacgctccgggcccgagagccccggctctgcttgccgtgcttgggcgtattacagcgctgtgaacccagaaaaggatatccactcaggcctgattggaccccttctgatttgccagaagggaatcctgcacaaggacagcaacatgcccatggacatgcgcgaatttgttctactctttatgacgtttgacgagaagaaaagctggtattacgagaagaagtcccgctcttcatggagactcacatcatcagagatgaaaaaatcccacgagtttcacgctattaatggtatgatttatagccttcctggcctcaagatgtacgaacaagagtgggtacgtctgcatctccttaacatcggcggcagccaggatatacacgtggttcactttcatgggcagacgctcctggaaaatgggaataagcagcatcagctgggcgtttggccactgctgcccggcagttttaagaccttggaaatgaaagcttctaaaccgggctggtggttgctgaacacagaggtgggagaaaatcagcgagctggcatgcagactccttttttaattatggatagagattgtcggatgcccatggggctgagtacgggaattataagcgatagccaaattaaggcctcagagttcctcggatactgggaaccgaggctggcccggctaaataatgggggttcctacaatgcctggtcagtggaaaagctggccgcagagtttgctagcaagccctggatccaagtggatatgcagaaggaagtaattattacaggaatacagacccagggagcaaagcattatctcaagtcatgctacacaacggagttttatgtcgcctatagctctaatcaaatcaattggcagatcttcaagggcaactctacccgcaacgtcatgtactttaatggaaacagcgacgcctcaactatcaaggagaaccagttcgatccacccatcgtggcccggtatatccgtatcagccccacgcgggcctataaccgacctactctacgactggagctgcagggttgtgaggtgaacggatgcagcacaccattggggatggagaatggaaagatcgaaaataagcaaataacagcaagctcctttaagaaaagttggtggggcgattattgggagcccttcagggcacggttgaacgcgcaaggcagggttaacgcttggcaggcaaaagcgaataacaacaagcaatggttagagatagatcttctaaaaatcaagaagattactgccataataacgcaggggtgcaagagtctgagtagtgaaatgtacgtgaaatcctatactatccactatagtgagcagggagttgaatggaagccataccgcttaaagtcatcgatggtggacaaaattttcgagggaaacactaataccaagggacatgttaaaaacttctttaaccccccgattatttcgagattcatccgcgtgattccaaaaacttggaaccagtctatcgcgctgagactggaactgtttggctgcgacatctat

SEQ ID NO: 2345 - DNA, 6672 bp, Artificial Sequence
  derived and/or modified sequence
atgtttcccggttgtccacgcctgtgggttctcgtagttctgggcaccagctgggtcgggtggggaagccagggtaccgaggccgcacagttaagacagttctatgtggcagcacagggcattagttggtcctatcgcccagagccaaccaattccagtctgaacctctccgttacatcttttaaaaaaatagtttacagggaatacgagccctacttcaagaaagagaagccacaatcaactataagcggcctgttaggacccacactatacgccgaggtaggcgacatcataaaagtccactttaagaataaggctgacaaaccactaagcattcatcctcaagggatacgatattcaaagctcagcgagggcgcctcttaccttgatcacacatttcccgcagagaaaatggatgatgccgtggcacccggcagggaatacacctatgaatggagtatcagcgaagatagtggcccaacccatgacgatcccccatgcctgacccacatctattactctcatgaaaacctaattgaagatttcaattctggcctgattggacctctgctgatttgtaagaaaggcactctcactgaaggaggcacccagaaaacctttgataagcagattgtgttactgtttgccgtgttcgacgagtcaaagagctggtcacagagctcatcattaatgtacacagtgaatggctatgtgaacgggaccatgcctgacatcacagtctgtgcacatgatcatatatcttggcatctgctgggcatgtcctcaggccccgagctgttcagcatccacttcaatggccaggtcctagaacagaatcaccataaggtaagcgcaataactctagtttctgctacaagtactacagccaacatgaccgtcggtcccgaggggaagtggatcatctccagtctgacccctaagcatctgcaggccggaatgcaggcatatattgacataaagaattgtccaaaaaaaaccaggaatttaaagaagatcacacgtgaacaacggcggcatatgaagcggtgggagtatttcatcgcagccgaagaagtgatctgggactatgcacctgtgatcccagccaacatggacaaaaagtatagaagccagcaccttgataactttagcaatcagataggcaaacactacaagaaggtgatgtatactcagtacgaagacgagagttttactaagcacactgtgaatcccaatatgaaggaggatggaatcctgggacctataatccgggcccaggttcgggataccttgaaaatagtgtttaagaatatggcctcccgcccctattctatctatcctcacggcgtgacattctccccttacgaggatgaggtgaatagcagtttcacttctgggcgaaataacacaatgataagagccgtgcagcctggtgagacatacacatataagtggaacattttagagttcgacgagcccaccgaaaacgatgcccaatgtttaaccaggccttattattcagacgtcgatattatgagagatatcgctagcggcctgatcggactcctgcttatttgtaaaagtcgctctctggatcggcgtgggatccagcgggctgctgatattgagcagcaagccgtttttgctgtttttgacgaaaacaaatcctggtacctggaggacaacattaataaattctgtgagaacccagatgaagtaaagcgagacgaccccaagttttacgagagtaatataatgagcacaataaacggctatgtgccagaaagcattacaacactcggcttttgtttcgatgacacagtccagtggcatttttgcagtgttgggacccagaatgagattctcacaattcactttacaggccacagcttcatatacgggaaaagacatgaggacaccctcaccctcttccctatgaggggggagagcgttaccgtaactatggataacgtaggcacctggatgttaacaagcatgaacagctccccacggagcaagaagctgagattaaagttcagggacgttaagtgcattcccgatgacgacgaggattcttacgaaatttttgaaccccctgaatcaaccgttatggcaacacgcaagatgcatgatcgccttgagcctgaggacgaggagtctgatgccgattacgattatcagaatcgactggctgccgccctgggcatcagatcttttaggaactcttccttaaatcaggaggaagaagagtttaacctgaccgcactggccctcgaaaatggcaccgagttcgtgtctagtaataccgacataattgttggatccaattattcctctcccagtaacatctctaagttcacagttaacaatctggccgagccccaaaaggccccaagccaccagcaggcaactaccgcaggtagtcctctgaggcatctcattggcaaaaatagtgtgttaaattcctccactgccgagcattccagtccttactccgaagaccctatagaggatccactgcaacctgatgttacaggtataaggttactgagcctaggcgctggcgagttcaaaagccaagagcacgcaaaacacaaaggccctaaggtcgagagagaccaagcagccaaacatagattctcctggatgaagctgctggcccacaaagtggggaggcatctaagtcaggacacaggctcccctagcggtatgcggccatgggaggatctccccagccaggacaccgggagcccttcaagaatgcggccctggaaggacccaccctccgacctactattgctaaagcagagtaacagcagcaagatactggtgggcaggtggcacctcgccagtgaaaagggcagctacgagataattcaggatacagacgaggacaccgccgtgaacaattggctgattagccctcagaatgcctcccgcgcttggggggaaagtactcctctcgccaacaaaccaggaaaacagtccggacacccaaagttccccagggtgcgacataagtccctgcaggttcgacaggatggcggtaagtctcgtctgaagaagagccaattcttgatcaagacaagaaaaaagaagaaggagaaacatacacaccatgcccccctttcaccacgaacattccaccccctacgctccgaagcctataacacctttagcgagcggcgcctgaagcattccctcgtcctccacaagtccaacgagacatccctccctactgatctcaaccagaccctaccgtctatggacttcgggtggatcgcctccttacctgaccacaaccagaattctagcaacgacaccggccaagcctcttgcccaccaggtctgtaccagactgtgccccctgaagaacattatcagaccttccctatccaagaccctgaccagatgcactctacatcagatcccagccaccggagctcttccccagagctatccgaaatgctggagtatgatcgatctcataaatcatttcccaccgatatcagccagatgtcaccctctagcgaacacgaggtctggcagaccgtgattagtcctgatctgagtcaggttaccttgtcccccgagctgagtcagacaaatctgtcccccgatctgtcccacaccaccctctcccctgaattgatccaaaggaacctgtcccctgccctgggacagatgcctataagcccggacctcagtcacacaaccctgagtcctgatctgtctcataccactctgtctctggatctctcccaaaccaatctgagcccagagctcagccaaaccaacctgtctcctgcactaggccagatgccactgagtccagacctttcccacaccaccctatccctggatttttcacagactaacctgtcacccgaactgagtcatatgaccctatctcccgaactctctcaaacaaacctcagccccgccctcggacaaatgcctataagcccagatctctcccataccacactgagtctggacttcagccagacaaatctctctccagaactgagtcagacaaatctatcacctgcactaggacaaatgcctctgagcccagatccatcacatactactctgtctctggacctctctcaaacaaacctgagccctgagttaagtcaaactaatctgagtcctgacctcagtgaaatgcccctgttcgcagacttaagccaaatccctctgacacccgacctggaccagatgacactgtctccagatctaggcgaaactgacctgtcccccaactttggccaaatgagtctgtctccagacctgagtcaagtgacattatccccagacatctctgatacaactcttctcccagatctgtcccaaattagcccccctcccgacctcgaccagatattttaccctagcgagtcctcccagtctttactattacaggaattcaacgagtcatttccttatcccgacctcgggcagatgccttctccatcctccccaaccctcaatgatacattcctgtccaaggaattcaaccctttggtaattgtgggtctgagcaaggacggtaccgactacattgagatcataccaaaggaggaagtacagagttctgaggacgactatgccgagattgactatgttccctatgacgacccatacaaaaccgacgtacgcacaaacattaattcctcccgcgaccccgacaatatcgccgcctggtatttgaggagtaataatggaaaccggaggaattactacatcgccgctgaggagatttcctgggactacagtgagttcgtgcaacgcgagactgatatcgaggacagcgacgacatcccagaggatacaacatacaaaaaagtggtctttcgaaagtatctggacagtacatttacaaaacgcgatcctcgaggggaatatgaagaacacctgggcatactgggcccaataatccgggctgaagtggacgacgttatccaggttcgattcaagaacctggcatcacggccctacagtctgcatgcacatggtctgagctatgaaaaaagttctgaaggaaagacttacgaggacgatagcccagagtggtttaaagaagataatgccgtgcaacctaactcttcttatacctatgtgtggcatgccactgaacgttcaggacctgagagtcccggctcagcatgccgcgcatgggcatactattccgccgtgaatccagaaaaggacatacacagtgggctaatcggccctttactaatatgccagaaagggatcctgcataaagattctaacatgcctatggacatgcgagagttcgtgttactctttatgaccttcgacgagaagaagagttggtactacgagaaaaagagtaggtcatcttggcgactgaccagctccgaaatgaaaaagtctcatgagtttcatgccataaatggcatgatctattctctgcctggtctaaaaatgtatgagcaggaatgggtgcggctgcatctcctgaacatcgggggtagtcaggatatacatgtggtgcactttcacgggcagactttactggagaacggcaacaagcagcaccagctgggagtgtggccactcctaccaggatccttcaaaacactggagatgaaggcatcaaagccagggtggtggcttctgaacaccgaagtcggcgagaatcagagggctggtatgcagacccctttcttaatcatggaccgcgactgtagaatgccaatgggtttatcaaccggtattatctccgatagccagataaaggcaagtgaatttctgggctactgggaaccacgactagcaagactaaacaatggagggtcatacaacgcatggtccgtcgagaaactagctgctgaattcgcctctaaaccttggattcaggtggacatgcaaaaggaggtgattatcactggcatacagactcagggggctaaacattacctgaagagttgttataccacagaattctacgtggcctactccagtaaccaaattaactggcagatctttaagggcaacagcactagaaatgtcatgtacttcaacggcaacagtgatgcatcaacaatcaaggaaaaccaattcgaccccccaatcgtcgctagatacatacggatttccccaaccagagcttacaacagaccaaccttaaggctagaactgcagggatgcgaagttaatgggtgctcaactcccctgggcatggaaaacggcaaaattgagaacaaacaaatcaccgctagctcattcaagaagtcttggtggggagactattgggagccttttcgtgcccggctaaatgcacagggcagagtgaacgcttggcaggctaaggccaataataataagcagtggctggagattgatctgctgaaaataaagaaaatcaccgccatcataactcaagggtgtaaaagcctgagtagcgagatgtatgtcaagagttataccatacactactccgaacagggcgtggagtggaagccttaccgtctaaaaagttctatggttgataaaatttttgaaggtaatacaaatacaaaaggccatgtgaaaaatttcttcaaccctcctataatctctcgatttattcgagtgatccccaaaacctggaaccaaagtatagcactacgcctcgaactgtttggctgcgatatttat

SEQ ID NO: 2346 - DNA, 6672 bp, Artificial Sequence
  derived and/or modified sequence
atgttcccaggatgcccacgtctgtgggtgctcgtagtgctggggaccagctgggtggggtggggatctcagggcacggaagcagcccagctccgtcagttttacgttgcggcccaggggatatcttggtcatatcgtcccgagcccacaaactctagccttaacctgtcagtgaccagcttcaagaagatcgtgtatcgggagtacgaaccatacttcaaaaaagagaagccacagtccaccatcagcggattgcttggacccacgttgtacgctgaggtgggcgatattatcaaagtgcattttaagaacaaagctgataagcctctgtctatccacccccagggcatccgctacagtaagttatccgaaggagcctcgtatttagaccatacctttccagccgagaagatggatgacgcagttgcgccaggacgcgagtacacatacgagtggtctatttcagaggatagcggcccaacccacgacgaccccccctgtcttactcacatctactactcccatgaaaacttgatagaagattttaattcgggcctcattggtccacttctgatctgtaagaagggcactttaactgagggcgggacccagaagacatttgacaagcaaatagttctactattcgctgtattcgatgagagtaaatcttggagccagagctcctcgctcatgtatacagtgaacggctatgtcaatgggacaatgccggatatcactgtttgtgctcacgaccacatctcatggcatttgctgggaatgagctctggcccagaactgttttctattcactttaacgggcaggtgctggagcagaatcaccataaggtgagcgcaatcacgcttgtcagtgctacctccactaccgctaacatgacagtggggcccgagggcaaatggattattagctcccttaccccaaagcatctgcaggctggtatgcaagcatatatagatataaaaaactgcccaaagaagactcgtaacttaaagaagattaccagagagcagcgacggcatatgaagcgctgggagtactttatcgccgccgaagaggtcatctgggactatgctccagtgatccccgctaatatggacaaaaagtatcgttcacagcatctggataatttcagtaatcagatcggcaagcactataagaaagtgatgtatactcagtacgaggacgaatctttcacaaaacacacagtcaaccctaatatgaaagaagacggaatactgggaccaattatccgagcacaggtgagggacaccctcaaaatagtgttcaagaatatggcatccaggccctactctatctacccccatggtgtcacattttccccctatgaagacgaggtcaactccagtttcaccagcggccgaaacaatacaatgattcgggccgtccagccgggcgagacttacacctataagtggaacattctcgagttcgatgagcccaccgagaacgatgctcagtgccttacgcgaccttactactctgacgtggatataatgagggacatcgcctccggcttgattggcctgctcctcatctgcaaaagcaggagtctggatcgccgggggatacagcgcgcagcagatatcgagcaacaggccgtctttgccgtctttgacgagaataaatcctggtacctggaagacaacattaacaaattttgtgagaatcctgatgaagttaaacgtgacgatcctaagttctatgagtcaaatatcatgtccacgattaacggatatgttccggaatctattaccactctggggttctgcttcgatgatacagtgcagtggcatttctgttcggtagggacccagaacgaaatcctcacaatccactttaccgggcactccttcatttacggcaagcggcacgaggacacccttacattatttccgatgcgcggcgagagcgtgactgtgactatggacaatgtgggcacttggatgctgacgagcatgaactcttcccctcgatccaagaagttaagactgaagtttcgagatgttaaatgcatacctgacgatgatgaggactcctatgagattttcgaacccccggagagcaccgtgatggcaacgcgtaagatgcacgatcgcttggaaccagaggacgaggaatccgatgctgactatgattaccagaatcggctcgctgcagccctcggaatacgaagtttccggaactcatcattgaatcaggaggaggaagaatttaacctgaccgccctggcactggaaaacggcaccgagtttgtcagctctaataccgacatcatcgtgggatcgaattactcaagcccatcaaacattagtaagtttaccgtcaataacctcgccgagccgcagaaggctccgtcacatcagcaagccacaacagcgggcagccccctgaggcacctgatcggcaagaactcagtgctcaattctagcacagctgaacatagttctccatactccgaggatccaatcgaggacccactgcaaccggatgttacaggcatcaggctgctgtccctgggcgccggcgagtttaaaagccaggagcacgccaagcacaaagggccaaaggttgaaagggaccaggccgccaaacaccgcttctcatggatgaagctccttgctcataaagtgggacggcatctctctcaggacaccggcagcccaagtgggatgagaccatgggaagatttaccgagccaggatacgggcagtcccagtcgtatgcggccgtggaaagaccctcctagcgaccttttgctgcttaaacagtcaaacagcagcaagattctggtcggtcgctggcacttagcttctgaaaagggaagctacgaaattattcaggacaccgacgaggacaccgcagttaacaattggctaattagtccacagaacgccagcagggcctggggcgaaagcacccccctggcaaataagcctgggaaacagtccggtcatcctaagttccccagagtgaggcacaaatccctgcaggttcgccaagacggcggcaagagcaggctcaagaagagccagttcctgatcaagactcgaaagaagaagaaggagaagcacacccatcacgctccactgtccccgaggaccttccatcctcttaggtccgaagcatataatacctttagcgagaggcggctcaaacactccctggttctacacaagtcgaacgaaacaagcctcccaaccgacttaaatcagacccttccatctatggacttcggatggattgctagcttgcctgatcacaaccagaacagttccaatgacacgggccaggccagttgcccccctggcctttaccagacagtgccccccgaagaacattaccaaactttcccgatacaagacccggaccagatgcactccacgtctgacccctctcacaggtcatccagcccagagcttagcgagatgctagagtacgatagatcacacaagtccttcccgaccgatatttcacagatgtctcctagctccgagcacgaagtctggcagacagtcatctcaccagacttatcccaagtaacactaagccccgaactgagtcagacaaatcttagtcctgatctcagtcatacgaccctgagtccagagctgatccagcgaaacctatcacccgccctgggccagatgcctattagtcccgatttgtctcacaccacactgtctccagacttgtctcacacaactctctccctggacctaagtcaaaccaatctatcacctgaactttctcagacaaatctgtcgccagctctggggcagatgcccttatcacctgatttgagtcataccacattgagtttagattttagccagaccaacctgagtccagagctgagccacatgactctgtctcccgagcttagccagaccaatctgtcaccagccctgggccagatgcccatcagtcccgacttaagccacacaaccctgtcacttgatttctcacaaaccaacctttcccctgagctgagccagacaaatctctcgccagccctgggtcaaatgcccctcagccccgacccgtcacataccactctgagcctcgacctctctcaaaccaatctctctccagagctctcccagaccaatctgagtcccgacctgagcgagatgcccctgttcgcagacctatctcagattccacttaccccggacctggaccagatgactctctctccagacttgggagaaacggatctgagccctaatttcggccagatgtctctctcccccgatctctcccaggtaacactatcgccggacatcagcgacaccaccttgttaccagatcttagtcagatatctcctccacctgacctggatcagatcttctaccccagcgaaagttctcagagcctcctgttgcaggagttcaatgagtccttcccttacccagacctagggcagatgccatccccgagctcccctaccctgaatgatacgttcctcagcaaagagttcaatcctttggtaattgtggggctctcaaaggatggcacagactatattgagataattcccaaggaggaagttcagtcgagcgaggacgattatgcagaaatcgattacgttccatatgatgacccgtacaagacggatgtccggaccaatattaactccagccgggacccagataatatcgctgcctggtacctccggtccaacaacggaaaccggcgcaactactatatagccgccgaagagattagctgggattatagtgagttcgtccagcgggaaacagacattgaggacagcgatgacatccccgaggatacaacctacaagaaggttgtttttcgcaagtaccttgactctacgttcaccaaacgcgaccccagaggcgagtatgaagagcacctgggcatcttggggcctatcatcagggctgaggttgatgacgttatacaggtgcggttcaaaaatctcgcctcccgaccgtactccctccacgcccacggactgtcttacgaaaaaagctctgaaggaaaaacctacgaggatgacagtccagagtggttcaaagaagataatgccgtccagcctaactcaagctacacctacgtatggcacgcaaccgagcgcagtggaccagagtcaccaggatcagcatgccgagcttgggcgtattatagcgctgtgaatccggagaaagatatccactctgggttgatcgggccactgctgatctgccagaaagggatactacataaggattctaatatgcccatggacatgcgcgaatttgttctcctctttatgacattcgacgagaagaagtcttggtactacgagaaaaaaagtcgcagttcatggagacttacatcttctgaaatgaagaaatctcacgaatttcacgctatcaacggtatgatatatagtttgcctggcctaaagatgtacgaacaggagtgggtccggttgcaccttttgaacatcgggggaagccaggacatacacgtggtccactttcacggacagaccttattagagaatggaaacaaacagcaccagctgggggtgtggcctctgctcccgggttcctttaagacgttggagatgaaagcatcaaagcccgggtggtggctactaaacaccgaagtcggggagaaccagagagccggcatgcagacaccttttttaattatggaccgcgattgcaggatgccgatggggctgagcactggaataataagtgactcccagattaaggcttctgaatttcttggatattgggaaccccgactcgcgcgcctgaacaatggcggcagctacaacgcgtggtcagtcgagaagctggccgccgagtttgctagcaaaccctggattcaggttgacatgcaaaaggaggttatcatcacagggattcaaacccagggtgctaagcattaccttaagtcatgttatactacagagttctacgtggcttatagtagcaaccagatcaactggcagatctttaagggtaactcaactcgcaacgtgatgtactttaacggcaacagcgatgcctcaactattaaagaaaatcagtttgacccccctatcgtcgcaaggtacattagaatctcgcctacgagggcatataatcggccaactctgaggcttgagctgcagggctgtgaggtaaatgggtgttctactccgctgggcatggaaaacggtaaaatagagaacaagcagatcacagcttcatccttcaagaagagttggtggggagactattgggagccatttcgggctcgccttaacgcacaagggagggtcaatgcctggcaagctaaggctaataataacaagcaatggcttgagattgacctgctcaagatcaagaagatcacagcaattatcacccaagggtgtaagagcctgtcatcagagatgtatgtcaaaagctataccatacattactctgagcagggggtagaatggaagccttacaggttgaaatcttctatggtcgacaagatctttgagggcaacacgaatacaaaggggcacgtgaaaaattttttcaatcctcctatcatttcaagatttatccgggtgattcccaaaacctggaaccagagcatcgccctgcgtttagaactgtttggatgcgatatttat

SEQ ID NO: 2347 - DNA, 6672 bp, Artificial Sequence
  derived and/or modified sequence
atgttccctggatgtcctcggctctgggtattggtggttcttggaaccagctgggtaggttggggctcccagggtactgaggccgcccaactgcgccagttttacgtagccgcacagggaatttcatggtcataccgaccagagccaaccaattcgtccctcaatctcagcgtcacctctttcaaaaagattgtctatcgggaatatgagccgtactttaagaaggaaaaaccacagtccacaatttcaggactgctgggtccaacgctttacgcggaggttggtgacattattaaggtccattttaagaacaaagccgataaaccactttctattcacccgcaaggtattagatatagcaaacttagcgaaggagcttcttatttggatcatacgttccccgccgaaaagatggatgatgcagtagctcctggaagagagtacacatatgaatggtccatcagtgaagattcgggaccgacccatgatgatccaccatgccttacacacatatattacagtcatgagaatctcattgaggattttaactctggtcttatcgggcctctcctcatttgtaagaaaggaactttgacagaaggaggaactcaaaagacgtttgataaacaaatcgttcttctattcgctgtttttgatgagtcgaaatcttggagtcaaagttcctcgctaatgtacacagtgaacggatacgtaaatggtaccatgccagatattaccgtatgtgcccacgatcatatttcttggcatctcctaggtatgagctccggaccagaacttttcagcatccactttaatggacaagtactggaacagaaccatcataaggtatcagcaatcactctcgtgagtgctacctctacgacagctaatatgactgtcggaccagaaggaaaatggataatttcatctcttaccccaaagcatttgcaggctgggatgcaggcttatattgatataaaaaactgtccaaaaaaaacaagaaacctaaaaaagattacaagagagcaacgcagacatatgaaaagatgggaatattttatcgcagctgaggaagttatttgggattatgcgccagttattcctgctaatatggataagaaatatagaagtcaacatttagataacttttcgaatcagataggaaaacattataaaaaggtgatgtatacacagtacgaagacgaatcgtttacaaaacacacagtcaatcctaatatgaaggaagatggaatcctcggacccatcattagggcccaagtaagagacacactgaaaattgtttttaagaatatggcatctagaccgtatagtatttatccacatggggtcactttctcaccttacgaggatgaggtaaattcgtcctttacatctggacgaaacaacacaatgattagggcggtccaaccgggagaaacctatacatataagtggaatatattggaatttgatgaaccgactgagaatgatgcacagtgcttgacaagaccttattattctgacgtggacattatgagagacatagccagtgggctaataggtcttcttttgatttgtaaatctcgttcacttgatagaagaggcattcaacgggccgccgatatagaacaacaggccgtattcgcagtttttgatgaaaacaaatcatggtaccttgaggataacatcaacaaattttgtgaaaatccggatgaagtcaaacgcgatgatcctaagttttatgaatcaaatataatgtccactatcaacggatatgttccagaatcaataacaaccttgggattttgttttgatgatacggttcaatggcacttttgttcagtaggcacgcaaaatgaaattctaaccatccatttcacaggacatagcttcatatatggaaaacggcacgaggacactttgactttgtttccgatgcgaggggaatctgttaccgtcacaatggataatgtaggaacctggatgttgactagtatgaatagctccccgaggtcaaaaaagctacgcttgaagtttcgtgatgtgaagtgcattccggatgacgatgaagatagttatgaaattttcgaacctccagaatcgacagttatggcaactcgaaaaatgcacgatagacttgagccagaagatgaagaatcagatgcggattatgattatcaaaatcggcttgccgctgcactcggaatccgatctttcaggaactcttctctcaatcaagaagaagaagaattcaatttgactgctttggcgttggaaaatggaactgaatttgtcagttccaacacggatattatcgttgggtcgaactattcctcgccgagtaacatatccaaatttacggttaacaacttggcagaaccccaaaaggcaccatcacaccaacaagctacgaccgcaggctcaccgctacgacatctgatcggaaagaatagtgtgctaaattcttccaccgccgagcattcgtctccctattccgaagaccctatagaggacccactgcaaccagatgtgacaggaatccgtctgctatcattgggagcaggtgagtttaaatctcaggagcatgctaagcataaaggacccaaggtcgaacgtgaccaggctgccaaacatagattttcatggatgaagcttcttgcccacaaagtaggacgacatctgagtcaggatactggcagcccgtccggtatgcgcccatgggaagacctcccaagtcaagatacaggatctccgtcacggatgaggccatggaaagacccaccttcagaccttctgttgctaaaacaatctaacagctccaaaatattggtcggaaggtggcatcttgcgagcgaaaaaggctcctacgaaattatccaagacactgacgaggacactgctgtcaacaattggctgatctcaccacaaaatgcgtcccgcgcatggggagagagcacaccattagcaaataaaccaggaaaacagtctggacatccaaaatttccgcgtgtgcgacacaagtcacttcaagttagacaagacggaggcaagtcgagactcaaaaaatcgcaattcttgattaaaacccgtaagaaaaaaaaagagaaacacacacatcatgctccgctctctccaagaacctttcatccattgagaagtgaggcctataatactttcagcgaacgacgactcaagcattctttggtgttgcataagagcaatgaaacttcgctgccaacggatcttaatcaaactctgccttcgatggattttggatggattgcatctcttcctgatcacaatcagaattcatctaacgacaccggccaagcatcctgcccacccggtttgtatcagactgtgccaccagaggagcattaccaaaccttccctatccaagaccctgatcaaatgcactcaacatcagatccttctcatcgtagttctagcccagagttgtcagaaatgctggaatatgacagatctcacaagagctttccgaccgatattagtcaaatgtcgccatcttccgagcatgaagtatggcaaactgtgatctcgccagaccttagtcaggtgacattgagtcctgaattgtctcagacaaatttgtcccctgatctttcacacacaactttgagtccagagttgatacagcgaaatctgtcaccagcacttggacagatgccgatatcaccagatctcagtcatacaacgctctcaccagacttatctcacactactctttcactcgacctgtcacaaacaaacctatcacctgagttaagtcaaactaatctctcgcctgcattaggacagatgccactgtctccagatttgtcccatacaacactctccttggacttctcacaaacaaacctctctcccgagctgtcacacatgactcttagcccagagctttcccagactaatcttagcccagcgctgggacaaatgccaatttctcccgatctatcgcacactacactttccctggatttttcacagacaaatctaagtccggagctgtcgcagacaaacctaagtccggcccttggacaaatgccgttatcccccgacccatctcatacaacattgtcgcttgatttaagtcagacaaatttgtcgccggagctctcccagacaaatctgagtcccgatttgtcggaaatgccactgttcgcagatttgtcacaaattcctttaactccagacctcgatcaaatgaccttatcaccagatcttggagaaacagatctctctccgaattttggacagatgtccttatcacctgacctttcccaagtgacacttagtccagatatatccgacactactctattgccagatctatcccaaatttcaccacctcctgatttagatcaaattttctacccctctgagtcatcacaaagtttgttacttcaagaattcaatgaatcgttcccatatccagatctcggacagatgccatcaccatcgtcgccaaccttgaacgatacttttctgtctaaagagtttaatccattggtgatcgtcggactgtcaaaagatggaaccgactacatagagattattccaaaggaggaagtgcaaagtagtgaagatgattacgctgagatcgactacgtaccatatgacgatccctataagacggacgtacgaacgaacataaattcaagtagagatcccgataatattgcggcttggtatcttagatcgaataatggtaatcgcagaaactactacattgctgcggaggagatctcctgggattatagcgaattcgtgcaaagggaaactgacatagaggattctgatgatattccagaagatactacttataaaaaagttgtatttcgtaagtatttagactctactttcaccaaacgtgatccacgtggagagtatgaagaacatctcggaatacttggtccaatcattagagcagaagtagatgatgttattcaggtgcgttttaagaatcttgcaagcagaccgtactcgctccatgctcatggtttgtcttatgaaaagtcttcggaaggaaaaacttatgaagatgactctccagagtggtttaaggaggataatgctgttcaaccaaattctagttacacgtatgtttggcatgccaccgagagatcaggaccggagtctccaggaagtgcctgtcgggcttgggcttactattccgctgtaaacccagaaaaggacatccatagtggactcatcggtccgttgcttatatgccaaaaagggattcttcacaaggattccaatatgccaatggacatgagagagttcgtactcctatttatgacgttcgatgaaaaaaagtcgtggtattatgagaagaaatccagatcatcttggcgactaacatcgtccgaaatgaaaaagagccatgaattccacgctatcaacggtatgatatattcacttccaggattgaaaatgtacgaacaagaatgggtacgactacatttactgaacattggtggaagccaagatattcacgttgtccatttccacggtcaaacgttgttggaaaacggtaacaagcaacatcaacttggagtctggccgcttctccctggatcatttaaaacactcgagatgaaagcttctaagccgggctggtggttgttgaatactgaagtgggagaaaaccaacgagcgggtatgcagactccgtttttaataatggatagagattgtcgtatgccaatgggactttcgactggaatcatatccgacagtcaaattaaggcctccgaatttctcggatactgggagccgcggttggcacgtcttaataacggaggatcgtacaatgcatggtcagtcgagaaactcgcggcagaatttgcatcaaaaccatggatacaggtggatatgcaaaaggaagtaattattaccggaattcaaactcaaggagctaagcactatctcaaatcttgctacacaactgagttctacgttgcatatagctctaaccaaatcaactggcaaattttcaagggaaatagcacaagaaacgtcatgtatttcaacggcaactcggatgctagtacaattaaggaaaatcagttcgatccacccatcgtagcacgctatattcgtatctcaccaactcgcgcttacaaccgaccgacgctgcgtttggaattgcaaggatgtgaagttaacgggtgttcaacgcctttgggaatggagaatggtaagattgaaaataaacaaattaccgcctcatcttttaagaagtcgtggtggggagattactgggaacctttcagggcccgtttgaacgcacaaggtcgagtaaatgcttggcaagctaaagctaataacaacaagcaatggcttgaaattgatttgctcaagattaaaaagattactgctatcatcactcaaggatgcaaaagtttgagttctgagatgtacgtgaaatcatacactattcattattctgaacaaggggttgagtggaagccttaccgtcttaaaagttcaatggtcgataaaatatttgaaggaaataccaatacaaagggacatgtcaaaaatttttttaaccccccaattatctcgcgatttattagagtaattccaaagacatggaatcaatcaattgccttgcgacttgaactttttggatgtgacatctat

SEQ ID NO: 2348 - DNA, 6672 bp, Artificial Sequence
  derived and/or modified sequence
atgttcccagggtgccctaggctctgggtgctcgtcgttctgggtacaagttgggtcgggtggggctcacagggaacggaggccgcacaattgcgccagttttatgtcgcggcccagggaatcagctggagttacagacctgagcccaccaattccagtttgaatctttctgttaccagttttaagaagattgtgtatagggagtacgagccttactttaagaaggagaagcctcagagcactatctctggcctcttaggacctactctctatgccgaagttggcgacattataaaggtgcacttcaagaacaaggcagataagcctttaagcatccatccacagggcataagatacagcaagcttagcgaaggcgcatcctatctcgatcacaccttccctgcagaaaaaatggacgacgcagttgcaccggggagagagtacacctacgaatggagtatcagcgaggattctggccctacacacgatgacccaccttgtttgactcacatttattactcacatgagaacctgatagaggacttcaatagtggcctgataggtcctctgttgatttgcaagaaaggcaccctgactgaggggggaacccagaagacattcgacaaacagattgtgctgctttttgccgtgttcgacgaatctaagtcctggtcccagagttcgtcactaatgtataccgttaatggatatgtaaatggcactatgcccgatattacagtgtgtgcccacgatcatatctcctggcacctgctgggcatgtcatctgggccagaattgttctcaattcacttcaatgggcaggtgctcgaacagaatcatcataaggttagtgccataaccctggtctccgctacctcaactacagccaatatgactgttggtcctgagggaaagtggatcatctcttctttgaccccaaaacatctgcaggctgggatgcaagcttacatagatatcaagaattgcccgaaaaagacccgcaacctaaaaaaaattacgcgcgaacagcgcaggcacatgaagcggtgggagtactttatcgccgcagaagaagtgatctgggattatgctcccgtaattcccgcaaacatggacaagaaataccgctcgcagcacctggacaacttttccaatcaaataggcaaacattacaagaaggtgatgtatactcagtacgaggacgagtcgttcacaaaacacaccgtcaacccaaatatgaaggaggatggaatcctagggcccattattcgcgctcaggtcagagatacactgaaaatcgtgtttaagaatatggcgagtaggccatatagtatatacccccacggtgtgactttcagcccatacgaggatgaagtaaacagctcctttacaagcggtcggaataacaccatgattcgcgccgtgcagcccggcgagacgtacacctacaagtggaacatactggaatttgatgaacctacagagaacgacgctcaatgcctgaccagaccctactactccgatgtggacattatgagggatatcgccagcggcctgatcgggttgcttctgatctgtaagagccggagtctcgataggcgcggcattcagcgagccgcggacattgagcagcaggctgtattcgccgttttcgatgagaacaagtcatggtatctggaagacaatatcaataaattctgcgagaaccccgacgaggttaagagggacgatccgaagttctatgagtccaatatcatgagtacaataaatggatacgtcccagagtcaattacaactttgggattctgtttcgatgacaccgttcagtggcatttttgcagcgttggtactcagaacgaaattctcacaatccacttcacaggccactcctttatttacgggaaaagacacgaagatactctcaccctgtttccaatgcggggcgagtcagtgaccgtaacaatggacaatgtaggaacatggatgctcacttctatgaacagcagcccaagatcgaaaaagcttcggttgaaattccgcgatgtgaaatgcatccccgacgacgacgaagattcttacgaaatctttgaacctcccgagtctacagttatggcaacacggaaaatgcatgacagactggaaccggaggacgaagagtccgacgctgattatgattatcagaacagactggcggcagccctggggattagaagcttccgcaatagctcgttgaaccaggaggaagaggaattcaacctcactgcattagctctcgagaacggaaccgaatttgtgagcagcaacaccgatattattgtcgggtctaactacagctcaccctccaacatttcaaagtttaccgtcaataatcttgccgaaccacagaaggccccctcccaccagcaggcaaccacggctgggtcacccctccgccatcttattggtaaaaacagtgtactaaattcctctacggcggagcattcatccccctacagtgaagaccctatcgaagatcccttacagcccgatgtcacagggattcggctgctgtctctgggagctggagaattcaagagtcaagagcacgccaagcataagggccctaaggttgagcgggaccaagccgcaaagcacagatttagttggatgaagcttctggcccacaaggtgggccgccacctcagccaggacaccggaagccccagcggtatgaggccctgggaagatctaccttcacaggacaccggaagcccaagccgcatgcggccctggaaggatcccccatctgatctgctgctgttaaagcagagcaacagttccaaaatattggtgggaagatggcatctcgcctctgaaaagggaagttacgaaatcatccaggacacggacgaagatacggcagtaaataactggctgatcagcccacagaacgcatctcgagcttggggcgagagcacccctctggctaacaagccagggaagcagtctggacaccctaaatttccacgggtccggcataaatcactccaggtacgccaggacggagggaagtcaaggcttaaaaagagccagtttctgatcaagacccggaagaagaagaaggagaaacacacccatcacgctcccctatcccctaggacttttcatccactgcggtcagaggcatacaacacattttctgagagaaggctgaaacatagcttagtgctccacaaatccaatgagacatctctgcccactgatctaaaccagactctcccgagtatggattttggttggattgcctctcttcccgaccacaaccaaaactcatctaacgacaccgggcaggccagctgtcctcctggcctttaccagactgtccctcccgaagaacactaccaaacgttccccatccaagaccctgatcagatgcattctacctcagaccccagtcaccgctcctccagcccggagctctccgagatgcttgaatatgatcgctcccacaaatccttcccaaccgacatcagtcagatgtctccgagttccgaacatgaggtatggcagactgttatcagtccagacctgtcccaagtaaccctgtcaccggaactctcacaaactaacctgtccccagacctgagccacaccaccctgtcgcccgaactgattcagcgcaatttaagccccgcattgggccagatgccgattagcccggacctctcacacacaaccttgtccccagacctgagccacactaccctttcgctggatctttcgcagaccaacttgtctccggagctgtctcaaacaaatctgtcccccgctctggggcagatgccactgagtccggacctgagtcacactactctgagcctggatttttcgcaaaccaatctgtcccccgagctttcacatatgacccttagcccagagctaagccagactaacctttctcctgctttggggcagatgccgatctctcccgacctcagccacaccactctgtcccttgacttcagccagacgaatctctcacctgaacttagtcagaccaatctgagtccagcactgggacagatgccgctgagccctgacccctctcacactactctgagcctggatcttagccagacaaatctgtcccccgagttgtctcagactaatctgagtcctgatctgtccgaaatgcccctattcgctgacctgtcccaaataccactcacaccggatttagaccagatgaccctaagtcctgatctgggagaaaccgacctgagccctaatttcggccagatgtctttatcgcccgacctctctcaagtgaccctgtcaccagacattagtgacactacactcttaccagatctgagccaaataagccctcctcccgatctagatcagattttctatcctagtgaatcttcccagtccctcttgctgcaggaatttaacgagagcttcccataccccgacctcggacagatgcctagcccttcctctccgacactaaacgatacatttctcagtaaggagttcaatcctctggtcatcgttggactctcaaaagatggaactgattatattgagatcatccctaaggaggaagtccagtcatccgaggatgattacgctgaaattgactacgtcccttatgacgatccgtataagacggacgtgaggaccaatataaacagctccagggacccagataatatcgctgcatggtatctgcggtcgaacaacgggaatcgaagaaattattatatcgccgcggaggaaatatcatgggactacagtgaattcgtgcagcgcgagaccgatatcgaagattccgacgatatcccagaggatactacttataaaaaagtcgttttcaggaaatacctggattctacttttactaaaagagaccctcgcggtgaatatgaggaacacctgggcatcctcggccctatcatcagagctgaggtggatgacgttatccaggtgcgattcaagaatttagcctctagaccatacagcctgcatgcacacggtctctcctacgagaagtctagcgagggtaagacgtacgaagatgatagtccagaatggtttaaagaagacaacgctgttcagcccaattctagctatacctatgtatggcacgcgaccgaacgctctggccccgagtcaccgggaagcgcttgccgagcctgggcctattattcggcagttaatccagagaaggatatacattccgggctgataggtcctctgttgatctgtcaaaaaggcatcctgcacaaggatagcaatatgccaatggacatgcgggaattcgtgctgttattcatgacatttgatgagaagaagtcttggtactacgaaaaaaagtcccgctctagctggcggttgaccagtagcgaaatgaagaaatcccatgaatttcatgccatcaacggcatgatttacagtttacctggcctgaaaatgtacgaacaggagtgggtgagactgcatctgctgaatattggggggtcacaagacattcatgtagtacactttcacggacagacacttttggagaatgggaacaaacagcatcagctgggcgtgtggcccctgttgcccggcagcttcaaaactcttgagatgaaggcgtcaaagccggggtggtggctcctgaacaccgaggtaggggagaatcaaagagcggggatgcaaacacctttcttaatcatggatcgcgactgtaggatgcctatgggactcagcactggcatcatctccgattcccagatcaaagcgagtgagttcctggggtactgggagcccagattggcgaggctcaataacgggggatcctataatgcttggtctgtcgaaaagttggcagcagagttcgccagtaagccttggattcaggtggatatgcagaaagaggttattataacaggcatccagacacagggcgccaaacattatctcaagagctgctacacaactgagttttacgtggcgtattcatcaaaccagattaattggcagatctttaaaggcaatagtacacggaacgtgatgtacttcaacggcaactctgatgcaagcaccataaaagaaaaccagttcgatcctccaatcgttgctaggtacattcgcatcagtcctactcgggcttacaatagaccaacacttcgactggagcttcaagggtgcgaggtgaacggctgcagtactcctctgggcatggagaacggcaaaatcgagaacaaacagattactgcctcaagctttaaaaaatcctggtggggcgattactgggaacctttccgcgcacgactcaatgcacaaggccgcgtcaatgcatggcaggctaaggcgaataataataagcagtggctagaaattgacctgctaaaaattaagaaaatcacagctattataacgcagggatgtaaatcccttagcagtgagatgtacgtgaagagctacacgatacattatagtgaacagggggtcgaatggaaaccttacaggctgaagtcttccatggttgacaagatatttgaaggaaacacaaacactaagggacacgtgaagaactttttcaacccacctattatctcacgcttcatccgcgtcatcccaaagacatggaaccagagcatcgccttgaggcttgaactgttcggctgcgatatctac

SEQ ID NO: 2349 - DNA, 6672 bp, Artificial Sequence
  derived and/or modified sequence
atgttccctggctgcccgaggctgtgggtgctggtggtcctgggaacctcgtgggtcggttgggggtcccaaggcaccgaggctgcacaactgcggcagttctatgtggcagcccaaggtatctcatggtcgtaccgcccggagccgaccaactcgtcgctcaatctgtcggtgacctcatttaaaaagatcgtttacagagaatacgagccgtacttcaagaaagaaaagcctcaatcaactatctccggattgctgggaccgactctgtacgccgaagtgggcgacatcatcaaggtgcattttaagaacaaggctgacaaaccgctgtcgatacacccgcagggcatccgatacagcaaactctcagagggtgcgtcatacttggatcacaccttcccggccgaaaagatggacgatgctgtggcgccgggcagggagtacacgtacgagtggtcgatcagcgaggactcgggcccaactcatgacgacccaccttgcctgactcacatctactacagccatgagaatctcattgaagatttcaatagcggcttgatcgggcccctgttgatctgcaagaaggggaccctgaccgagggaggaacccaaaagacctttgacaagcagattgtgttgctgttcgcagtgtttgacgaatccaaatcatggtcccagtcgtcgagcctcatgtatacggtcaatgggtacgtcaatggaaccatgccagacatcactgtctgcgcccacgaccacatcagctggcatttgctgggtatgtcgtccgggcccgaattgttctcgatccacttcaacggtcaggtgctggaacagaaccaccacaaagtctcggcgatcactctggtgagcgccacctcgaccactgctaatatgaccgtgggaccggaaggaaaatggatcatttccagcctgactcctaagcacctccaggcaggaatgcaggcctacatcgacatcaagaactgcccgaagaaaactcggaacctgaagaaaatcacccgcgaacagcgccgacacatgaagcgttgggaatacttcattgcagcagaggaagttatttgggactacgcaccggtcatcccggctaacatggacaagaagtacagatcccaacatctggacaacttcagcaaccagatcggtaagcattacaagaaggtgatgtacacccaatacgaagatgaatcattcaccaagcacactgtgaacccgaacatgaaggaggacggaatcctggggccaatcatcagggcacaggtgcgcgacaccctgaaaatcgtgttcaaaaacatggcttcacggccatactcgatctacccacacggggtcaccttctccccttatgaggacgaagtcaactcttcgttcacctcgggccgcaataatactatgattcgggccgtgcagcccggagaaacctatacgtacaaatggaatatcctggagttcgatgagccaactgaaaacgatgcacaatgcctcactagaccttactacagcgacgtcgacatcatgagagacatcgcctccggcctgatcgggttgctcctgatctgtaaatcgcgctccctggaccggcggggaatccagagggccgcggacattgaacagcaggccgtctttgccgtgttcgacgagaacaagtcatggtacctggaggacaatatcaacaagttctgtgagaaccccgatgaagttaagcgcgacgaccctaagttctacgagagcaatattatgtctacgatcaacggttacgtcccagaatcgataaccaccctgggattttgcttcgacgacactgtgcagtggcatttctgcagcgtgggaacccagaacgagatcctgactattcatttcaccggtcactcgttcatttacggaaagaggcatgaggataccctcactctcttccccatgagaggagaatcagtgaccgtgactatggacaatgtgggcacttggatgctgaccagcatgaatagcagcccacggtccaaaaagttgcggctgaaattccgggatgtgaaatgtatcccggacgatgacgaagattcgtacgagattttcgagcctccagaaagcactgtgatggcgactcggaagatgcatgaccggcttgaaccggaagatgaggaatcggacgccgactacgattaccaaaaccgccttgccgccgcgctcggaatccggtcgttccgcaactcctcactcaaccaggaagaagaagaattcaacctcacggcactggctcttgagaacggaactgaattcgtgtcctcaaataccgatatcatcgtcggctcgaactactcgtcgccatcgaacattagcaagttcaccgtgaacaacctggcagagccacagaaggccccctcgcaccagcaagcaaccaccgcgggatcaccactgagacatctgatcggaaagaatagcgtgctcaactcctcgaccgcggaacattcctccccgtactcagaagatccgatcgaagatccgctgcagccggatgttactggcatcagactgctgtcgctgggcgccggggaatttaagagccaggaacacgccaagcacaagggcccgaaggtggaacgcgaccaagcggcgaagcatcgcttctcatggatgaagctcctggcgcataaagtggggagacacctgtcacaggataccggatccccgtccggaatgcgtccttgggaggacctcccaagtcaggacactggatcgccctcgcgcatgcgaccgtggaaggacccaccctccgacctgctccttctgaagcagtccaattcatcgaaaatcctcgtgggaaggtggcacctggcttcagaaaaaggatcgtacgaaatcatccaggacacggacgaggacaccgccgtcaataattggctgatctccccacagaacgcctccagagcctggggtgagagcaccccgctcgcgaacaagcctggaaagcagtccggccacccaaaatttccgcgggtgagacacaagagcctgcaagtccggcaggatggcggcaaatctcgcctcaagaagtcacagttcctgattaagacccggaaaaagaagaaggagaagcacacccaccatgcccctctttcaccgcgaacttttcacccgctgcggagcgaggcctacaacactttctcggagagacggctgaaacactccctggtcttgcataaatccaacgaaaccagcctgcctaccgacctgaatcagaccttgccaagtatggactttgggtggatcgcttccctgcctgatcacaatcagaactcatcaaatgacactggccaagcctcctgcccgccaggcctttaccagaccgtccctccggaagagcactaccagaccttcccaatccaggacccggaccagatgcattccacttcggacccgtcacaccgcagctcgtccccagaactgagcgagatgctggaatacgaccgtagccataagtccttcccgacggacatctcacagatgtcaccgtccagcgaacacgaagtgtggcagaccgtcatctcgccagacctcagccaggtgactctttcccctgaactttcgcaaaccaacctctcgcccgatttgagccacacgactctcagccccgaactcatccaacgcaatctgtccccggctcttggacaaatgcctatctcaccagatctgtcgcacactactttgtccccggacctgtcccataccaccctctcgctggacctgtcgcaaactaatctcagccctgagctctcacagacgaacctgagccccgctctcgggcagatgcctctgtcacctgatctgagccatacgaccctttccctggatttcagtcagactaacctttctccggagctcagccatatgaccctcagtccagaactttcccagaccaatctcagtccggcgctgggccagatgccaatatcccccgatttgtcgcatactaccctctcccttgacttttctcaaacgaatctgtcaccagagctctcccagactaatctgagccctgctctgggacagatgcccttgagcccggatccttcacacactactctctcgttggatctgagtcagaccaacctttcaccggaactcagtcaaactaacctgtcccccgacctctctgagatgccactgttcgctgacctctcgcaaatccctctgactccagaccttgaccagatgaccttgtcaccggacctgggtgagactgacctgagtccaaactttggccagatgtccctttcgccggatctttcacaggtcaccctgtcgcctgacatcagcgatactactctgctgccagatttgtcacagatctccccgcctcctgacctggaccaaatcttctacccctccgaaagctcgcagagcctgctcctgcaagagtttaacgaatcgtttccgtacccggatctgggccaaatgccttcgccgagcagcccgaccctcaacgacactttcctgtcaaaggagtttaacccattggtcatcgtaggactctccaaggatggtaccgactacatcgagatcatccccaaagaggaagtgcaaagcagcgaagatgactacgcggagatagactacgtgccgtacgacgacccgtacaagacggatgtccgcaccaacatcaactcgagccgggatccggataatatcgcggcttggtacctgagatcaaacaacggcaaccgacgtaactattacatcgcagcggaggaaatcagctgggactattcggaattcgtgcagcgggagacggatattgaggattcggatgatatcccagaggataccacttataagaaggtcgtgttccgcaagtacctcgattcaactttcaccaagagggatccccgcggagagtacgaagaacacctgggaatccttggaccgattatccgggccgaggtggacgatgtcattcaagtgcgcttcaaaaacctcgcgtcgcggccgtactctcttcacgcccacggactcagttacgaaaagtcctccgaaggaaaaacgtacgaggacgactcgccggagtggtttaaggaagataacgccgtacagcctaattccagctacacctacgtgtggcacgccaccgaaaggtcggggccagaaagcccagggtcggcgtgccgcgcctgggcatactattccgctgttaatccggaaaaggacattcacagcggactcatcggccctctcttgatctgtcaaaagggaatcctccataaggactccaacatgccgatggatatgcgcgaattcgtcctcctgttcatgacctttgatgaaaagaaatcctggtactacgaaaagaagtcccgctcaagctggcgcctgacgtcgtcggaaatgaagaaatcccatgagttccacgcgatcaatggaatgatctactcgctcccaggacttaagatgtacgaacaagaatgggtgcgcctccacctgctgaacatcggaggaagccaagatatccatgtggtgcacttccacggacagaccctcctggagaatggtaataagcagcaccagttgggtgtgtggccgctcctcccgggcagcttcaagactctggagatgaaggcatccaaaccaggatggtggctgttgaatacggaggtgggagaaaaccagcgggccggaatgcaaactccgtttctgatcatggacagagactgcagaatgccaatgggactttcaactgggattatcagcgactcacaaatcaaagcatcagaattcctgggctactgggagccgagactggccaggctgaacaatggaggctcctataacgcctggtccgtcgagaagctcgctgctgagttcgcgtctaagccgtggatccaggtggatatgcaaaaagaggtgatcattaccggaattcaaactcagggagccaaacactacctgaaatcctgctacactactgagttctacgttgcctactcttcaaaccaaatcaattggcagatcttcaagggaaactcgactcgcaatgtgatgtattttaacggaaactccgatgcttccacgatcaaggagaaccaatttgatccgccgatcgtggccagatacatccgcatttcccccactcgggcctacaatcggcccaccctgcggctcgagctgcagggctgtgaggtcaacgggtgttctacccccctgggaatggaaaacggaaagatcgaaaataaacaaattactgcgagctcgttcaaaaaatcgtggtggggggactactgggaaccgttccgcgcacggctgaatgcccagggacgcgtgaacgcatggcaagccaaagcaaataacaacaagcagtggctcgaaatagatctcctgaagattaagaagatcactgcgatcatcacccaagggtgcaagtccctttcttccgaaatgtacgtcaagagctacaccatccattactcggaacaaggagtggagtggaagccgtacagactgaagtcgtctatggtggacaaaatcttcgaaggtaacactaacaccaagggccatgtgaagaactttttcaaccctccaatcatctcaaggttcatccgcgtgatcccaaagacttggaatcagtcgatcgcgctgagactggaactgtttggttgcgatatctac

SEQ ID NO: 2350 - DNA, 6672 bp, Artificial Sequence
  derived and/or modified sequence
atgtttcctggatgtccgcgactttgggttctcgtggttttaggaacttcttgggtcggctgggggtcccagggaacagaagccgcccaactgcggcagttctatgttgccgcacagggaatatcctggagctatcgccctgagcctacgaattctagtctcaacctcagcgtgacctcctttaaaaaaatcgtgtaccgagagtatgagccctattttaagaaagaaaagccacaatcaacaattagcggtctcctgggccccacattatacgctgaggtcggggatattataaaagtgcattttaagaataaagcagacaagcccctctcaatccatcctcagggtattagatacagcaagctttcggagggcgcctcatatcttgaccatacgttccctgcagagaagatggatgacgccgttgcacctggaagggagtacacatatgaatggtcgatatctgaagacagcggtcccacacacgacgaccccccttgccttacccacatctactatagtcatgagaacctcatagaagacttcaacagtggccttatcgggcctttactgatttgtaaaaaaggcaccctcacagagggcgggactcagaagacttttgataaacagatcgttctgttattcgcagttttcgacgagtccaagagttggagtcagagtagtagtctgatgtatacagtcaacggctacgtgaacggcaccatgcccgacattacggtatgcgcacatgatcacatttcgtggcatctattgggtatgagtagcggccccgagcttttcagcattcacttcaatggacaggtcctggagcagaaccaccacaaggtttccgcaatcactctggttagtgccacctccaccacagcaaatatgacagtcggccctgaagggaagtggatcataagcagcttgacccctaaacacctgcaggccggtatgcaggcatacatcgacattaagaattgcccaaaaaaaacgcgcaacttgaagaaaattaccagggaacagaggcgacacatgaagcgatgggagtacttcatagccgccgaagaggtgatttgggactacgctcctgtgattccggccaacatggataaaaagtacaggtcccaacacttggacaactttagtaatcagattggaaagcactataagaaggtcatgtacacgcagtacgaagacgagtccttcacaaaacatactgtcaacccaaacatgaaggaagacggaattcttggtccaatcatcagagctcaggtgcgcgatacgctgaagattgtgtttaagaacatggcatcccgcccttacagtatctaccctcacggagtgaccttttctccttatgaggacgaggtgaattcctctttcacttcaggtagaaacaatactatgattcgcgcagtccaacccggcgaaacatacacctacaagtggaacatccttgaattcgatgagcctactgagaacgatgcccaatgcctgaccaggccttattatagtgatgtagacatcatgcgtgacatcgcttctggcttgattggactcttgcttatctgtaagagtagatcccttgacaggcgcggaatccagcgggctgccgatatagagcagcaagctgttttcgctgtttttgacgagaacaaatcgtggtatctggaggacaacatcaataagttctgtgagaaccccgatgaggtgaaacgcgatgaccccaagttctatgagagcaatatcatgtccactatcaatggctatgtgcctgagtcgataacgacattgggattttgtttcgatgacacagttcagtggcatttttgctctgtcggaacccaaaatgaaatccttacgattcacttcactggccattcattcatctacggcaagcggcacgaagacaccctaacactcttccccatgcgaggggaaagtgtaaccgtgacaatggataatgtaggtacctggatgttaacttccatgaatagctcacctcgtagcaagaagttacgcctgaagttcagagatgttaaatgcattcctgacgacgacgaggactcttatgaaatatttgagcctcccgagtctaccgtgatggccactagaaaaatgcatgatcgcctcgagcccgaggacgaagaatctgatgctgattatgattaccaaaaccgtttggccgccgcactcggtatccgctccttcagaaacagttctcttaaccaagaggaagaggaattcaatctaactgctctggcacttgaaaacggaaccgagtttgtgtcaagcaacaccgatatcatcgtaggaagcaattatagctccccgagcaatatatctaaattcacggtgaacaacctggcggagccacaaaaggctccatcccatcagcaagcaactacagcgggatcaccccttcggcacctgatcgggaaaaacagcgtgttaaactcatctacagccgagcatagcagtccatattctgaagacccaatcgaagatccgcttcagcccgatgtgaccggtatacgcctgcttagcctgggagcgggcgaattcaagtctcaggagcacgctaagcataaagggcccaaggtggaaagagaccaagctgccaaacaccgtttctcgtggatgaaacttttggcccacaaggtaggacggcacctaagccaagacaccggtagcccaagcgggatgaggccctgggaggatctcccttctcaggacaccgggtctccttctcggatgagaccctggaaggaccccccaagtgatctcctgttgttgaagcagtcaaactcctccaagatcctggtaggacggtggcaccttgccagtgagaaagggtcctatgaaattatccaggataccgatgaagacactgccgtgaacaactggctgatatccccacagaacgcctcaagagcctggggagaatctacccctctggcgaataagcccggcaagcagtccggtcaccctaagttcccgcgcgtgcgtcataaatccctgcaagttcgacaggacggggggaaaagtagactcaagaaatcacagttcctcatcaagacaagaaagaaaaagaaggagaaacatacccaccacgcgcctctgagcccacggacatttcatccgctgcggagcgaagcgtataacacattcagtgaacgccgcttgaagcatagtctagtgctgcacaagtccaacgagacttctctacctacagatcttaaccagacactacctagtatggattttggctggatcgcttcactcccagatcataatcagaacagctccaatgacactggccaggcctcctgtccacccggcctatatcagactgtcccacctgaagagcactatcagacattcccaatacaagaccctgaccagatgcattcaacttccgatccaagtcataggagttcctcccctgaattgtccgaaatgctggaatatgacagatcccacaaatccttccctacagacatttcccagatgagtccttcaagcgagcacgaggtgtggcagactgtgatctccccggacctctctcaagttacgctctcaccagagctgtctcaaactaacttgagcccagacctcagtcataccactctctcgcccgaattaatccaaaggaatctatcccctgcccttggtcagatgccgatttcccctgatctgagtcatacaacgctttctccagatctctcccacacaactttgagccttgatttgtctcagacaaacctctccccggagctttcacagactaatctatccccagctctgggccagatgcccctttccccggatctgagccacacgactctgtcactggattttagtcagacaaatctttcccctgagctgagccatatgactctgtcccccgaattgtctcagacgaacctctcccctgccctgggccagatgccaatcagtcccgaccttagtcacaccacactgtctctggatttctcacaaacaaatctgtcgccggagctctcccagactaacctgtcccccgcattagggcagatgcccttgtctcccgacccaagtcataccaccctctcccttgacttgagccaaaccaatttgagtccagaactgtcacaaacgaacctgagtcctgatctttcagaaatgcccctattcgccgacctgtctcagatccccctgacacccgacctcgatcaaatgaccttgtcccccgacctaggcgagaccgaccttagcccgaattttggtcagatgtccctgagtccggacttgtcacaagtcaccctctctcccgatatctcggacaccacactgcttcctgacctgagccagatctcccctccccctgacctggatcagatattctacccaagtgaatcttcccaatcactgctgctgcaggagtttaacgaaagcttcccctaccctgatcttggtcaaatgccaagtccgagctctccgaccctcaacgatacttttttaagcaaggaatttaacccgcttgtgattgttggcctgtctaaagatgggacagattatatcgagatcatccccaaagaggaagtgcaaagtagcgaagacgactacgcagagatcgactacgtgccatatgacgatccatacaaaacggacgtacggaccaacattaattcctccagagatcctgataacattgcagcatggtaccttaggagcaataatgggaataggcgaaattactacatcgcagccgaagaaattagctgggactattctgaatttgttcaacgtgagaccgacatcgaggactctgatgatattccagaggatacaacatacaagaaagtggtgttccgtaaatatctagactcaaccttcacgaagcgcgatccccgtggggagtacgaggagcatctcggtatcctggggccgatcataagggcagaggtggatgatgtgatccaggtccggttcaagaatctggcgagtcggccttattctcttcatgctcacggtttgagctatgagaaatcatctgaggggaagacctacgaagacgactccccagaatggtttaaggaggataatgccgtgcagcccaacagttcgtatacctacgtatggcatgccaccgaaagatctggcccggagagtccagggtctgcatgccgcgcctgggcttattactccgcagtcaatcccgaaaaggacatccactccgggctcattggaccactgcttatctgccagaaaggaatactgcataaggatagcaacatgcccatggacatgcgcgaattcgtacttctctttatgacttttgatgaaaagaagtcttggtattatgagaagaaaagccgtagcagttggagactgacaagctcggagatgaaaaaatcccacgagttccacgctattaacgggatgatttattctctgccgggactgaaaatgtatgaacaggagtgggtgagactacatctgctcaatatcggaggcagccaggacatccacgtggtgcattttcatggccaaactctgctcgagaacggcaataagcaacaccagctgggcgtctggcctctgttgccaggctcctttaagactctggagatgaaggcaagtaaaccgggctggtggcttcttaacaccgaggtcggcgagaaccagagggcagggatgcagacaccttttctgatcatggatagggactgcagaatgcctatgggcctctcgaccgggatcatcagcgacagtcagataaaagccagcgaatttcttgggtactgggaaccccggctggctaggctgaataacggaggcagttataacgcatggagcgtggaaaagttagctgcagagttcgcctccaagccctggatccaagttgacatgcaaaaagaggtgatcatcaccggaatccaaacacagggggccaagcactacctgaagtcatgctacactactgagttttatgtggcatacagtagcaatcagattaactggcagatattcaaaggaaatagcactcggaatgtgatgtactttaatggcaacagtgatgcgtccacaataaaggagaatcaattcgatccccctatcgtggcacgttacatcaggatctcccccaccagggcctacaatcgacctaccctgcgcttagaactccagggctgcgaggtgaacggctgctctaccccactaggaatggagaacgggaaaattgagaataaacagattaccgcttctagctttaagaagagctggtggggggactattgggagccattcagggccaggcttaacgcccagggtcgtgtcaatgcatggcaggccaaagctaataacaacaagcagtggttggagatcgacctgcttaagattaagaagataactgctattatcacacagggttgcaaaagcttgtccagcgagatgtatgttaagtcctacacaatccactactccgagcagggtgttgagtggaaaccttacaggctaaagagcagcatggtggataagatttttgaggggaacacaaatacaaagggacacgtcaagaactttttcaacccaccaattatctccagatttatacgcgtgatcccgaagacttggaatcagtcaattgcccttcgattggagctttttggatgtgacatctac

SEQ ID NO: 2351 - DNA, 6672 bp, Artificial Sequence
  derived and/or modified sequence
atgtttccgggctgtccccgtttgtgggtgctagtcgttttgggcacctcatgggtggggtggggatcccaggggaccgaagctgcgcagcttcggcagttctacgtggctgctcaaggtatctcttggtcatatcgtcccgaacccactaactcctcactgaatctgtcagtgacttcgtttaaaaagatagtgtacagagagtacgaaccttactttaaaaaagagaagccacagtcgacaatttctggcctgctagggcccaccttgtatgcagaggtcggcgatattatcaaagtgcattttaaaaacaaggctgataaacccttgtccatccacccccaggggatacgctactcaaagttaagtgaaggagccagttatctggatcacaccttcccagccgagaaaatggacgatgccgtggcccctggccgggagtacacatacgagtggagtatttcggaagatagcggaccaacgcacgacgacccaccctgtcttacccacatttattattcgcacgaaaacctcattgaagacttcaattcaggattgatagggcctctgcttatatgtaaaaaagggacccttacagagggcgggacgcagaaaacttttgataaacaaatcgtgttactcttcgccgtcttcgacgaaagtaaatcctggtcacagtcctcctcactgatgtataccgttaacggctacgtaaacggaaccatgcccgacataaccgtctgtgcccacgatcatattagttggcacttactggggatgagttccggacccgagctgttttccatccatttcaatggacaagtgctggagcaaaaccaccataaagtttccgctatcactctcgtttccgctacctccaccactgctaatatgacggtgggccccgaggggaaatggatcatctcatctttaaccccgaaacatctgcaggctgggatgcaggcttacatcgatatcaaaaactgccccaagaagacccggaatttaaaaaaaataacgcgcgaacaacgtcgccacatgaaacggtgggagtacttcattgctgcagaggaagtgatctgggactacgcacctgtaattcctgccaatatggataagaagtataggagtcagcacctcgacaacttctccaaccaaattggcaagcactacaagaaggtcatgtacacacaatatgaagatgagagcttcacgaagcacaccgtgaaccccaatatgaaggaggatgggatcttagggcctataattcgagcccaggtccgtgacaccctgaaaattgtgttcaaaaacatggcctcccgaccctactcaatctacccacacggggtaaccttctccccttacgaagatgaagtgaactcgtcatttaccagtggaagaaataatactatgatcagagcggtacaaccaggcgagacctatacatataagtggaacattcttgagttcgatgagccgaccgagaacgacgcgcaatgtctcacccgcccatactactctgatgtcgatatcatgagagatatcgcttctggcctgatagggctgctattgatttgtaaaagccgctctctggacaggaggggcatccagcgtgcggccgacattgagcaacaggcagtctttgccgtgtttgacgagaacaagtcctggtatcttgaggataatatcaataagttctgtgagaatcccgacgaagtgaaaagggatgaccctaagttttatgaatcaaatatcatgtccacaatcaatggatacgtgcccgagtctatcactacactgggattctgttttgatgacactgttcaatggcacttctgctccgtggggacccagaatgagattttgacaatccactttaccggccatagtttcatctacggtaaacgccatgaggataccctgaccctatttccaatgcgcggagaatccgttaccgtcactatggacaacgtggggacttggatgcttacctcgatgaactctagtcctcggagtaagaaattaagactgaagttcagggacgtgaagtgtatcccagatgatgacgaagattcctacgaaattttcgagccgccagaatcaaccgttatggctactcgcaaaatgcatgataggttagaacccgaggacgaggaatcagatgctgactatgactatcagaaccggctcgctgcggctcttgggatacggtcatttaggaactcaagtctcaatcaagaagaggaagagttcaaccttacagctctggcgttggaaaacggcaccgagttcgtcagctctaacaccgacattatcgtgggatcaaattactcctctccttcgaatatttccaaattcaccgtgaataatttagctgagccccagaaggcaccatcccaccaacaggcgaccactgcaggaagccctctgcggcatttaatcgggaaaaatagcgttttgaacagctcaacagctgagcactcaagcccctacagcgaggaccctatagaggatccattacaacccgatgtgaccggcattaggctactttctctcggtgcgggtgaattcaaatcccaagagcatgccaagcataagggacctaaagtagaacgagaccaggccgctaaacatcggttctcatggatgaagctcctggctcacaaggtcggcagacacctctcccaggacaccggctctccgagtggcatgcggccctgggaggacctgcccagtcaagatactgggtcaccctcgaggatgaggccttggaaagaccccccatctgatctactcttactgaaacagtccaactcatccaagattctcgtgggccgctggcaccttgcctccgaaaaaggcagttacgagataatacaagacaccgatgaggataccgctgtcaataattggttgattagtccgcagaatgccagtcgtgcatggggcgagtccacgcctctggctaacaagcccgggaaacagagtggccacccaaagttccctcgcgtgcgacacaaaagcctccaggttaggcaggatggagggaaaagcagattaaaaaagtctcagttcctgattaagacccgcaaaaagaagaaggagaagcacacccaccacgctccacttagtccccgaacctttcaccccctgagaagtgaagcctataacaccttttcagagcggcggctcaaacactccctggtactccataaaagcaacgagacatctctgcccacagatttgaatcagacccttccctccatggatttcgggtggatagcatccctcccagatcataaccagaacagcagcaatgatactggccaggcctcgtgcccacctggtctttatcagactgtgccacccgaggaacactatcagacatttccgatccaggatccggatcagatgcattcaacctccgatccatcccacagaagttccagccccgaactgtccgagatgcttgagtacgatcgatcgcacaaaagtttccccacagacattagccagatgagtccgagcagcgagcacgaggtctggcagaccgtcatctccccagatctctcacaggttaccttatctccagaactcagccagacaaatttgagcccggatctctcacacactaccctgtctcctgagctgatccagcgcaacctctcaccggctctcggccaaatgcccatatcacctgatctgtctcacaccacactcagcccggatctgtctcatacaactctgtccttggatctgtcacaaaccaacctgagtcctgagctgtcccagactaatctgagccccgctcttggccaaatgcccctgtctcctgatcttagtcacacaactctttcacttgatttcagtcagactaatttgtcaccagaactttcacatatgactctgagccctgaactctcacagactaacttgagtccagcactcgggcagatgccaattagccccgacttatcacacacaacccttagtctggacttctcgcagactaacctgtcgcccgaactgagtcaaacgaatctgagtccggccctcgggcagatgcctttgagccctgatccttcccacacaaccctgagccttgacctgtcccagaccaatctgtcccccgagctgtctcagactaacctgagtccggaccttagcgaaatgcccctgttcgctgatttgtcccaaattcctctcacccctgatcttgatcagatgacgttaagtcccgacctgggggagaccgacctaagtccaaatttcggacagatgtccctttcacctgatttgtcacaggtgacactttcccccgatatctctgacactacgctgcttccagacctctctcagatcagtcctcccccagatcttgatcaaatattttacccctctgaatctagccagtccctactgcttcaagagtttaatgagagcttcccataccccgatttggggcagatgccttcccccagctctccaacactcaacgacacttttctttctaaggagttcaatccccttgtcattgtgggcctgagcaaagacggaaccgactatatagagatcatccctaaagaagaagtgcagagtagtgaagacgactatgccgagatcgattacgtaccttacgatgacccgtacaagactgatgtccgtaccaacataaatagctctagggatcccgacaacattgccgcctggtatctgcgtagcaacaatggaaatcgaagaaactattatatagccgctgaagagatatcttgggactactcggaatttgtgcagcgcgagaccgacattgaggactctgacgacatccctgaggacacgacctacaagaaggtcgtgttccgtaaatatcttgatagtaccttcactaaacgcgacccccgtggcgaatacgaggaacacctggggatcctggggccaatcataagggccgaggtggatgatgtgattcaagtgcgatttaagaacctggcgtcacggccatactctctgcacgctcatggactgtcttacgaaaagtcaagcgaaggcaagacttacgaagacgatagccccgaatggttcaaggaggataatgccgtgcaaccaaattccagctacacctacgtatggcacgccactgagaggtctggccccgaaagtccaggtagcgcatgtcgagcctgggcttactattcggcagtcaaccctgaaaaagatattcattccggactaatcggacctctactaatctgccaaaagggcatcttgcacaaggatagcaacatgcccatggatatgcgggagtttgttctcttgtttatgacgttcgatgagaagaagtcgtggtattatgagaaaaagtctcgctctagctggagactgacaagctctgaaatgaagaagtcccacgaatttcacgctatcaatggcatgatctacagtctgcccggtctaaagatgtacgagcaggagtgggtgaggctgcatctactcaatatcggcggttcccaggatatacacgtggtgcactttcatgggcagacactgttagaaaatggcaacaagcaacaccagttgggtgtatggcctcttctccctggcagcttcaaaactctggagatgaaggccagtaagcccggatggtggctgcttaacactgaggtgggcgagaatcagagggcaggcatgcagactccattcttgataatggatcgggactgccggatgcctatgggtctgtccacgggcataatcagcgactctcaaataaaggcgagcgagttcctcggttactgggaaccgcggttggcccggctaaacaatgggggaagctacaatgcatggtctgtcgagaagctggccgcagaatttgcttccaagccgtggattcaagtggatatgcagaaagaagtgataattactggcattcagactcagggcgcaaagcactacctgaagtcatgctacacaaccgagttttatgtcgcctattcctcaaatcagatcaattggcaaattttcaaaggtaactcaacccgcaacgtcatgtattttaacggcaatagcgacgcctccacgataaaagagaaccagttcgaccccccgatcgtcgccaggtacattaggatcagcccaactcgggcctacaaccggccaacccttagattagaacttcagggctgtgaggtcaacggttgtagcaccccccttggcatggagaacggaaagatcgagaataagcaaatcactgcaagtagctttaagaaatcttggtggggagactactgggagcccttccgggctaggctgaacgctcagggccgggtgaatgcgtggcaggcaaaagcgaacaacaacaaacagtggctggagatcgatctgcttaagattaagaaaatcaccgccattataacacagggttgtaagtctttatcctcagagatgtatgtaaaatcctataccattcattactcggaacaaggtgtcgagtggaagccatatcgactgaagtcgtccatggtggataagattttcgaagggaacacaaacactaaggggcacgtgaagaattttttcaatcctccgatcatctcccgctttattcgtgttatccctaagacttggaatcaaagcattgctctgcgattagagttgttcgggtgcgatatctac

SEQ ID NO: 2352 - DNA, 6672 bp, Artificial Sequence
  derived and/or modified sequence
atgtttcccggatgccccaggctttgggtcctggttgtgcttggcaccagctgggtgggctggggctcacaaggaaccgaggcagctcaacttcgtcagttctacgtcgcagctcaggggatctcttggtcatacaggccagagcctacgaactcaagcctgaacctctcggtcacttcatttaaaaagatcgtatacagggaatacgaaccttattttaaaaaagaaaagccacagagcacgatcagtggcttattgggccctactctctacgcagaagtgggagacatcatcaaggtccacttcaagaacaaagctgacaaacctctcagcatccatccacagggcattagatactctaaactgagtgaaggagcttcatacctcgaccacaccttcccagccgagaaaatggacgatgctgtcgcaccaggccgtgaatatacttacgagtggtctatcagcgaggacagtggtcccacccatgatgaccctccttgtctgacccacatctactattctcatgaaaatcttatcgaggatttcaattcaggcctcatcggtcctctgctgatatgtaaaaagggcaccttaaccgaagggggtacacaaaagacattcgacaaacaaatagttctgcttttcgctgtctttgacgaatctaagtcctggagtcagagctcatctctgatgtacaccgtgaatggatatgtcaatggtacaatgccagacatcactgtgtgcgcccacgatcatatcagttggcatttgctgggcatgagctctggaccagaactcttttctattcatttcaatggccaggtgcttgaacagaatcatcataaggtgtcagcaattaccctggtgagcgcaacttctacaaccgctaatatgactgtaggacccgaagggaaatggattattagctctttgaccccaaaacacctccaagctgggatgcaagcctacatcgatattaagaattgtcctaaaaagacacgtaacttgaagaagatcacaagagagcaacgacggcacatgaagcgctgggaatattttatcgcagccgaggaagtgatttgggactatgctcccgtcatccccgccaacatggataagaagtaccgcagtcagcacttagacaatttcagcaaccaaattggaaaacattataaaaaggtcatgtacacccagtatgaagacgaaagttttaccaaacacactgtgaacccgaacatgaaagaggatggcatactcggcccaatcatccgggctcaagtaagggatacactgaaaatcgtgttcaaaaacatggcaagccgaccttacagcatttatcctcacggcgtgacatttagcccatatgaagacgaggtgaacagttccttcacatcaggtcggaataatacaatgatccgggccgtccagccgggcgagacatacacatacaaatggaacatcctcgaatttgatgaaccgacagagaacgacgctcagtgcttaactcgcccatattatagtgacgtagacattatgagggatattgcttctggcctgataggactgctgctgatctgtaaatcccgcagtttggataggaggggcatccagagggccgcagacatcgagcagcaggcagttttcgctgtatttgatgaaaataaatcatggtacttagaggacaacattaataagttctgcgaaaacccagatgaagttaaacgggatgatcctaaattttacgagtctaacatcatgagcaccataaacggatacgtccctgagagcatcaccactctgggtttttgttttgatgatacagtgcaatggcacttctgcagcgttggcacgcagaacgaaatcctcactatccacttcacaggacactcattcatctacggcaagaggcacgaggacactctcacgctttttcccatgcggggagagtccgtcactgtgacaatggataatgtcgggacttggatgctgacctcaatgaacagctctcctcgcagcaagaaattgaggctgaaattcagagatgtgaaatgcatcccggacgatgacgaagatagctatgaaatctttgagcctcctgaaagcacagtcatggccaccagaaagatgcatgacagactagaaccagaggatgaggagagcgacgcagactacgattaccagaaccgcttagctgcagctctgggcattagaagtttcaggaactcaagtcttaaccaagaggaggaggagtttaaccttacggccctcgctctggagaacggaacagagttcgtgagctcaaataccgacatcatcgtgggctccaattactcttcaccttctaatatctcaaaatttaccgtgaacaatctggctgagccccagaaggctccctctcatcagcaagccactactgcggggagtccactgagacacctgatagggaaaaacagcgtgttgaatagcagcaccgccgagcactcaagcccatacagcgaagatcctatcgaggacccgctgcagcctgatgtaaccgggatcagattactttctctgggtgctggcgagttcaaaagtcaagaacacgctaagcacaaagggcctaaagtagagagggaccaggcagctaagcacaggttcagctggatgaagttgcttgctcataaggttgggaggcaccttagtcaggacaccggatcaccatccgggatgcgtccttgggaggaccttcctagtcaggacactgggtcaccatcaaggatgaggccctggaaagatcctcctagtgacctgctgctgcttaaacagagcaactcttccaagatacttgtggggagatggcacctcgcaagcgagaaaggatcgtacgagatcatccaagatacagatgaagatactgcggtcaataattggctaatatcgccgcaaaacgctagccgcgcatggggagaaagcacccctcttgcaaataagcccgggaaacagagtggacatcctaaattccctcgcgtgaggcacaaaagcctgcaggtcaggcaggacggcggaaagtctcgcctcaaaaaaagccaattcctgatcaaaactagaaaaaagaagaaagagaaacacacacatcatgctcccctaagccctcggacctttcacccactaaggtccgaagcttataacactttctccgagaggcggcttaagcacagcttggttctgcacaaatcaaacgagaccagcctgcctacagacctgaatcaaactcttccaagtatggacttcgggtggattgctagtctgcccgatcataaccaaaattccagcaacgatactggccaagcatcatgccccccaggactgtatcaaacggttcctcccgaagagcattatcagacctttccgattcaggatccagaccagatgcatagcacctccgacccttcccatcggtctagctctcccgagctgtcggaaatgctggaatacgatcgtagtcataagagtttccctactgatatatcgcaaatgtcacccagttcagaacacgaagtctggcagacagttattagccctgatctgtcccaggtcactctcagcccagaacttagccagacaaacctgagccccgacctgtcacacacaaccctcagcccagaattgattcagcgaaaccttagccccgcattgggccaaatgccgatttcaccagatctttcgcacaccacactgtcgccagacctgagccacacaaccttaagtcttgatctgagtcaaaccaaccttagcccagaactgagccagacaaatctgagccccgctctgggacagatgccgttgtccccagaccttagccacaccaccctgtctctcgactttagtcaaaccaacctgtcaccagagctcagtcacatgaccctgagccctgagctgagtcagacgaacttgtctcccgcactgggccagatgcccatctcgcccgacttgtcacataccactttgagtctggattttagtcaaacaaacctgtcacctgagctgtcgcagaccaacctgtccccagcactgggccagatgcctctgtctccagatcctagtcacactaccctgagtttggaccttagccagacaaacctctctccagagctcagccaaacgaacctgagtcctgatctgagcgagatgcccctattcgccgatctgagccagatcccccttacacccgacttggaccaaatgacacttagtcccgatcttggtgagaccgacctgagccccaattttgggcagatgtccctgtctcccgacctgagtcaggttactctatcacctgatatcagcgacacaaccctgctgccggacttgagccaaataagtccaccccccgacctggaccaaatcttttaccccagcgaaagctctcagagcctcctgttgcaagaatttaatgagagttttccttaccctgacctggggcaaatgccttcaccttcttctcctaccttgaacgatactttcctgagcaaagagttcaacccactagtgatcgtcgggctgagcaaagatggcaccgactacattgagattatccccaaggaagaagtccagtcttccgaagatgactacgccgaaatcgattacgtgccgtatgacgacccatataaaacagatgtgaggacaaatataaacagcagtagggaccccgacaacatagcagcctggtacttgagatccaacaacgggaacagaaggaactattacatcgccgctgaggagatttcctgggactactctgagttcgttcagagagagaccgacatcgaagattcagacgatatcccagaagacaccacatacaaaaaggtcgtgttccgtaaataccttgatagcactttcactaagcgcgatccaagaggagagtacgaggaacatttggggatcctcgggccaatcattagagccgaagtcgatgatgtaatccaggtgaggttcaaaaacctggcttctagaccgtactccctgcacgcgcacggcctgtcttacgaaaaatcgagcgaaggcaaaacatacgaggatgatagcccagaatggttcaaagaagataacgctgtgcagccgaacagctcttacacatacgtgtggcacgctaccgagagaagcggccccgagagtccaggaagcgcgtgcagggcttgggcatactactccgctgtgaaccctgaaaaagacattcacagtggactcattgggccgctgctcatctgccagaagggcatacttcataaggactcaaacatgcctatggatatgcgggagttcgtactcctttttatgacctttgatgaaaaaaaatcatggtactacgagaagaaatctcgctctagctggcgcctgacatcaagcgagatgaagaaaagccacgaattccacgctatcaacggcatgatctactctctccccgggctgaaaatgtacgagcaagagtgggtaagactccacctgcttaacataggaggcagccaagacattcatgtcgtacatttccatgggcaaactctcttagaaaacggcaacaagcagcaccagctgggcgtgtggcctctccttccaggatccttcaaaactttggagatgaaagcttcgaagcctggctggtggctcctcaacaccgaagttggagaaaaccagcgtgctggtatgcagacccccttcctgattatggatcgggactgccgtatgcctatgggcctgtctacgggaattatcagcgacagccaaattaaagctagcgaattcctgggttactgggagcctagacttgctcgcctcaacaacggcgggagttacaacgcctggagcgtagaaaaactggcagcagaattcgcttctaaaccatggatacaggtcgatatgcaaaaggaggttattatcactggaatccagacccagggcgcaaaacactatctgaagtcttgttacacaaccgaattctatgtagcatattcatctaaccagatcaactggcagatctttaaaggaaactcgactagaaatgtcatgtactttaacggaaatagtgatgcgtccaccatcaaagagaatcaatttgatcctcccattgtcgcccgctacatcaggattagccccactagggcctacaacagaccaactctccgcctggaactccaaggctgcgaggtaaatggctgcagcaccccgcttgggatggaaaatggtaagatcgagaataagcagatcacagcttcaagctttaagaaaagctggtggggcgactactgggagccgtttcgggcacggctcaacgcccagggaagagttaatgcctggcaggcaaaagctaacaataacaagcaatggctggagatcgatttgctcaaaatcaaaaaaattaccgcgattatcacacagggctgtaaaagcctgtcgagcgagatgtacgtcaagtcctacaccattcactactcagagcagggcgtggaatggaaaccttacaggctgaaatccagcatggtggacaaaattttcgagggcaacactaacaccaaaggccatgtgaagaacttcttcaacccccccatcattagccggttcatcagagtgatccctaaaacgtggaatcaatcaatagctctgaggctcgagctgtttgggtgcgatatctat

SEQ ID NO: 2353 - DNA, 6672 bp, Artificial Sequence
  derived and/or modified sequence
atgttccccgggtgtccccggttgtgggtgctagtcgttctgggcacgtcatgggtggggtggggttctcagggcactgaagccgctcaattgcgtcaattttacgtcgccgcccagggtatatcctggtcgtatcgaccggaaccaacaaactcatctctcaatctcagcgtgacctcatttaaaaagattgtgtaccgcgagtatgagccctattttaaaaaggaaaaaccacaaagtactatcagtgggctgttgggccctaccctgtatgccgaggtgggtgatatcatcaaggtccactttaaaaacaaagctgataaacctctatccatccatcctcaggggatccgttactcaaagctaagtgaaggcgcttcttatttggaccacacctttccagccgagaagatggatgatgctgtcgctcccggacgcgagtacacgtatgagtggtctatttccgaagactctggtcccactcacgatgatcccccctgcctgacccacatatattattcacacgagaatctcatcgaagattttaactccggattgatcggccctttgctaatttgcaagaaaggcacactgactgaagggggtacacagaagacattcgataaacagattgtgctgctctttgctgtcttcgacgaatctaaatcgtggtctcaaagctcaagcttgatgtacacggtgaacggctatgtcaatggcaccatgccagatatcacagtgtgcgcgcacgaccatatcagttggcacctcttgggtatgtcttctggacccgagttattctcaatccacttcaatggccaggtgttggagcaaaatcaccacaaagtttccgctatcacactagtttcggcgacctcaactaccgcgaatatgacggtggggccagaaggcaagtggataatctcttccctaacccccaagcacctgcaagccgggatgcaggcctacatcgatataaagaactgtcccaaaaaaacacgcaatctgaagaagatcacccgagagcagcgccgacacatgaaaagatgggagtactttatcgctgccgaagaagtcatttgggactatgcgcctgtcataccggctaatatggacaagaagtaccgctcacaacatttggataatttctccaatcagatcggaaaacattacaagaaagtcatgtacactcagtatgaggacgagtctttcacgaagcacaccgtgaatcccaacatgaaagaggatgggattttggggcccatcatccgcgctcaggtgagggataccctgaagatcgtgtttaagaatatggcttcccgtccttattcaatctacccccacggtgttactttctcaccctatgaggatgaggtgaatagcagctttacctccgggagaaataataccatgatcagagctgtgcagccgggagagacctacacgtacaagtggaatatactcgaatttgacgaacccactgagaatgatgcgcagtgtttgacacggccatactactctgacgtggacatcatgagggacatcgcctccggcctcattggccttctgctgatctgcaagtctaggtcccttgaccggcgaggaatccagcgagctgcggatattgagcagcaagctgtcttcgcagtgtttgacgaaaacaagagttggtatctggaggataacatcaacaagttctgcgagaaccccgacgaggtaaagcgggatgacccgaaattttacgagtccaacattatgtctactattaacggatatgtgcctgaatctataacgacacttggtttttgctttgatgacaccgtccagtggcatttctgctctgtgggaacccagaacgagattttaacaatccacttcactggacattccttcatttatggaaagagacacgaggacaccctgacactatttccaatgagaggcgagagcgtcacagtgactatggataacgtgggcacatggatgctgacctccatgaatagctccccccggagtaagaaactgcgcctgaagttccgggatgtgaagtgcattcccgatgatgatgaggactcgtatgagatatttgaacccccagagagcactgtcatggccacacgtaaaatgcatgacaggctcgagcccgaggatgaggaaagtgatgcggactatgattatcagaatcgactggccgctgccctcggaattcggtcgtttcgcaatagtagcttgaatcaggaggaggaagaatttaatcttacagctcttgccctggaaaatgggaccgagtttgtgtcctcgaatacagatatcatcgttggcagtaattacagcagtccgtctaacattagcaaattcaccgttaataatcttgctgaaccccagaaggcaccgtcccatcagcaggcaaccaccgcagggtcaccactacggcatctcataggaaaaaattctgttctgaactctagcactgccgagcactcctctccatattctgaggatcctatagaggatccacttcaacctgacgtcactggcattcgtttactcagcctgggcgcaggggaattcaagagtcaagagcatgccaagcacaaagggccgaaggtggagcgtgaccaggccgccaaacaccggtttagctggatgaaactgcttgcccacaaagtcggtagacatctctcccaagatactggcagtccttccggcatgaggccttgggaggatctgcctagtcaggacacaggctctccctcccgcatgaggccctggaaagaccctccttcagatttgctcttgctgaagcaatccaactcaagtaagattctggtcggaaggtggcacctggccagcgagaaggggtcatatgaaatcatacaggatacagacgaggataccgcagtgaataactggttgataagtccacaaaacgcatcacgcgcctggggagagtccacgccccttgccaacaagccgggaaaacagtctggccatcctaagttccctcgggtaaggcataaatctctacaggtcagacaggatggcgggaagtcccgactgaaaaagtcgcagttcttgataaaaacgcggaaaaagaagaaggaaaagcacacacaccacgcacctttgtctccccgcacctttcacccactgcgaagtgaggcctataatacattctcggagcgtagactgaagcattctctagttctgcataaatctaacgaaacctctctccccaccgatctgaatcagaccttaccatcaatggattttgggtggatagcgagcctgcccgaccacaaccagaattcaagtaatgataccggtcaagcgagctgcccccctggcctgtaccagactgtgccgccagaggagcattatcaaacctttcccatacaagacccagaccagatgcacagtaccagtgatcctagccataggagttcttcaccagagcttagcgaaatgctggaatatgaccggtcccacaaatcatttccaacagacatcagccagatgtcaccttctagcgagcacgaggtgtggcagaccgtgatcagccccgacctgtcgcaggtgacactctcaccagaactatcccagacgaatctttctcccgacttgtctcacacaaccctgtcaccagagctgatccagaggaacttatcgcccgcactgggacagatgccgattagtcccgatttgagccataccaccctgagccccgatctttcccacaccactttgagccttgacctcagccagaccaatctgagcccggagctctctcagacaaacctgagccccgcactgggccagatgcctctgtcccctgacttgtcacataccacacttagtctcgatttctctcagactaacctctccccagaactgtcccatatgacactgtcaccagaactgagccagaccaacttatctcccgctctgggccagatgcctatctctcctgatctgagtcacacgacattgtccctggattttagtcaaacaaatcttagccccgagctgtctcaaactaatctgtcacctgctctggggcaaatgcccctgtctcccgacccaagccatactactttatcgttggacctgtctcagacaaatttaagtccagagctgtcccagaccaacctttctcccgatctgtcagagatgcccctctttgctgacctttctcagatcccactgactcccgatctggatcagatgaccctgtccccagacttgggcgagactgacctgtcccccaattttggccagatgtccttatcgccggatctgtcacaggtgactctgagtccagacataagcgacactacattgcttccggacctttcgcaaatatcacccccaccagatctcgaccaaatcttttatcccagtgagtctagtcagagtctgctattgcaagaatttaatgagagcttcccctatccagatttaggccagatgcccagcccctcatccccaacgttgaacgataccttcttgagtaaggagtttaatcccctggtgatcgtaggacttagtaaagatggcacagactacatagaaattatccccaaagaggaagtccagtcctcggaagatgattacgccgaaatcgactacgttccatacgacgatccatataagacggatgtgaggacgaacatcaactcaagccgtgacccagataacatcgcggcatggtacctgaggtctaataacggcaatagaagaaattattacatcgctgcagaagaaatttcttgggactactccgagtttgtacagcgagagactgacattgaggattccgatgacatccccgaggacacaacttacaagaaagtggtgttcagaaaatatttagactccaccttcaccaaaagggatccaagaggggaatacgaggagcacctggggattttgggcccaataatccgcgcagaggtggacgacgtgatccaggtgcgtttcaagaacctcgcaagccgcccctactccctgcacgcacacgggctgagttatgagaaaagctcagagggaaagacatatgaagatgattctcctgaatggttcaaagaagacaatgccgtgcagccaaatagtagctacacttatgtctggcacgcgaccgaacgctcagggcctgaaagtcctggaagcgcctgcagggcctgggcatactatagtgccgtaaacccagaaaaggatattcacagcgggttgataggccctttattgatctgtcagaagggcatcctacataaggactcaaacatgccgatggacatgcgtgaatttgtcctactattcatgaccttcgatgaaaaaaaatcatggtattatgagaaaaagtcacgtagttcctggcgcttaacgagttcagagatgaaaaagtcccacgagttccatgcaatcaacggcatgatctactcgctcccagggctgaagatgtatgagcaggagtgggtccgcctgcatctgctgaatatcggagggtctcaggacatacacgtagttcactttcatggacagactctgctcgagaatggtaacaaacagcaccagcttggagtgtggcccttgctaccagggagcttcaaaactctggaaatgaaggctagtaagcctggatggtggctcctcaataccgaggtgggggagaaccaaagggcaggcatgcagacccctttcctcatcatggaccgggattgccggatgccgatgggactctctactggtatcatcagcgatagtcagatcaaggcttccgaattcttggggtattgggagccgcggttagctcgtctcaacaatggtgggtcatacaatgcctggtcggtggagaagctggccgcagagttcgcaagcaagccctggatccaggttgacatgcaaaaagaggtcataattacgggaatccagactcagggagctaaacattatttgaagtcttgctatactactgagttctacgtcgcttattcaagtaaccagattaattggcagatattcaagggcaactccaccagaaatgtgatgtatttcaatggcaacagcgatgcaagcaccatcaaagagaaccagtttgaccctccgattgtcgcccggtacatccggatctctcccacacgcgcctacaaccggcccaccctgaggctcgagctgcaaggatgtgaggtgaatggctgtagcactccactggggatggagaacggtaagatcgagaataagcagattaccgccagtagttttaagaagtcttggtggggcgactattgggaacccttcagagcccgccttaatgcgcagggacgagttaatgcatggcaggcaaaggctaataacaacaagcagtggctggagattgacctcctgaagatcaaaaagatcacagccattataactcaagggtgtaaatccctgtcgtccgagatgtacgttaagtcgtatactatccactacagcgagcagggggtggaatggaagccctatagattaaagagtagtatggtggacaagattttcgagggtaatactaacacaaagggacatgtgaagaatttctttaatcctcccataatctctcgtttcatacgagttatcccaaagacatggaatcagtctattgcactccgtctggagctctttggttgcgacatctac

SEQ ID NO: 2354 - DNA, 6672 bp, Artificial Sequence
  derived and/or modified sequence
atgttccccggttgcccaagactgtgggtactggtggtgttagggaccagttgggtaggctggggatcacagggcactgaagctgcccagctgcgacagttttacgttgccgctcagggcatcagctggtcctacaggccggaacccacaaactcatcccttaacctaagtgtcacctccttcaagaaaatcgtataccgcgaatacgagccatacttcaagaaagagaaaccacaatcgaccatttctggcctgctgggccccacgctgtatgcagaggtcggcgacattatcaaagtccacttcaagaataaggccgataaacccctcagtatccatccacaggggattcgttattccaagctcagtgagggggcaagctacctggaccacaccttcccagccgaaaaaatggatgatgccgtggcacccggaagagaatacacctacgaatggagcatatctgaggactctggccccactcacgatgaccctccttgtctaacccatatttactatagccacgaaaatcttattgaagactttaacagcggcctgatcggtccccttctcatctgcaagaaggggaccttgactgagggtgggacccagaaaaccttcgataagcagattgtactcctcttcgccgtgttcgacgagagtaagtcctggtcacagtcttctagccttatgtacaccgtgaacggctacgtgaatgggaccatgcccgacattacggtgtgcgcccatgaccacatctcctggcatctgctaggaatgtctagcggaccggaattgttcagtatacacttcaacggacaggtgctagaacagaaccatcacaaagtctccgcgatcacactggtcagtgccacctctaccaccgccaacatgacggtcggcccagaggggaaatggattattagctcattgactccgaaacaccttcaagcaggaatgcaggcatacatcgatatcaagaattgccccaagaaaactcggaacttgaaaaagatcacccgggaacagcggagacacatgaaaagatgggaatatttcatcgccgccgaagaggtgatttgggactacgcccctgtcattcctgccaacatggataaaaagtaccgatcccagcacctggataacttttcaaaccagattgggaagcactacaagaaagttatgtacacgcaatatgaggatgagtcctttacaaagcacacagtgaaccccaacatgaaggaagacggtatcctggggcctatcattagagcccaggtcagggacactctgaagattgtgttcaagaatatggccagccggccttatagcatctacccgcatggcgttaccttctcaccttatgaggatgaggttaactcttcctttacttccgggcgcaacaatactatgatccgcgcggttcaacccggcgagacgtatacttataagtggaacatcctggagtttgatgagccaaccgagaacgacgcccagtgccttacccggccgtactacagtgacgtggacatcatgagggacatcgccagcggacttatcggcctgcttctgatctgtaagtctcggtccctggacagaagaggaatacagcgggcagccgacatcgagcagcaggcagtcttcgcagtgttcgatgagaataagtcctggtacttggaagataacatcaacaagttctgtgagaatccagacgaggtaaagagagacgacccaaagttttatgaatcaaacataatgtcaaccattaacggctacgtgcctgaatccattactaccctggggttctgtttcgacgacactgttcagtggcacttttgtagcgtgggtacccagaacgagatcttaaccatccacttcacggggcacagttttatctacggcaaaaggcatgaggacacgctgacactgttccccatgcgcggtgaatcagtgacggtgaccatggataacgtggggacttggatgctcacaagtatgaatagttcaccacggtcaaaaaaactgagactcaaattcagggatgttaaatgtatccccgacgacgacgaagattcctacgagatcttcgagccaccagaaagcactgtcatggctaccaggaaaatgcacgatcggcttgagcctgaggacgaagaatccgacgcagactatgactaccagaatagactagctgccgcccttggcatacgatcattccggaattccagtttaaatcaagaagaggaggaattcaatctcacagcgctggctctcgagaacggaaccgagttcgtctcctcaaacacggacatcattgtcgggtcaaactactctagtccctcaaacatttctaaattcaccgtgaataacctggcggagccccagaaggccccatcccatcagcaagctaccacggcggggtctccacttcgccatctgatcggtaagaattcggtgctcaatagttctactgccgaacactcatcgccgtactcagaagacccgattgaggacccgttacagccagatgtgaccggtattcggttgctcagtctcggagccggggagttcaagagccaggagcatgctaaacacaaggggcctaaggtggaacgcgaccaggccgccaaacacagattcagttggatgaagctgttagcccacaaggtggggagacacttgtcccaggacactgggagccccagcgggatgcgaccttgggaggacctcccttcccaggataccggatctccctctcgcatgcggccttggaaagatcctcctagtgatctgctgctcttgaagcaatctaattcctcaaaaatccttgtgggacgttggcacttggctagcgagaaagggagctatgaaatcatccaggatacagatgaggatacggccgtgaataattggttgatcagtccgcagaacgctagccgggcatggggggaaagcacccccctggccaacaaaccaggcaagcagagtgggcaccccaaatttcctagagtgcgtcacaaaagtctgcaggtgcggcaggacggcggtaaatctcgtctgaagaagtcccagtttttgatcaagactaggaaaaagaaaaaagaaaagcatacacaccacgctcccctgtcaccccggacgtttcatccacttcggagcgaagcctacaatacattctccgaaagacgcctgaagcactccctcgtgctccacaaatctaacgagactagcctgcccaccgatctgaatcaaacgctgccgtctatggatttcggctggatcgcatccttgcccgaccataaccaaaatagtagtaatgacacaggtcaggcgagttgccctcccggattgtaccagactgtgcccccagaggagcattatcagacttttcccatccaggaccccgaccagatgcatagtacatcagatccctcgcacagatcctccagccctgagctctccgagatgctggagtatgaccggtcacacaagtccttccccactgacatctcgcagatgagtccatcaagcgagcatgaggtgtggcagaccgtgataagtcccgacctgagccaggtgactctgtctcccgaactaagccaaactaatctgagtcccgatctgtcccacaccaccttgtctccagagcttatacagagaaatttaagccccgctcttgggcagatgcccatctcccctgacctgtcccacactaccctgagccctgacttgtcccacaccacattatcactcgacctatctcagacaaacctttctccggaactgtctcaaaccaacctgagccccgccttggggcagatgcctctgagtccggacctctcccacaccaccctgtcactggacttttcacagactaatctttctccagagttaagccacatgactttatcgcctgagctctcgcagaccaatctgtccccagcgctcggtcaaatgcctatctctcccgatttaagccacaccactctttctctggatttctcacaaactaaccttagccccgaattgagtcagaccaatctgtcccccgccctgggccaaatgccattgtcaccagacccttctcacacaactctgtcgcttgacctgtctcaaaccaatctgagtccagagctttcccagactaacctcagtcctgatctctctgagatgcccctctttgcagacctctcacaaataccgctgactccagacctggatcagatgacactgtcccctgatctgggcgaaactgaccttagcccaaacttcggccagatgtccctctcccccgatctttcccaggttactctgtctcctgacatctccgacactacgcttctccccgaccttagtcagatctcccccccacctgacctcgaccagatcttctatccatccgaatcatctcagtctctcttgttgcaggaatttaacgaatctttcccgtatcccgatctggggcaaatgccttctcctagctcaccgacgctcaacgatacctttctgagtaaagagttcaacccactggtcatcgtagggttatccaaggacggaactgactacattgaaatcatccctaaggaggaggtgcagagttcagaggatgattatgccgagatcgattacgtgccgtacgacgacccatacaagactgacgtgcgcaccaatatcaactcctcccgtgacccggacaacattgctgcctggtacctgaggagcaataatggcaaccgtaggaattactatatcgcggcagaggagatatcctgggattactcagagtttgtgcagagggagacagacattgaggacagcgatgacatccctgaagacaccacctataagaaggtggtgtttaggaagtacctggacagtacttttacgaagcgcgaccctagaggcgagtacgaggaacacctaggaattctgggacccatcatccgggctgaggtcgacgacgttattcaggtgaggtttaaaaacctcgcgtcccgaccatatagcctgcacgcccatggactgagctatgaaaagtcttcagagggaaaaacatacgaggacgacagtcctgagtggttcaaggaggacaatgcagtacagcctaacagctcctacacctacgtgtggcatgccactgagcgaagcggcccagaatcaccgggttccgcctgcagagcgtgggcttactactcagccgtgaatcctgaaaaggacatccactcagggctgattggacccctgcttatctgccaaaaggggatattacacaaggattccaacatgcctatggacatgcgggagtttgtgctattatttatgacattcgacgaaaaaaagtcttggtactatgagaagaagtcgcgaagctcttggcgccttacaagcagcgagatgaaaaagtcacatgaattccacgctatcaatgggatgatctacagcttaccaggtctaaaaatgtacgaacaagagtgggtgcgactgcacctgctcaacattggcggatcacaggacattcacgtggtccattttcacggccagaccctattggaaaacggcaataagcagcaccagctcggtgtgtggcctctgctgcctgggagcttcaagacccttgagatgaaggccagcaagcctgggtggtggttgctgaacacggaagtcggtgaaaaccagcgtgctgggatgcaaacgccatttctcataatggacagggattgccggatgccaatgggtctcagtaccggtattatttccgacagccaaatcaaagccagcgagttcctgggttactgggagcctcgcttggctcgcctgaacaatggcggaagttacaatgcttggagtgttgaaaagctggctgcagaattcgccagtaaaccatggatccaagtggatatgcagaaagaagtgatcatcactgggatccagactcagggcgccaaacactacctgaaatcctgttacacgaccgaattttacgtggcctactcttcgaatcagatcaattggcagatattcaagggaaactctacccgcaacgttatgtacttcaacggaaactccgatgcgtccaccataaaggagaaccagttcgacccgccaattgtggcgagatatataaggatctctcccactcgggcatacaacagacctacgttgcggctggaactccaggggtgcgaggtcaacgggtgctctacgcctctcgggatggagaacggaaagatcgaaaataagcagattaccgccagttccttcaaaaagtcttggtggggggactattgggagcctttccgagccaggctgaatgcacagggcagggtcaatgcctggcaagctaaggccaacaacaacaagcaatggcttgagatcgatctgctgaaaataaagaagataaccgcgatcattacgcaaggctgcaaatccctctccagtgagatgtatgtgaaatcctacaccatccactattccgagcagggagttgaatggaagccttaccgattgaagtcaagcatggtagataagatttttgagggcaacacaaatactaagggccacgtcaagaacttcttcaaccctccgatcatttcaagattcatacgagtaattcccaagacgtggaatcagtcaatagcactgaggctggagttgtttggatgtgatatctac

SEQ ID NO: 2355 - DNA, 6672 bp, Artificial Sequence
  derived and/or modified sequence
atgttccccggttgtcccaggctctgggtgctcgtcgttcttggaaccagctgggttggatggggtagccagggcaccgaggcagcccagctgagacagttctacgtcgccgcgcaggggatcagctggagctaccgccctgagcccacgaactcatcccttaacctttcagtgacctccttcaagaagatcgtttaccgtgagtatgagccctactttaagaaggagaagcctcagtccaccatcagcggtctcctaggcccgaccctgtacgctgaggtgggcgacatcatcaaggtccactttaagaacaaggccgacaaaccccttagcattcatccccaaggcatccgttacagcaagctttcggagggtgcctcgtacctcgatcacaccttcccggccgaaaagatggacgacgccgttgcacccggcagggaatatacctacgagtggagtatcagcgaagactcaggccccacacatgatgacccgccctgcctcacccacatctattactcgcacgagaacctgatcgaagactttaattcgggcctgatcgggccactgcttatctgtaagaagggcacgttgaccgagggcgggactcagaagaccttcgacaagcaaatagtgctcctttttgccgttttcgacgagtcgaagtcgtggtcccaatcctcttccctcatgtacaccgttaacggttacgtaaacggcactatgccggacatcacagtttgcgcacacgatcacattagctggcacctcctcggaatgtcgtcgggccccgagctgttttcgattcatttcaacggccaagttctggagcagaaccaccacaaggtcagcgctatcactctggtctctgcgacatccaccaccgctaacatgactgtcggccccgagggtaagtggattatctcttccctgacccctaagcaccttcaggcaggaatgcaagcttacatagacatcaagaactgtcctaagaagacccgcaacctcaagaagattacccgcgagcagcggcgccacatgaagcgctgggagtatttcatcgccgcggaagaggtcatctgggactacgctcctgttatccccgccaatatggacaagaagtacagatcgcagcatctcgacaacttctccaatcagatcggcaagcactacaagaaggtcatgtacacccagtacgaggatgagtcgttcaccaagcacaccgtgaatcccaacatgaaggaggacggcattttgggccccatcattcgtgcgcaggtccgggacactttaaagatcgtcttcaagaacatggcctccaggccatatagtatctatccccacggcgttacattctccccctacgaggacgaagtgaacagtagcttcaccagcggccgcaacaacaccatgatcagggcggtgcagcctggcgagacctatacatacaaatggaacatccttgagttcgatgagcctactgagaacgatgcgcaatgcctcacgaggccttactactccgatgttgacattatgcgtgacatcgcgagtggactgatcggcctcctcttgatttgcaagtcccgttccctcgatcgccgcggcattcagcgtgcagcagatatcgaacagcaggcagtgttcgctgtctttgacgagaataagagttggtatctcgaggataacatcaacaagttctgcgagaaccccgatgaggtaaaaagggatgaccccaagttctacgaatccaacatcatgagcaccattaacggctacgtcccggaatccattaccacactcggcttttgctttgacgataccgtgcagtggcatttctgctccgtaggaactcagaacgaaatcttgactatccactttacaggccactccttcatctacggtaagcgtcacgaagataccttgaccctgttcccgatgagaggcgagtctgtcaccgtgactatggacaatgtcggcacatggatgcttaccagcatgaactcttctcctcgttctaaaaagctcaggcttaagttccgtgacgtgaaatgcattcccgatgatgacgaggattcttacgagatctttgaacctcccgagtccaccgtcatggctactcggaaaatgcacgaccgcttagagccggaggacgaggaatcggatgcggattacgactaccagaatcggctggccgccgcactcggtattcgttcttttcgcaacagcagtctgaaccaggaggaggaggaattcaacctgaccgccttggcactggagaacggtactgagttcgtctcaagcaacactgacattatcgtaggttctaactactcctcgccatccaacatttcgaagttcaccgtcaacaacctggctgagcctcagaaagcacctagccaccagcaggccaccaccgccgggtctccgctcaggcatctcatcggaaagaactccgttctaaactcctccaccgcggagcactcctcgccctattcggaggatcccatcgaggaccccctgcagccggatgtaactggtatccgcctccttagtctgggtgcaggagagttcaagagccaggagcacgccaagcacaagggacctaaggtcgagagggatcaagccgccaagcaccgcttcagctggatgaaacttctggcccacaaggtgggtcgtcatctgtcccaagataccggatctccgtcgggtatgagaccatgggaagatttgccgtctcaggacaccggatccccgtcccgtatgcggccgtggaaggacccgccttccgacctcctccttttgaagcaatcgaactcctccaagatcttggtgggccgttggcacttagcaagtgaaaagggctcgtacgagataatccaggataccgacgaagacacggccgtaaacaactggctcatttccccccagaacgcgtcccgcgcttggggtgagagcacccccctcgcaaataagcccggaaaacagtccggccatccgaagttccctcgggtccgtcataagtctctgcaggtccgccaggatggaggtaagagcaggcttaagaagagccagttcctcatcaagacccgtaagaagaagaaggagaagcatacacaccacgcccctctttcgccaaggaccttccatcccctccgctcagaggcgtacaacaccttttcggaaagacgtttgaagcatagtctcgttctgcacaaatccaacgaaacttcgttaccgaccgatctcaatcagaccttgccgtcgatggacttcggctggatcgcaagccttccggaccacaaccagaactccagcaacgacaccggccaggcgagctgtccgcccgggctctaccagactgtccctcccgaagaacactaccagacgttccccatccaggacccggatcagatgcactccacgtcagatccatcgcatcgtagttcttctcccgagctcagtgagatgctcgaatacgatcgatcacacaagtctttcccaacagatatctcccagatgtcaccgtcctccgaacacgaagtctggcagaccgttatcagtcctgacttatcgcaggtgacgttatcccctgagctgtcgcagacaaatttgtctcccgatctctcacataccactctgagtccggagctgattcagcgcaacttgagccctgcactcggtcaaatgcccatcagcccggatttgtcccatacgaccttgtctcccgatctctcccacaccacattgtctctggacctttcccagaccaacctcagtcccgagctgtctcagacgaacctttcccccgctctcggtcagatgcccttgtcacctgacctgtcgcacaccactctttctctcgatttttcccagaccaacctgtccccggagctgtcccatatgaccttgagtcccgagcttagccagacgaacctcagtccggcgctcggccagatgcccatctcccccgacctcagccataccaccttgagcctcgatttcagccagactaatctctctcccgagctgtctcagaccaacctctcccctgctctgggacagatgccactgagcccagatcccagccatacaacgcttagcctcgaccttagccaaaccaacttgtctccagagttgtcacagaccaacctcagccccgacttgtccgagatgccgctcttcgccgacctgtcccagatccctttgactcccgacctcgaccagatgacattgtcccccgaccttggagagaccgacctttccccgaactttggacagatgtcgttgagccccgacctctcccaagtcacactctcaccggacatctccgacacgacactcctccctgatctgagccagatcagtcccccgcccgacctggatcagatattctacccttccgagtcgtctcagtcgttgctgttgcaagagttcaacgagtcttttccgtaccccgatctcggccagatgcctagcccctccagtcctactctcaacgatactttcctttccaaggagttcaatcctctcgtcattgtcggccttagcaaggacggtacggactacattgagattattcctaaggaggaagtccaaagtagcgaggacgactacgctgaaatcgactatgtcccgtacgatgacccctacaagaccgacgtcagaaccaacataaattcctcccgtgaccccgacaacattgccgcgtggtatttgcgctcgaacaatggtaaccgccgtaactattatatcgccgctgaagagatctcctgggactactccgagtttgtgcagcgcgaaacggacatcgaggacagtgatgacatccctgaggatacaacctataagaaggtcgtcttccgcaagtaccttgattccaccttcaccaagcgcgacccgcggggtgagtacgaggagcacctcggcatactcgggcccattattcgcgccgaggtggacgatgttatccaggtccgctttaagaatttagcgtctcgtccttacagtctccacgcgcatggcttgtcctacgagaaatcttctgaggggaagacttatgaggatgactctcccgaatggttcaaagaggataatgctgtccagccaaattcctcctacacctacgtgtggcacgccaccgagcgttcaggcccggagtccccgggctcggcgtgccgtgcttgggcctattactctgctgttaaccccgagaaggatattcattctggactcatcggcccccttctcatctgccagaagggaattctccacaaagattccaacatgcccatggacatgcgtgaattcgtcctgttgttcatgaccttcgacgaaaagaagtcctggtactacgaaaaaaaatcgcgttcctcttggcggctgacatcttcagaaatgaagaagtctcacgaattccatgccatcaacggtatgatctactccctgcctggactcaagatgtacgaacaggaatgggtccggctccacctgctgaacataggtggatctcaagatatacacgtcgttcacttccacggccagacactcctagagaatggtaacaagcagcatcagctgggcgtgtggccgctcttgcctggttccttcaagactctcgagatgaaggcatccaagcctggatggtggctgctaaacactgaggtcggcgagaatcagcgtgccggcatgcaaacaccttttttgattatggaccgtgactgtcgcatgcccatgggcctttccacaggcattatttcagattcccagattaaggcaagcgaattcctgggatactgggaaccccggctggctcgtctcaacaacggcggttcctacaacgcgtggtcggtagaaaagctggccgccgaattcgcttcgaagccctggattcaagtcgatatgcagaaggaggtcatcatcactggaatccagacccagggagctaagcactatctcaagtcgtgctacaccactgagttctatgtcgcctattcctctaaccagattaactggcagatattcaagggcaactccactcgtaacgtcatgtacttcaacggtaactctgacgcctcaactattaaggaaaaccagtttgacccccctatcgtcgctcgttatatccgcatctctcccacccgcgcctacaacaggccaactcttcgcctcgagctacagggctgtgaagtgaacggttgctccacccccctaggcatggagaatggaaaaatcgagaacaaacagattaccgcaagctccttcaagaagagttggtggggcgactattgggagccattccgtgccaggctcaacgcccaagggcgtgtgaacgcttggcaagctaaagccaacaacaacaagcaatggctcgagatcgatttgcttaagatcaagaaaattaccgccatcattacgcaggggtgcaagtctttgtcgtccgagatgtacgtcaagtcctacacgattcactactctgagcagggggtcgagtggaagccgtatcgacttaagtcttccatggttgataagatcttcgagggcaatactaataccaagggtcatgtcaagaacttctttaatcctccgatcattagtagattcatccgggttattcctaagacttggaatcagtccatcgccttgcgtctggagctgtttggatgcgatatttac

SEQ ID NO: 2356 - DNA, 6672 bp, Artificial Sequence
  derived and/or modified sequence
atgttccctggttgtccgcgcctttgggtgctcgtcgtgcttgggactagctgggtaggatggggttcacagggtaccgaagccgcccaactgaggcagttttacgtggccgcacagggtatctcttggagctataggcctgagcccacgaattcttccctgaacctgtctgtgacgagctttaagaaaatcgtgtatagagaatacgaaccctatttcaagaaggaaaaaccacagtctaccatcagtgggttgctggggcctaccctctacgccgaagttggagacataatcaaggtccatttcaaaaacaaggctgataaacctcttagtattcacccacagggaatacgatacagtaaactgagtgagggggcttcctatctcgatcacacctttccagctgaaaaaatggacgacgcagttgccccagggagggagtacacctacgagtggagcatctccgaggacagtggtcctacccacgatgaccctccctgcttgacccatatttactatagtcatgagaatctcattgaggattttaatagcggactgataggaccacttttgatctgtaagaagggcactctcactgaaggcggcacccagaagacgtttgacaagcagatcgtcctgctttttgcagtgttcgatgagagcaagtcatggtcccaaagttcctccctgatgtacacggtgaatggttacgtgaatgggaccatgccagatatcacggtatgtgcccatgatcacatctcttggcatctcctcgggatgtcatccgggcctgagctgttttccatccactttaacggtcaggtactcgaacagaatcaccataaagtttctgccatcaccctggtgagcgctacctctaccaccgctaacatgactgtgggacctgaaggtaagtggatcatctcctctctgaccccaaaacatctgcaggccggcatgcaggcatatatagatatcaaaaactgtcctaagaaaacgaggaatctcaagaagattacccgagagcaacggagacacatgaagcgctgggagtatttcatcgcggcggaagaggtgatctgggattatgccccagtgatccccgccaatatggataaaaagtacaggtctcagcatcttgataatttctccaatcaaatcggtaagcactacaaaaaagtgatgtacacccagtacgaggatgaatcctttaccaagcacacggttaacccaaatatgaaggaagacggaatcctgggccctatcatacgggcccaagtgcgcgatacactcaagattgtatttaagaacatggccagtcgaccatactccatctacccccatggcgtgacattttccccttatgaggatgaagtgaattcctcttttacatctggccggaataatacaatgatccgagctgtccagcccggagaaacgtacacttataagtggaacattctggaatttgacgaaccaaccgagaacgatgctcaatgtctgacgagaccatattatagcgacgttgatataatgcgggacatcgcctcaggcctgatcgggctgttgctcatatgcaagagtcgctccttggatcgcaggggaattcagcgggcagccgacatcgagcagcaggcagtctttgccgtgttcgatgaaaataagagctggtacctcgaggacaacatcaacaagttttgtgagaatcccgatgaagtaaagcgggacgacccaaagttctacgagtcaaatattatgtccacaatcaacggatacgtccctgaatctatcaccacgctgggcttctgtttcgacgacaccgtgcagtggcacttctgctctgttggaacccaaaacgagattctcacgatccactttactggccatagtttcatctatggcaagcggcatgaagacacactgaccctgttccctatgcgcggggagtctgtgaccgtgacaatggacaacgtcggcacgtggatgctgaccagtatgaattcttcacccaggagtaaaaagcttcgcttgaagtttcgcgacgtcaagtgcatccctgatgacgacgaagactcctatgagatctttgagccacctgaatccaccgtcatggccactagaaagatgcacgacaggctcgagcccgaagacgaggaatcagatgctgactacgattaccagaacaggttggcagccgctttgggaatcagaagctttaggaatagttcactgaatcaggaggaggaagaattcaatcttactgcactggcactcgaaaacggcacagagttcgtaagctccaacacagatattatagtggggtctaactattctagtcccagtaacatctctaaatttaccgtaaataacctggcggagccccagaaggcaccttcccaccagcaagccaccacagcagggtcaccattgcggcaccttattggcaagaatagcgtgctgaattcttccacggccgagcactcctctccctactccgaggacccaattgaagaccccctgcagccagacgtcactggcatacggctcttgtctctgggtgcaggagagtttaagagccaggagcatgccaaacacaaaggacctaaggtcgagagggaccaggcagccaaacataggttcagctggatgaagcttctggcccataaagtggggcggcacctgtcccaggatactggtagcccatcagggatgcgcccctgggaggaccttcctagtcaggacaccgggagccctagcaggatgagaccatggaaagacccgccaagcgatctgttgcttctcaaacagagcaactcctctaaaatcctggtgggacgctggcatctcgccagtgagaaagggagttacgagatcattcaggacacagatgaggatacagctgtgaacaactggctgatctcaccccagaacgcttcaagggcttggggtgagtcaacacctctggctaacaaaccgggtaagcagagcggacaccccaagttcccccgcgtgcggcataagtccctgcaggtgagacaagacggggggaaaagtcggctgaaaaagagtcaattcctgatcaagacaaggaaaaagaaaaaagagaagcacacccaccatgccccacttagtcctagaacgtttcacccactgcgcagcgaggcatacaacaccttctccgaaagaagactgaaacatagcctggtcctgcacaagagcaacgagacctcattgcccactgaccttaatcaaactttgccaagcatggactttggatggattgcctcccttcctgatcacaatcaaaatagctccaacgacacaggccaggcgtcctgcccgcccggcttgtaccagaccgttcctcccgaagaacactaccagactttcccaatccaggaccctgaccagatgcatagcacctctgatccaagccaccgatcctctagccctgagttgagtgagatgctcgagtacgatagatcccacaagtcatttcccactgatatttcccagatgagcccatcttctgagcatgaggtgtggcagactgtgatttccccagacttgtcacaggtgaccctgagccctgaactgtcccagaccaatctgtcccctgaccttagccatactacgctgagcccggaactcatccaacgcaatctgagtcctgccctggggcagatgcccatctctccagaccttagtcacaccaccctgtctcctgatctttcccacactaccctgagtctcgacctgtcacagaccaatctgagtcctgaactctcccagaccaacctgtcacccgcgctcggacagatgccactgtctccggacctgtcccacaccacattgtcactggacttttcacaaaccaatttgagccccgagttgagccacatgaccctgagcccagaactctctcaaaccaacctctcccccgctctgggtcagatgcccatctcccccgacctgagccatacgacactgtctctggacttcagccagacaaacctgagtccagaattgtcccagaccaacctgtcaccagccctgggacagatgccactgagccctgacccgtcccataccacactgtctcttgatctgtctcagacaaacctgagccccgagctgtcccagactaatctgtcaccagatctgtccgagatgcccctcttcgctgatctgtcacagatccccctcacacccgacttggatcagatgaccctcagtcctgacctcggcgagactgatctttcacccaatttcgggcagatgagtctgtccccggacctgagccaagtgacactgtcacctgatatctccgacaccaccctgctcccagacctctcccagatatcacccccgcccgacctggaccaaatcttttatccctctgagagttcccagagtctgctgctgcaagaatttaatgaaagtttcccctacccagatctggggcagatgccatcacccagttcccccacgcttaacgatacattcctcagcaaagaatttaaccccctggtgatagttggactgagcaaagacggaacagattatatagaaatcattcccaaggaggaggtgcagtcatccgaggacgattacgcggagattgattacgtgccctatgacgacccgtataaaacagacgtccggacgaatatcaactcatctagagatcccgataacatcgctgcttggtaccttaggagcaataacggaaataggcggaactactatattgcagcagaggagatcagctgggactattctgagttcgttcagagagaaacagacatcgaggattctgatgatatcccagaagacactacttataagaaggtggtcttccggaagtacttggatagcacttttaccaagcgagatccccgcggagagtatgaagaacacctcggcatcctggggcctattatcagggctgaggtcgatgacgtcatccaggttaggtttaaaaacctggcttcacgcccatatagtcttcatgctcatggcctctcctacgagaagtcttctgaaggaaagacttacgaagatgacagccccgagtggttcaaagaggataacgccgtgcagcccaatagctcttacacctatgtgtggcacgcgacagaaaggtcaggaccagagtcccccggaagcgcttgcagggcttgggcgtattactcagccgtgaacccagaaaaggacatccatagtggactgatcggacctctgctcatttgccagaaggggatccttcataaggacagtaatatgccaatggatatgcgcgagtttgtgttgctcttcatgacctttgacgaaaagaaatcctggtactacgaaaaaaagagccgcagttcctggcggctgacgtcatctgaaatgaagaagagccatgaattccacgccatcaacggtatgatttacagcctgccggggctcaagatgtatgagcaggagtgggtgagattgcacttgcttaacattggagggagtcaggacatccacgttgtacacttccatggacagacactgctggaaaatggcaataagcagcatcaactgggtgtttggcctctgctgcctggtagcttcaagacgttggaaatgaaggcttccaagccagggtggtggctgctcaacaccgaggtaggcgagaaccagagagctggtatgcagactccttttctgattatggacagggactgccgaatgcccatgggactcagtactggaattatcagtgattcacagatcaaggcttccgagtttctcggctactgggaaccccgcctggcacggctcaataatggaggctcatataacgcctggtcagtggagaagctcgctgctgaatttgccagcaagccatggatccaggttgacatgcagaaggaggtgatcattacgggtattcagactcaaggggcaaagcattatctgaagtcatgctatacgactgagttctatgttgcgtactcaagcaatcagatcaattggcagatcttcaaaggcaactctacaaggaacgttatgtatttcaatggaaatagcgatgccagtaccatcaaagaaaaccagttcgaccctcctattgtagcacgctacatccggatatcacccactcgggcgtacaaccggccaactttgcgccttgagctgcagggctgcgaagtaaacggctgcagcactccactcggcatggagaacgggaagatagagaataagcagattaccgctagttcttttaaaaaaagttggtggggcgattactgggagcccttccgcgctagactgaatgcccaaggcagggtcaacgcgtggcaggcaaaagctaataataacaagcagtggctggaaattgacttgctgaaaatcaagaagattaccgctattataacacaaggatgcaaatcactgtcatccgagatgtacgtgaaatcttacactattcattatagcgaacaaggggtagagtggaagccatacaggctgaaatcatccatggttgataagatcttcgaaggaaacacgaatacaaaggggcacgtcaagaatttcttcaaccctccaatcatcagtagatttatcagggttatcccaaagacctggaatcaaagcatcgcactccgacttgagctcttcggctgcgacatctac

SEQ ID NO: 2357 - DNA, 6672 bp, Artificial Sequence
  derived and/or modified sequence
atgtttcctgggtgtcctaggttgtgggttcttgttgttttgggaacttcatgggtcggttggggctcacaaggtacagaggctgctcagcttcgtcaattctatgtggctgcacagggaatttcttggtcatatagaccggaacccacaaatagttcattgaatttgtccgtcactagttttaaaaagatcgtatatagggaatacgaaccatacttcaaaaaggaaaagccgcagagtaccatcagtggtctcctcgggcctacactgtatgctgaagtgggtgatattattaaagttcatttcaagaataaggcggataaaccgcttagcatccatccgcaagggatcaggtacagtaaactttccgaaggcgcttcctatctggatcatacttttccagctgaaaagatggacgatgcagttgctccaggtagggagtacacttacgaatggtctatatcggaggactctggacctactcacgatgacccaccatgtcttacccatatatattactctcacgaaaaccttatcgaagattttaactctgggcttattgggccactactaatttgcaagaagggtaccttaacagaagggggtactcagaaaacattcgataagcagatagttctgttattcgctgtctttgatgaatccaagtcatggtctcaatcttcctcattgatgtacacagtcaatggatacgtgaacgggacaatgccagacatcacagtgtgtgctcacgatcatatttcttggcacctcttaggtatgagcagtggcccagagcttttctccattcactttaatggacaagtattagagcagaaccatcataaggtttcagcaattactttggtcagtgccacttctactaccgctaatatgaccgtcggtccagaggggaaatggataatctctagtttaacacccaaacatctgcaggctggaatgcaggcatacatcgatatcaaaaactgccctaaaaagactagaaatcttaagaaaataactagggaacagagacgtcacatgaagcgttgggaatatttcatcgcagctgaggaagtcatctgggactatgctcctgttatccctgcgaatatggataaaaaatacagatctcaacacctagataatttttcaaatcagatcggaaaacattacaagaaagtgatgtatacccaatatgaggatgaatcttttacaaagcatactgtgaatccaaatatgaaggaagacggaatcttgggaccaatcatacgagcacaggtccgggatacacttaaaattgttttcaagaatatggccagccgtccttactcgatttacccgcacggtgtcactttctcgccttacgaagacgaggtcaactcttccttcacttcaggacgaaacaacactatgattcgcgctgtccaacccggcgaaacatacacttacaagtggaacatactcgagtttgatgagccaacagagaatgacgcccaatgcttgactaggccttactacagtgatgttgacattatgcgtgatattgcttctggcctcattggactattgttgatctgtaagagccgttccctagacagaagggggatacagagggctgcagatattgaacaacaagcagtttttgctgttttcgatgaaaataaatcttggtacttagaggataacattaacaagttttgcgaaaatcctgacgaagttaagcgggacgatccgaaattctatgaatctaatatcatgtcaactataaatgggtatgtcccagagtcaattaccaccttgggattttgttttgatgacacagttcagtggcatttttgtagtgttggtacacaaaatgagatcttgacaattcattttaccggtcactcctttatttatgggaagaggcatgaggatactttgacactttttccaatgagaggtgagtccgtaacagttactatggacaacgtggggacttggatgctgacaagtatgaatagcagcccccgaagtaagaaactgcggcttaaatttagagacgtaaagtgcatccctgatgatgacgaggactcctacgaaatattcgaaccgcctgaatctactgttatggctactcgtaagatgcacgatcgtttggagcccgaagatgaggaatctgatgcggattatgattatcagaacaggttggcagcggctcttggtatcaggtcatttaggaatagtagtctcaatcaagaggaagaagaattcaatttgactgctcttgccctggagaatggaactgagttcgtgtcttcgaatactgatatcattgtgggcagtaactatagttccccgagcaatatttctaagtttactgtgaataacctcgctgagccacaaaaagctcccagtcaccaacaagctacaacggccgggtcgcctcttaggcatctgatcggtaagaattctgttctgaattcctccacagcagagcatagctcaccttacagtgaagatcctatcgaggatccactacagcctgatgttactggcattagactgctaagcttgggagctggagaatttaaaagtcaggaacatgcaaagcacaagggcccaaaggtggaacgtgatcaggccgccaagcatcgattttcctggatgaaattacttgctcacaaggtagggagacatctctcacaggacacaggaagtccaagtggtatgcgtccatgggaagacttgccctcacaagatactggaagtccatctaggatgaggccttggaaggatcctccctctgatcttctgcttcttaagcaatcaaatagtagcaaaatccttgttggcagatggcatttggcctcggagaaggggtcttatgagattatacaagatacggatgaagatactgccgtcaataactggttaatcagtccccagaatgcctcgcgcgcctggggagaaagtacacctctggctaataagcctggtaagcaatccggtcaccctaaattccctcgggtcaggcataagagtctccaagtcagacaggatggaggtaagtcgcggcttaagaaatcacaattcctgattaagactcgcaagaagaagaaggagaagcacactcaccatgctcctcttagtccgaggacttttcaccctctccgatcagaggcatacaatactttctcagaaaggcgattgaaacattccttggtccttcacaaaagtaatgagactagtctgcccactgatttgaaccaaactttaccatccatggattttggatggatagcttctcttcccgatcataaccagaattctagtaatgacactggccaggcttcatgccctccagggctctatcaaactgtccctcccgaggaacattaccaaacatttcctatccaagaccctgaccagatgcattccacatctgatcctagccatagaagtagttcgcctgaacttagtgaaatgcttgaatatgatcgttctcacaaatcatttcccacagatatctctcagatgagcccttcatccgaacatgaagtgtggcagactgtaatatcccccgatttgagccaggttactttgtctcctgagttatcccaaaccaaccttagtccagatctcagtcacactacactaagtcccgaacttattcagagaaacctgagtcctgcattgggtcaaatgccgatatcaccagatttgtcgcatactaccttgagcccagatctgtcccatactacgctttccctagatctatcacaaaccaacctttccccagaactcagtcaaacgaatctctctccagcactggggcagatgcctctctctccggatttgtcccatactactctgtcattggatttcagccaaacaaatcttagtcctgaactgtcccatatgaccttaagtcccgaattatcccaaacaaaccttagccccgcacttggccagatgccaatttctccggatctttcgcatacaacactatcattggatttctcgcagacgaatttaagcccagagctgtcacagacaaatcttagtccagctctaggtcaaatgccactctctcctgatccttcacataccacattatctctcgacctgtcccagaccaatctgtcgcctgaattatcacaaacaaatctcagccctgatctctctgagatgccactgtttgccgacttgtcacagatacctctcactcctgatttggatcagatgacactttctccagatctgggcgaaaccgacttaagtccaaacttcggtcagatgagcttatctccagatttgagccaagtaacgctcagccctgatatatccgatacgaccctcctacctgatctttcccaaatttctccaccgcccgatctcgaccagatcttctatcctagcgagtcctcccaaagtttgctcttgcaggaatttaatgagtcattcccctatcctgaccttggacagatgccctcaccttctagccctactcttaatgatacatttttgtcaaaggaatttaatcctttagtgatcgtcgggctgtcaaaagacgggactgattatattgaaatcatccctaaagaggaagtgcagagctctgaagacgattacgctgagattgattatgtcccgtatgatgatccatataaaacagacgtcaggactaatatcaactcctcgcgcgatcccgacaatatcgccgcctggtacctgcgatctaacaatggaaaccgacgtaattattatatagcagcggaagaaatttcttgggattactcagagtttgtgcaaagggagactgatatcgaagattcggatgatatcccggaagataccacgtataagaaggtggtgttcaggaaatacctagactctacctttacgaagcgtgatcccagaggagaatatgaggagcatttgggtatcttgggacctattattagagcggaggttgatgatgtgatccaagttagatttaagaatcttgccagcaggccttatagtctgcatgcccatggattgagttatgagaaaagcagcgaaggtaaaacttacgaggatgacagccctgaatggtttaaggaggataatgctgtccagcctaactcatcttacacttatgtttggcatgctacggaaagatctgggcccgagtcacctggtagcgcttgtcgagcttgggcgtattactcagccgtgaatcctgaaaaagacatacattctggtttgatcggaccgcttctaatttgtcagaagggtatcttgcataaagactctaacatgccgatggatatgcgagagttcgttcttctgttcatgacttttgacgagaaaaaaagctggtactacgaaaaaaagtctagatcttcgtggaggcttacgagctcagagatgaaaaagagtcacgagtttcatgctataaatgggatgatttattctttgccagggttgaaaatgtacgaacaggaatgggttagactccatctgttgaatattggaggctcccaagatatacacgtcgttcacttccacggacaaaccttgctggagaacggaaataagcagcaccagcttggtgtttggcctttgttgcctggttcattcaagacccttgagatgaaggcttcaaagccgggttggtggttgctgaataccgaggtgggtgagaatcaaagggctggtatgcagaccccgtttctgatcatggacagggactgtaggatgccaatgggacttagcactgggattattagtgattctcaaataaaagcttccgaatttctcggatattgggagccaaggttagcaaggttaaataacggaggctcatataatgcctggtcagttgaaaaactcgcagctgaattcgcatcaaagccctggattcaagtagacatgcaaaaggaggttattattaccgggatccaaactcagggagctaaacactacttgaagagctgttacaccacagaattctacgttgcttattcgtctaatcaaataaattggcagatattcaaggggaatagtactcgtaacgttatgtatttcaatggaaattcagatgcgagcactataaaggaaaaccagtttgaccctcctatagttgctcgttatattaggatttcccctactcgagcctataataggccaactctaaggcttgagttgcaaggctgcgaagtgaacggctgtagtacaccactaggcatggagaacgggaaaattgaaaataagcagattactgcatctagtttcaaaaagtcatggtggggagattactgggagcccttccgcgccaggctcaatgcacaaggccgcgtgaacgcttggcaagcaaaagccaacaacaacaagcagtggctggaaatagacttgcttaaaattaagaagattactgctataataacccaaggctgtaaaagcctttcctctgaaatgtatgtgaaatcttatacgatacattattctgaacaaggagttgagtggaagccatataggctcaaatcgagtatggtggacaaaatatttgagggtaataccaataccaagggccacgttaaaaatttctttaaccctccaatcatttcaagattcatcagagtcattcccaagacttggaaccagtctattgcgcttaggcttgaactgttcggttgcgacatctac

SEQ ID NO: 2358 - DNA, 6672 bp, Artificial Sequence
  derived and/or modified sequence
atgtttcctggttgtcctcggctgtgggtcctcgtggttctggggacttcctgggttggttggggctctcaaggaaccgaggctgcacagctgcgtcaattctacgtagctgcacaggggatctcctggtcttataggcccgaaccaaccaactcatcccttaacctctcagtaacttcctttaaaaaaattgtgtatagggagtacgaaccttacttcaagaaagaaaagccacagtctacaatatctgggctgctgggccctaccctatacgcggaagtgggagatattataaaagtccattttaagaataaagctgataagcccctcagtatacacccgcagggcattcgctactccaagctgtccgagggagcaagctacctggaccacactttccccgcagagaagatggacgatgcagtggccccaggtagagaatacacatacgagtggtccatcagcgaggattccggcccgacacacgacgaccccccttgtctgacccatatctattacagccacgaaaacctcatcgaggactttaacagcggcttgattgggcccctgctgatctgtaagaagggcaccctgaccgaggggggaacccaaaagacatttgataagcagattgtcttgttgtttgctgtctttgatgaatctaagagttggagtcagtccagttcactgatgtatacagtgaacggatacgtcaacggaaccatgcccgatataacagtttgcgcccacgatcatatttcttggcatcttctggggatgtctagtggcccagagttgttcagtatccatttcaacggtcaggtgctcgagcagaaccatcacaaagtgagcgcaatcacccttgtttcagctacctctaccactgcaaatatgactgtcggacccgaggggaagtggatcatctcctccctgacaccaaaacacttacaggcaggcatgcaagcttatattgacattaaaaactgccctaaaaaaacaagaaaccttaaaaagatcacaagagagcagaggcgccatatgaagcgctgggaatacttcatcgctgcggaagaagttatctgggactatgctccggtgatccctgcgaacatggataagaaataccgaagccagcacctcgataattttagcaaccaaatcgggaaacattacaagaaagttatgtatacccaatatgaagatgagtcatttaccaagcatacagtcaatcccaacatgaaggaggatggaatcttgggcccaattattagggcccaggttagggatacgcttaaaattgtgtttaagaatatggccagtaggccatactcaatttacccgcatggagtgacattctccccgtacgaggatgaagtcaacagcagcttcacctccggtcgcaataacacaatgattagggccgtccagcccggagagacgtacacctacaaatggaatatcctggaattcgatgaacccactgaaaatgatgcccaatgtcttaccagaccatattactccgacgtcgacattatgagggacattgcttcagggctgatcggattactgctgatctgcaaatctcgctctttggacagaaggggaattcaaagagcagcagatatcgaacaacaagccgtctttgctgtctttgatgaaaataaaagctggtatcttgaagacaatatcaataaattttgcgaaaacccagacgaggtcaaaagggatgacccgaagttctatgaaagtaatatcatgtccaccatcaacggatacgttcctgaaagcattaccaccctcggattctgctttgacgataccgtccaatggcacttttgctctgtcggcacccaaaacgagattctgactatacacttcaccggtcactcattcatctacggaaaaaggcatgaggacacactgactctgtttcctatgcgaggagagtcagtgaccgtgacaatggataacgtgggaacttggatgctcacaagtatgaatagcagccctcgcagcaaaaaattgagactcaaattccgcgacgtgaaatgcatcccagatgatgacgaggactcatatgagatctttgaacctcctgaaagcaccgtgatggcaaccagaaagatgcacgatcgccttgaacccgaggatgaggaaagtgacgcagattacgactaccaaaataggttggctgctgcccttggcattcgatcgtttaggaacagtagcctgaaccaggaagaagaggaatttaaccttacagcacttgccctggagaacggcactgaatttgttagttctaacactgacatcattgtggggagtaactatagctcacctagcaatattagcaagtttaccgtgaataatctggcagaaccccagaaggcgcctagccatcagcaggccactacagctggctcccccctccggcacctgatcggaaagaacagtgttctgaactcctcgactgccgagcacagcagcccatatagtgaggaccccatagaggatccactgcaacccgacgtcacaggaataagattgttgagccttggcgccggagaatttaagtcacaagaacacgctaagcataaaggaccaaaagttgaaagagatcaggcagccaaacaccgcttcagctggatgaaacttcttgcacacaaggttggaagacatctgtctcaagacaccggtagccccagcggcatgaggccttgggaggatcttcctagccaggataccggttctccttcaaggatgaggccttggaaagaccccccctcggacttgctcttgctgaaacagagtaacagttcgaagatccttgttggccgctggcaccttgcctccgaaaaaggaagttatgaaatcatccaagatacagacgaagacaccgccgtcaacaattggctgattagccctcagaacgccagccgagcttggggggagagcacacctttggccaataaacccggcaaacagtctgggcatcctaaatttccccgcgtgagacacaagtcgctgcaggttagacaggacggaggcaagtcccggctgaagaagtcacaatttctcatcaagacacgtaaaaagaaaaaagagaaacatacacaccatgcccctctttctccaagaaccttccacccgctcaggagcgaagcatacaacaccttctctgaaagacgactgaaacacagccttgtactgcataagtccaacgagacctcactgccaacggatctgaaccagaccctcccttcaatggacttcggatggatcgcctcactgccggaccacaaccaaaacagttctaatgatactggccaagctagctgccctcctggtctgtatcagacagtgccaccggaagagcactaccaaactttcccaatccaggatcccgaccaaatgcactcaacctccgacccctcccaccgctcctcaagcccagagctctctgaaatgctggagtacgataggtctcataaatccttccctactgatatttcccagatgagcccgagcagcgagcacgaagtttggcaaactgtcatatcccctgatttgagtcaagtcactttgagccccgagctcagccagaccaacctgtctccagatttgagccacacgactctctctccggagctgatccaacgtaatctttccccggccctcggccagatgcctatcagccctgatctctctcacacaactttgagccccgatttgtcccacaccaccttgagccttgacctgagtcaaaccaatctttcaccagagctgtcccagacaaacctgtctcctgccttgggtcaaatgcccctgagccccgatctgtcgcacacaaccctgagccttgattttagccagaccaacctctcaccagaactgagccacatgaccctctcacccgaactgagtcaaacaaatctttctcctgccctggggcaaatgcctatctctccagatctctctcatacaacactttctctggactttagtcaaaccaatctgagtcctgagctgagccaaactaacctcagtcctgctctcgggcagatgccactgtctcccgatcccagtcatacaaccctgtcactcgatctgtcccagactaacctgagcccagaacttagtcagaccaacctctcacccgatcttagtgaaatgccactctttgcagacctttcccagatccctttgacccctgatttggaccagatgacactgtctcctgatttaggcgaaacagacctgagtccaaatttcgggcagatgtcactgagtcccgatctgagccaagtgacactgagcccagacatctccgacacaaccttactccctgacctctctcagatttctccgcctcctgacctggatcagatattttaccctagcgaatcatcccaaagcctgctgttgcaagaattcaatgagtccttcccttaccctgacctgggacagatgccgagcccatcttctcccactctgaacgatacttttctatcaaaggaatttaatcctctggtaatagtcggtctgagtaaggatgggaccgactacatcgagatcataccgaaagaggaagttcagagtagcgaagatgactatgccgagattgactacgtcccttacgacgatccttataaaacagatgtgcggaccaacataaactcttctagggatcctgacaatatcgccgcctggtaccttcgcagcaataacggaaacaggcgcaactactacatcgccgccgaagaaatttcctgggactacagtgaattcgtacagcgtgaaaccgatattgaagactccgacgatatccctgaggatacaacctataaaaaagttgttttcagaaagtacttggattccacctttaccaaacgagatccacggggagagtatgaagaacacttgggcatcctgggtcccattatccgggccgaagtggatgacgtgatccaggtgagatttaagaatctcgcatcaaggccgtattctttgcacgcgcatggcctgtcttacgaaaagagcagcgaaggcaaaacttatgaggacgattcgcctgaatggttcaaagaggacaatgcagtgcagcccaactccagctatacctacgtatggcatgcaacagagaggagcggcccagaatcaccaggctcagcttgcagggcctgggcatactattctgccgtgaaccctgagaaggacatccactctggtctgattgggccgcttctcatctgccagaagggtatcctgcacaaagatagtaacatgcctatggacatgagagaattcgtcctcctgtttatgaccttcgacgagaaaaagagctggtactatgaaaagaagtcacgatcctcctggaggcttacatctagtgaaatgaaaaaatcacatgagtttcacgctattaacggcatgatttattccctgcccggacttaaaatgtacgagcaagagtgggtgagactgcatttgctcaacattggtggaagccaagacatccatgtcgtgcacttccacgggcagacccttctcgaaaacggcaacaagcaacaccaattgggcgtgtggcccctcctgccgggatcctttaaaacattagaaatgaaagctagcaaacccggatggtggttgctcaacaccgaagtcggagagaaccagagggcagggatgcagactcccttccttattatggatagggactgtagaatgcctatgggcctgagcacggggattatctctgattcacagatcaaagcttccgaatttctgggttattgggagcccaggttggccagactgaacaatggcgggtcctacaacgcttggagcgtggagaagcttgccgccgagtttgccagcaagccctggattcaggtcgatatgcagaaggaggtgataatcaccggaatacagacacaaggggcaaagcattatttgaaaagctgttacactactgagttctatgtggcttatagcagcaaccagatcaattggcaaatctttaaaggtaactctacaaggaacgtcatgtatttcaatggcaacagcgacgctagcaccatcaaagagaaccagttcgacccccctattgttgctcggtatatccgtatcagccccactagagcttacaacagacccacgctgcggctggagctgcagggatgcgaagtgaacggttgctccactccactgggcatggagaacggcaagatcgaaaataagcagataaccgccagcagcttcaagaagtcatggtggggagattactgggaaccgttccgcgctaggttaaacgctcaggggcgcgtcaacgcatggcaggctaaggccaacaacaacaaacagtggctggagattgatctgctgaaaataaaaaagatcacagccatcattacacagggatgcaagtctctctcaagcgagatgtatgttaaatcatacacaattcattacagcgaacaaggcgtggagtggaaaccatataggctgaagagctctatggtcgataaaatctttgagggaaatacaaacaccaaaggacacgttaagaacttctttaaccccccgatcatcagccgctttatcagagttattcctaaaacctggaatcagtctattgcactgcggttagaactgttcggatgcgatatatac

SEQ ID NO: 2359 - protein, 466 aa, Artificial Sequence
  derived and/or modified sequence
MVSQALRLLCLLLGLQGCLAAGGVAKASGGETRDMPWKPGPHRVFVTQEEAHGVLHRRRRANAFLEELRPGSLERECKEEQCSFEEAREIFKDAERTKLFWISYSDGDQCASSPCQNGGSCKDQLQSYICFCLPAFEGRNCETHKDDQLICVNENGGCEQYCSDHTGTKRSCRCHEGYSLLADGVSCTPTVEYPCGKIPILEKRNASKPQGRIVGGKVCPKGECPWQVLLLVNGAQLCGGTLINTIWVVSAAHCFDKIKNWRNLIAVLGEHDLSEHDGDEQSRRVAQVIIPSTYVPGTTNHDIALLRLHQPVVLTDHVVPLCLPERTFSERTLAFVRFSLVSGWGQLLDRGATALELMVLNVPRLMTQDCLQQSRKVGDSPNITEYMFCAGYSDGSKDSCKGDSGGPHATHYRGTWYLTGIVSWGQGCATVGHFGVYTRVSQYIEWLQKLMRSEPRPGVLLRAPFP

SEQ ID NO: 2360 - DNA, 1398 bp, Artificial Sequence
  derived and/or modified sequence
atggtgagccaggccctgcgcctgctgtgcctgctgctgggcctgcagggctgcctggccgccggcggcgtggccaaggccagcggcggcgagacccgcgacatgccctggaagcccggcccccaccgcgtgttcgtgacccaggaggaggcccacggcgtgctgcaccgccgccgccgcgccaacgccttcctggaggagctgcgccccggcagcctggagcgcgagtgcaaggaggagcagtgcagcttcgaggaggcccgcgagatcttcaaggacgccgagcgcaccaagctgttctggatcagctacagcgacggcgaccagtgcgccagcagcccctgccagaacggcggcagctgcaaggaccagctgcagagctacatctgcttctgcctgcccgccttcgagggccgcaactgcgagacccacaaggacgaccagctgatctgcgtgaacgagaacggcggctgcgagcagtactgcagcgaccacaccggcaccaagcgcagctgccgctgccacgagggctacagcctgctggccgacggcgtgagctgcacccccaccgtggagtacccctgcggcaagatccccatcctggagaagcgcaacgccagcaagccccagggccgcatcgtgggcggcaaggtgtgccccaagggcgagtgcccctggcaggtgctgctgctggtgaacggcgcccagctgtgcggcggcaccctgatcaacaccatctgggtggtgagcgccgcccactgcttcgacaagatcaagaactggcgcaacctgatcgccgtgctgggcgagcacgacctgagcgagcacgacggcgacgagcagagccgccgcgtggcccaggtgatcatccccagcacctacgtgcccggcaccaccaaccacgacatcgccctgctgcgcctgcaccagcccgtggtgctgaccgaccacgtggtgcccctgtgcctgcccgagcgcaccttcagcgagcgcaccctggccttcgtgcgcttcagcctggtgagcggctggggccagctgctggaccgcggcgccaccgccctggagctgatggtgctgaacgtgccccgcctgatgacccaggactgcctgcagcagagccgcaaggtgggcgacagccccaacatcaccgagtacatgttctgcgccggctacagcgacggcagcaaggacagctgcaagggcgacagcggcggcccccacgccacccactaccgcggcacctggtacctgaccggcatcgtgagctggggccagggctgcgccaccgtgggccacttcggcgtgtacacccgcgtgagccagtacatcgagtggctgcagaagctgatgcgcagcgagccccgccccggcgtgctgctgcgcgcccccttcccc

SEQ ID NO: 2361 - DNA, 1544 bp, Artificial Sequence
  derived and/or modified sequence
gggaaataagagagaaaagaagagtaagaagaaatataagagccaccatggtcagccaggcactcagactgctctgcctgttgcttgggctgcagggttgcttggccgctgggggagtcgcgaaagcgtcgggtggagaaacgcgggacatgccatggaagcctggaccccatcgcgtattcgtgacacaagaagaagcccacggagtgttgcatagacggcgcagagcaaacgcctttctcgaagagctcagaccggggtcgctcgagagggagtgtaaggaagagcagtgttcctttgaagaagcacgcgaaatcttcaaagacgccgaacgaaccaagctgttttggatctcgtattcagatggagatcagtgtgcctcatcgccgtgtcaaaatgggggaagctgcaaagatcagcttcagagctacatttgcttttgtttgcccgcgttcgaggggcggaactgtgagactcacaaagatgaccaactgatctgcgtcaacgagaatggtgggtgcgagcagtattgctccgaccacaccggcacaaaaagatcatgccgctgtcacgagggatattcgctgctcgcggacggagtcagctgtacgccgacagtcgagtatccatgcggaaagattccgattcttgagaaacgcaatgcctcgaagccccaggggcggatcgtcggtggaaaagtgtgcccgaagggggagtgcccctggcaggtgctcctcttggtgaatggagcccagttgtgtggcggcacgttgatcaatacaatctgggtagtatcggctgcccattgcttcgacaaaatcaaaaactggcgaaacctgattgcggtgctgggtgaacacgacttgtccgagcacgatggggacgagcagtcgaggcgggtagcgcaagtcatcatcccatccacctacgtccctggaacaactaaccacgatattgcactgctcaggctgcaccaacccgtcgtgttgacggatcatgtggtgcccctttgtctccccgagagaaccttcagcgagagaacgttggccttcgtgcggttctcgcttgtgtcggggtgggggcagcttctcgataggggagcgacagctttggaactgatggtactgaacgtaccgaggcttatgacccaagactgtttgcaacagtcgcgcaaggtgggagattcgccgaatatcactgagtacatgttctgtgcgggttactccgacggatcaaaggactcatgcaagggtgatagcggtggtccccatgcgacgcattaccgagggacgtggtaccttacgggaatcgtatcatgggggcagggatgcgcgacggtggggcactttggtgtctacactcgcgtcagccagtatattgagtggttgcagaagttgatgaggagcgaacctcggcctggagtgctgctcagggcaccgtttccttgataagctgccttctgcggggcttgccttctggccatgcccttcttctctcccttgcacctgtacctcttggtctttgaataaagcctgagtaggaag

SEQ ID NO: 2362 - DNA, 1401 bp, Artificial Sequence
  derived and/or modified sequence
atggtgagccaggccctgagactgctgtgcctgctgctgggcctgcagggctgcctggccgccggcggcgtggccaaggccagcggcggcgagaccagagacatgccctggaagcccggcccccacagagtgttcgtgacccaggaggaggcccacggcgtgctgcacagaagaagaagagccaacgccttcctggaggagctgagacccggcagcctggagagagagtgcaaggaggagcagtgcagcttcgaggaggccagagagatcttcaaggacgccgagagaaccaagctgttctggatcagctacagcgacggcgaccagtgcgccagcagcccctgccagaacggcggcagctgcaaggaccagctgcagagctacatctgcttctgcctgcccgccttcgagggcagaaactgcgagacccacaaggacgaccagctgatctgcgtgaacgagaacggcggctgcgagcagtactgcagcgaccacaccggcaccaagagaagctgcagatgccacgagggctacagcctgctggccgacggcgtgagctgcacccccaccgtggagtacccctgcggcaagatccccatcctggagaagagaaacgccagcaagccccagggcagaatcgtgggcggcaaggtgtgccccaagggcgagtgcccctggcaggtgctgctgctggtgaacggcgcccagctgtgcggcggcaccctgatcaacaccatctgggtggtgagcgccgcccactgcttcgacaagatcaagaactggagaaacctgatcgccgtgctgggcgagcacgacctgagcgagcacgacggcgacgagcagagcagaagagtggcccaggtgatcatccccagcacctacgtgcccggcaccaccaaccacgacatcgccctgctgagactgcaccagcccgtggtgctgaccgaccacgtggtgcccctgtgcctgcccgagagaaccttcagcgagagaaccctggccttcgtgagattcagcctggtgagcggctggggccagctgctggacagaggcgccaccgccctggagctgatggtgctgaacgtgcccagactgatgacccaggactgcctgcagcagagcagaaaggtgggcgacagccccaacatcaccgagtacatgttctgcgccggctacagcgacggcagcaaggacagctgcaagggcgacagcggcggcccccacgccacccactacagaggcacctggtacctgaccggcatcgtgagctggggccagggctgcgccaccgtgggccacttcggcgtgtacaccagagtgagccagtacatcgagtggctgcagaagctgatgagaagcgagcccagacccggcgtgctgctgagagcccccttcccctag

SEQ ID NO: 2363 - DNA, 1401 bp, Artificial Sequence
  derived and/or modified sequence
atggtgagccaggcactaaggctgctctgtctacttctcggtttgcaaggctgccttgccgccggcggcgtcgccaaagcgagtggtggggagacccgggatatgccgtggaagccagggccccaccgagtgtttgtgactcaggaagaggcccacggagttctccatcggcgccgacgtgcaaatgctttccttgaggaacttcgaccaggatccctggagcgcgaatgcaaggaggagcaatgttcctttgaggaggccagggagattttcaaagatgccgagcggaccaagcttttctggatctcctatagcgatggcgatcaatgcgcctcttccccttgtcagaacggcggttcttgcaaagaccagctgcagtcctatatctgtttttgcttgccggcattcgagggacgaaactgtgagacccataaagatgatcagctcatctgcgttaatgagaatggggggtgcgaacagtactgcagtgatcacacggggactaagagatcatgtaggtgccacgaaggttactctctcctcgcagacggggtgagttgcacaccaaccgtagaatatccgtgtgggaaaatacctatccttgagaagcggaacgcttcaaaaccacagggaagaatcgtgggaggaaaggtgtgccccaaaggggaatgtccatggcaagtgctgctgctggtgaacggagctcagttatgcggaggaacgctcattaacaccatctgggtagtgagcgcagcccattgttttgataaaattaagaattggcgcaatcttatcgctgtcctcggagaacacgatctgtccgagcatgatggagacgaacagtcaaggcgagtggcacaggtgatcatcccctccacatatgttcctggcacaaccaaccacgacatcgcgctgctgcgcctgcatcagcccgtcgtgctgacggaccatgtggtgcctctctgtctcccagaaagaacattctccgaaaggactctggcttttgtcaggttcagcctcgtatccggttgggggcagttactggatcggggcgcaacagcactggagttgatggtgctcaatgtcccacggctcatgacacaggactgtctacagcagagccgaaaggtgggggatagtcctaatattactgagtacatgttctgtgcaggatattcagatggctccaaggactcatgcaagggcgactctggggggccccacgcgacacactatcgtggaacgtggtatttaacaggcattgttagctggggccagggatgtgccaccgtggggcacttcggcgtatatactagagtttcgcagtatatcgaatggctccagaagctcatgcgatccgaaccaagacccggcgtgttgctccgggccccctttccttag

SEQ ID NO: 2364 - DNA, 3109 bp, Artificial Sequence
  derived and/or modified sequence
tcaacaggcaggggcagcactgcagagatttcatcatggtctcccaggccctcaggctcctctgccttctgcttgggcttcagggctgcctggctgcaggcggggtcgctaaggcctcaggaggagaaacacgggacatgccgtggaagccggggcctcacagagtcttcgtaacccaggaggaagcccacggcgtcctgcaccggcgccggcgcgccaacgcgttcctggaggagctgcggccgggctccctggagagggagtgcaaggaggagcagtgctccttcgaggaggcccgggagatcttcaaggacgcggagaggacgaagctgttctggatttcttacagtgatggggaccagtgtgcctcaagtccatgccagaatgggggctcctgcaaggaccagctccagtcctatatctgcttctgcctccctgccttcgagggccggaactgtgagacgcacaaggatgaccagctgatctgtgtgaacgagaacggcggctgtgagcagtactgcagtgaccacacgggcaccaagcgctcctgtcggtgccacgaggggtactctctgctggcagacggggtgtcctgcacacccacagttgaatatccatgtggaaaaatacctattctagaaaaaagaaatgccagcaaaccccaaggccgaattgtggggggcaaggtgtgccccaaaggggagtgtccatggcaggtcctgttgttggtgaatggagctcagttgtgtggggggaccctgatcaacaccatctgggtggtctccgcggcccactgtttcgacaaaatcaagaactggaggaacctgatcgcggtgctgggcgagcacgacctcagcgagcacgacggggatgagcagagccggcgggtggcgcaggtcatcatccccagcacgtacgtcccgggcaccaccaaccacgacatcgcgctgctccgcctgcaccagcccgtggtcctcactgaccatgtggtgcccctctgcctgcccgaacggacgttctctgagaggacgctggccttcgtgcgcttctcattggtcagcggctggggccagctgctggaccgtggcgccacggccctggagctcatggtcctcaacgtgccccggctgatgacccaggactgcctgcagcagtcacggaaggtgggagactccccaaatatcacggagtacatgttctgtgccggctactcggatggcagcaaggactcctgcaagggggacagtggaggcccacatgccacccactaccggggcacgtggtacctgacgggcatcgtcagctggggccagggctgcgcaaccgtgggccactttggggtgtacaccagggtctcccagtacatcgagtggctgcaaaagctcatgcgctcagagccacgcccaggagtcctcctgcgagccccatttccctagcccagcagccctggcctgtggagagaaagccaaggctgcgtcgaactgtcctggcaccaaatcccatatattcttctgcagttaatggggtagaggagggcatgggagggagggagaggtggggagggagacagagacagaaacagagagagacagagacagagagagactgagggagagactctgaggacatggagagagactcaaagagactccaagattcaaagagactaatagagacacagagatggaatagaaaagatgagaggcagaggcagacaggcgctggacagaggggcaggggagtgccaaggttgtcctggaggcagacagcccagctgagcctccttacctcccttcagccaagcccacctgcacgtgatctgctggcctcaggctgctgctctgccttcattgctggagacagtagaggcatgaacacacatggatgcacacacacacacgccaatgcacacacacagagatatgcacacacacggatgcacacacagatggtcacacagagatacgcaaacacaccgatgcacacgcacatagagatatgcacacacagatgcacacacagatatacacatggatgcacgcacatgccaatgcacgcacacatcagtgcacacggatgcacagagatatgcacacaccgatgtgcgcacacacagatatgcacacacatggatgagcacacacacaccaatgcgcacacacaccgatgtacacacacagatgcacacacagatgcacacacaccgatgctgactccatgtgtgctgtcctctgaaggcggttgtttagctctcacttttctggttcttatccattatcatcttcacttcagacaattcagaagcatcaccatgcatggtggcgaatgcccccaaactctcccccaaatgtatttctcccttcgctgggtgccgggctgcacagactattccccacctgcttcccagcttcacaataaacggctgcgtctcctccgcacacctgtggtgcctgccacccactgggttgcccatgattcatttttggagcccccggtgctcatcctctgagatgctcttttctttcacaattttcaacatcactgaaatgaaccctcacatggaagctattttttaaaaacaaaagctgtttgatagatgtttgaggctgtagctcccaggatcctgtggaattggatgttctctccctgccacagcccttgtcaatgatatttcacagagaccctgggagcacctgctcaagagtcagggacacacgcatcactaaatgcaagttcccaggccctggctgcagtgggaggacctggcaagctgcactcttgctgagtccccagggtggtggaagaagaatgagaaacacatgaacagagaaatggggaggtgacaaacagtgcccccactcagactccggcaagcacggctcagagagtggactcgatgccatccctgcagggccgtcctgggcaccactggcactcacagcagcaaggtgggcaccattggcactcacagcagcaaggcaggcaccagcaacccacctcgggggcactcaggcatcatctacttcagagcagacagggtctatgaactacagccgtgggctgcttccaaggcaccctgctcttgtaaataaagttttatgggaacaca

SEQ ID NO: 2365 - DNA, 1401 bp, Artificial Sequence
  derived and/or modified sequence
atggtgtcccaggccctgcggctgctgtgcctgctgctgggcctgcagggctgcctggccgccggcggcgtggccaaggccagcggcggggagacccgggacatgccctggaagccaggcccccaccgggtgtttgtgacccaggaggaggcccacggcgtgctgcacagaagaagaagagccaatgccttcctggaggagctgcggcccggcagcctggagcgggagtgcaaggaggagcagtgcagctttgaggaggcccgggagatcttcaaggatgctgagaggaccaagctgttctggatctcctacagtgatggagaccagtgtgccagcagcccctgccagaatggaggcagctgcaaggaccagctgcagagctacatctgcttctgcctgcctgcctttgagggcaggaactgtgagacccacaaggatgaccagctgatctgtgtgaatgaaaatggaggctgtgagcagtactgcagcgaccacacaggcaccaagaggagctgccgctgccacgagggctacagcctgctggctgatggagtgtcctgcacccccaccgtggagtacccctgtgggaagatccccatcctggagaagagaaatgccagcaagccccagggcagaattgtgggcggcaaggtgtgccccaagggagaatgtccctggcaggtgctgctgctggtgaatggagcccagctgtgtggcggcaccctcatcaacaccatctgggtggtgtctgctgcccactgctttgacaagatcaagaactggaggaacctgattgctgtgctgggggagcatgacctgtctgaacatgatggagatgagcagagcagaagagtggcccaggtgatcatccccagcacctacgtgcccggcaccaccaaccacgacatcgccctgctgcggctgcaccagcctgtggtgctgacagaccacgtggtgcccctgtgcctgcctgagaggaccttcagcgagaggaccctggcctttgtgcgcttcagcctggtgtctggctggggccagctgctggacagaggagccacagccctggagctgatggtgctgaatgtgccccggctgatgacccaggactgcctgcagcagagcaggaaggtgggggacagccccaacatcacagagtacatgttctgtgccggctacagtgatggcagcaaggacagctgcaagggggacagcggcggcccccacgccacccactaccggggcacctggtacctgactggaattgtgtcctggggccagggctgtgccaccgtgggccactttggagtgtacaccagggtgtcccagtacatcgagtggctgcagaagctgatgaggtctgagcccaggcctggggtgctgctgcgggcccccttcccctag

SEQ ID NO: 2366 - DNA, 1401 bp, Artificial Sequence
  derived and/or modified sequence
atggtgagccaggccctgcggctgctgtgcctgctgctgggcctgcaggggtgtctggcagccggtggtgtcgccaaggcgtccggtggggagacaagggatatgccatggaagcctggtcctcatagggttttcgtgacacaagaggaggcacacggcgtgctgcatcgccggcgccgtgctaacgcatttctggaagagttaagacctggctccctggaaagggagtgcaaggaagaacaatgttcattcgaggaagccagggaaatctttaaggatgccgagagaacaaagttgttctggatttcatacagcgacggggatcagtgcgcttcctctccatgccagaacggaggtagttgtaaggaccagctgcagtcgtatatttgcttttgcctgccagcgtttgaagggcggaattgcgagacgcataaagacgatcagctaatatgtgtcaacgagaacggaggttgcgagcagtactgcagcgaccacacgggaacaaaaagatcttgcaggtgccatgaaggctatagtcttctcgcagatggcgtttcctgtacgccgacagtggaatacccttgtgggaagatacctattcttgaaaaaagaaacgcctctaagccacaaggcagaatcgtcggaggtaaggtttgccctaaaggagagtgtccatggcaggtgctgctactggtgaatggagcccagctgtgcggggggactctgattaacaccatctgggtggtttccgcagcccactgctttgacaaaattaaaaactggcgtaatttgatcgcagtgctcggagaacacgacctgagtgagcatgatggcgatgagcagtcaaggcgggtggctcaggtcatcattccttcgacctatgtgccaggaaccacaaaccacgacatcgccttgctgagacttcaccagccggtggtcctgaccgatcatgtggtgccactatgtctgcctgaaaggaccttcagtgaacggaccctggcctttgtccgtttctccctggtctccggctgggggcaactattagatcgaggtgccaccgccctggagctcatggtgctcaacgtgcccaggctgatgacacaggactgcttgcagcagagccgcaaagtgggcgactcccccaacataacagagtatatgttctgcgcaggctactcggacggatcgaaggatagttgtaagggagatagtggcgggcctcacgccacacactacagaggcacttggtatctaactggtattgtgtcttggggccaaggctgcgccaccgtggggcatttcggcgtttatacgcgcgtgagtcagtatattgaatggctccagaaactgatgagatctgagcccagacccggcgtcctccttagagcacctttcccatag

SEQ ID NO: 2367 - DNA, 1401 bp, Artificial Sequence
  derived and/or modified sequence
atggtgtcccaggcactgagactcctttgcttgcttctgggcctgcagggttgtctggccgcaggcggagtggccaaagcctcaggcggtgaaacacgcgatatgccttggaagcccggaccacaccgggtgttcgtgactcaggaggaggcccacggtgtgctacacagacgcaggagagccaatgccttcctggaagaactgcgtcctggatcactggaaagagaatgtaaagaggaacagtgttcattcgaagaggccagggagatcttcaaagatgctgaaaggactaaattattctggatttcgtacagtgacggggatcagtgtgcgtcctccccatgccagaacggaggatcatgcaaagaccagcttcagtcctacatctgcttttgcctgccagcctttgagggcagaaattgcgagacgcacaaggacgatcagctgatatgcgtgaacgaaaacggtggttgcgaacaatactgctcagatcatactggtactaagagatcttgtcggtgtcacgaggggtacagcctgctggcagacggcgtatcttgcacgcccacagtagagtatccatgcgggaaaatccccatactggagaaacggaatgccagcaagccacaagggcgtattgtgggaggtaaggtgtgccccaaaggcgagtgcccttggcaggtgctgctgttagtcaatggtgcacagctgtgtggcggtacccttatcaacacaatctgggttgttagtgcggcacactgctttgacaagattaagaactggcgaaacctgattgcggtgctcggcgagcacgatctttccgagcacgatggagatgaacagagtaggcgagtcgcacaggtgatcatcccctcaacatacgtgcccggaactacaaatcatgacattgcgttactgcggttgcatcagcctgtcgtgctaaccgaccacgtggtgccactctgtcttcctgagcgcactttttctgagcggacactggctttcgtgcggttctcgttagttagcggctggggccaactccttgataggggggctaccgctctcgaacttatggtattgaacgtacctagactgatgacacaagattgtctgcaacagtcaagaaaagtgggagactcacctaacatcactgagtacatgttttgtgccggatacagcgatggaagcaaggattcttgtaaaggtgactctggaggacctcatgctactcactaccggggaacatggtaccttactggtatcgttagttgggggcagggatgtgccaccgtaggccatttcggagtctacactagagtgagtcagtacattgagtggctacaaaaactgatgcggagtgaaccccgaccaggggttcttttgagggccccattcccatag

SEQ ID NO: 2368 - DNA, 1401 bp, Artificial Sequence
  derived and/or modified sequence
atggtgtcgcaggctttgagactactatgcctcttactgggcctgcagggctgccttgccgccggcggagtagccaaggcaagcgggggagagacgagagacatgccctggaagccaggcccacatagagtgttcgtgactcaggaagaggcccatggcgtgctacaccgcaggagacgtgctaatgcctttctggaagagctcagaccggggagcctggagcgagagtgcaaggaggaacagtgcagttttgaagaagcaagggagatctttaaagacgcagaacggaccaagcttttttggatatcgtacagcgatggagaccagtgcgctagctctccctgccaaaacggaggatcttgcaaggaccagcttcagtcctatatatgtttttgtttgcctgctttcgagggacgcaactgcgagacccataaggatgatcagttgatctgtgttaatgagaatggtggatgcgaacagtactgtagcgatcacacggggaccaaacggtcgtgccggtgccatgaaggctattctctgttagcagacggagtttcatgcactcccaccgtggagtacccttgcggaaagatccccattttggagaagcggaatgcctccaaaccacagggaaggatcgtgggtggaaaagtgtgtccaaaaggtgaatgcccttggcaggttctcttactggtaaatggcgcacagctgtgtggaggcaccttgatcaacacgatttgggttgtctccgccgcccactgtttcgacaaaatcaagaactggagaaaccttattgcagtgctaggagaacatgacctgtctgagcacgatggagacgaacagtcacgcagggtcgcccaagtgatcatcccaagtacttatgtccccgggactaccaatcacgacatcgccctgctaaggctacaccagcccgtggtgctgactgatcacgtcgtgcctctctgtcttcccgagcggacatttagtgagaggaccctggcgttcgtgcgcttttccttggtgagtgggtggggccagttgttggataggggggcgactgcacttgaactaatggtattaaatgtgcctcgactcatgacgcaggactgcctccaacagtctagaaaggttggcgactcaccgaacatcaccgaatacatgttctgcgctggctactctgatggatccaaagattcttgcaagggagatagcggcgggcctcacgcaacacattacagaggaacatggtacctaactggaatcgtctcttggggacagggctgtgctaccgttgggcacttcggcgtgtacaccagggtgtctcaatacattgagtggttacaaaagctgatgagatcagagcctagacctggcgtgttgttaagggcccctttcccttag

SEQ ID NO: 2369 - DNA, 1401 bp, Artificial Sequence
  derived and/or modified sequence
atggtcagtcaagccctcaggttgctctgtttattgctgggattgcagggttgcctggctgctggaggggttgccaaagcctcaggaggagaaaccagagacatgccctggaaaccggggccacaccgcgtgttcgtgacccaagaagaggcccacggggtgcttcacaggcgaaggagggcaaatgcctttctcgaggagctccggccgggatcactggaacgggaatgtaaagaagaacagtgttcatttgaggaagccagagagatttttaaggacgccgaacgcaccaagttattttggatttcctattccgacggagaccagtgtgcgtccagcccttgccaaaatggtggatcttgtaaagaccagctgcagagctatatatgcttttgtcttcctgccttcgagggccgtaattgcgagactcataaagacgaccaattaatatgtgtgaatgagaacggagggtgcgaacaatactgctcagaccatacaggaacaaagcgaagttgccggtgtcatgaggggtatagtttgttagcggacggagtgagttgcacccctacagtagaatatccctgtggcaagatccccatcctggaaaagagaaacgcctccaagcctcaaggcagaattgtgggaggaaaggtgtgccccaaaggggagtgtccttggcaagtcctgcttctggttaatggagctcaactatgcggaggaactctcatcaacacgatttgggtagttagcgccgctcactgtttcgataagataaaaaattggcggaatctgattgctgtgcttggcgagcatgacctaagtgaacatgacggagatgaacagagtaggcgagtggcacaagtgataataccaagtacttacgttcctggcaccacaaaccacgatatcgccctgctaaggctgcaccagccagtagtgttgaccgaccacgttgttcccctttgcctcccagaaaggacattctccgaaagaaccttggcgtttgtgagattctcactagtgtccggatggggtcaactgctggacaggggggccaccgcactggaattaatggttttaaacgtgccccgtctcatgacgcaggactgtctgcaacaatcaagaaaagttggcgatagccctaatataaccgagtatatgttttgtgctggttattctgacgggtcaaaagacagctgtaagggagattccgggggtccccatgctacccattatagaggaacgtggtacttgacagggattgtaagttggggacaaggctgtgctactgtgggacattttggagtttacaccagggtatctcaatatatcgagtggctgcagaagctgatgaggagtgaacctcggccgggtgtgctgctgagagctcccttcccatag

SEQ ID NO: 2370 - DNA, 1398 bp, Artificial Sequence
  derived and/or modified sequence
atggtgagccaggctctgcggctgctgtgccttctgctgggcctgcaagggtgcctcgcagctggaggagtggccaaagccagcggcggggagactcgggacatgccgtggaaaccggggccgcaccgcgttttcgtgacccaggaggaggcacacggcgtcctgcaccgccggcggcgcgcgaacgcgtttctggaagaactgaggccaggatcactcgagcgagaatgtaaggaagaacagtgctcgtttgaagaagcccgcgagatcttcaaggacgccgagcgcaccaagctcttctggatttcctactccgacggcgatcagtgcgcctcgagcccgtgccaaaacggaggatcatgcaaggaccagctccagtcatacatctgcttctgtctgccagcattcgagggccgcaactgcgaaacccacaaggatgaccagctgatctgcgtcaatgagaacggggggtgtgaacaatactgctcagaccataccggcactaaaaggtcatgccgctgccacgaggggtactcgctgctggcggatggcgtgtcctgtacgccgactgtcgaatacccgtgtggaaaaatccccatcctggagaaaagaaatgcctcgaagccgcaaggtcgcatcgtgggcggaaaggtgtgtcctaaaggagaatgcccctggcaggtgctgttgctcgttaacggagcccagttgtgcggcggcaccctgatcaacactatctgggtcgtgtccgcagcccactgctttgataagatcaagaattggcggaacttgatcgctgtgctgggggagcatgatctctcagagcatgacggagatgaacagtcacgcagagtggcacaggtcatcatcccgagcacttacgtgccgggaactactaaccatgatatcgccctgttgcggctgcatcagccggtggtgcttactgaccatgtggttccgctctgcctcccagaacggaccttttcggagcgaactctcgcatttgtccgcttctcactcgtgtccggatggggccagctgcttgaccgcggagccaccgctctcgaactgatggtcctcaatgtgcctagactgatgactcaggactgcctgcaacagtcgagaaaggtgggagactcgccgaatatcactgaatacatgttttgcgcaggatactcggacggctctaaagactcctgcaaaggtgattcaggcggcccccacgctacccactaccgcggaacctggtacctgaccggaatcgtgtcgtgggggcaggggtgcgctactgtcggtcactttggtgtatatactcgggtgtcgcagtacatcgagtggctccagaaattgatgcgcagcgaaccgcggccaggagtgctcctccgcgctccattcccg

SEQ ID NO: 2371 - DNA, 1398 bp, Artificial Sequence
  derived and/or modified sequence
atggtcagtcaggctctgagactgctttgtttgttgctgggcctacaggggtgcctcgccgccggcggcgtggctaaagcgagtggcggggaaaccagagacatgccatggaaacccggcccacatagagtgttcgttacgcaggaggaagctcacggcgtgctccatagacgtaggagagccaatgccttcttagaagaacttcgtccaggctctctggagagggagtgcaaggaggaacagtgctccttcgaagaggctcgcgagatctttaaggacgccgaaaggacgaaactgttttggatatcttatagcgacggagaccagtgtgctagctctccctgccagaacggcggttcatgcaaagatcagttacagtcctacatttgtttttgcctgcccgccttcgagggcaggaactgtgagacacacaaggacgatcagttgatttgcgtgaacgagaatggtgggtgcgaacagtattgcagtgaccacaccggcacgaagcggtcttgccggtgccatgaaggctactctctgctggctgatggggtttcctgcacccctaccgtagagtatccatgcggcaagattcccattctcgaaaagagaaacgcatccaaaccccaggggcgtatcgtcggtggaaaagtctgtcctaagggagaatgtccctggcaggtgctgcttctggtgaatggcgcacagctttgcggtggaaccctcatcaacactatctgggtggtgagcgcagcccactgcttcgacaagataaaaaattggcgtaacctcattgccgtgctgggcgaacacgatctcagcgaacatgatggcgatgaacagtcccgccgcgtcgctcaagtgattataccctctacatatgttcccggtactacaaaccatgacatcgccttacttaggctccaccagcccgtggtcctgaccgatcacgtggtcccattgtgcttgcccgagcgcaccttcagcgagagaaccctggcctttgttcgattcagcctggtgtccggttggggtcagctgctcgaccggggcgccaccgcactggagctcatggtcctgaatgtacccagactgatgacacaggactgcctccaacagtcccggaaagtcggtgactcccctaatatcaccgagtatatgttttgcgcggggtacagtgatggttcgaaggactcctgcaaaggcgactccggagggccgcacgccacgcattaccgggggacctggtatctgaccggcatagtatcttgggggcaggggtgcgctaccgtcggccactttggagtgtacacacgcgtgtctcagtatattgagtggctccagaagcttatgcggtctgaacctagacctggggtgctgttgagagcgcctttccca

SEQ ID NO: 2372 - DNA, 1398 bp, Artificial Sequence
  derived and/or modified sequence
atggtgtcccaggccctcagactcctgtgcctgctcctgggattgcagggatgtctcgcagccgggggagttgctaaagcgagcgggggcgaaaccagagatatgccctggaaaccaggtccacatcgggtgtttgttactcaggaggaagctcatggggtactccacagaagaaggagagccaatgcttttctcgaagagctgcggcccggttccttggagagggaatgtaaagaagagcaatgctcctttgaggaggcccgagagatttttaaagacgctgaacggacaaagctgttctggattagctactccgacggagatcagtgtgctagctctccctgccaaaacggcggcagttgcaaagatcaactgcagtcttacatatgtttctgtttgccagccttcgaaggccgaaactgtgagacacataaggacgatcaactgatctgcgtgaacgagaacggaggttgcgagcagtactgttcagatcacaccggcaccaaaaggagttgtcgatgccacgaagggtactcactcctcgcggatggagtgtcttgtacgcccaccgtcgagtatccatgcgggaagattcccatactcgagaaacgcaacgcgtccaagcctcagggccggatcgtgggcggcaaggtttgcccgaagggagagtgcccctggcaggtgctgctgttggtgaacggggcgcagctgtgcggaggtaccctgattaacaccatatgggttgtcagtgcagcacactgttttgataagatcaagaactggagaaatctcattgccgttctgggggaacacgatcttagcgagcacgacggagacgagcagtctaggagggtggcccaggtgattataccgtctacctacgtgcctggcacgacaaaccacgacatcgctctgctccgattgcaccagccagttgtgctcacagaccacgttgtgcccctgtgcctccctgaacggacattctccgaaaggacgctggcgttcgtcaggttcagtctggtgtccggttgggggcaactgctcgatcgcggagccacagccctggagctcatggtgttgaacgtgccaagactgatgacccaagactgtctgcagcaaagtagaaaagtcggggactcccccaacattaccgagtacatgttctgcgcaggatattcagacggttccaaagactcctgtaaaggagactctggtggtccgcacgcaacccattacaggggtacttggtatttgaccgggattgtgagttgggggcagggctgcgccaccgttggccactttggagtgtatacgcgagtcagccagtatatcgaatggctgcagaagctgatgaggtcagagccgcggcccggggttctgctgagggctcccttcccg

SEQ ID NO: 2373 - DNA, 1398 bp, Artificial Sequence
  derived and/or modified sequence
atggtgtctcaggccctccgtttgctttgccttctgctgggcctgcaaggctgcttggcggccggaggagttgcaaaggcttctggaggcgaaaccagggacatgccatggaaaccaggcccacaccgcgtatttgtcactcaggaagaagctcacggcgtgcttcatcgcaggagaagagctaatgcatttctggaggaactgaggcccggctctctggagagggagtgtaaagaggaacagtgctcgttcgaggaggcccgagaaatctttaaggacgctgagcgaactaagttattttggatctcttatagtgatggggaccagtgcgctagcagcccttgtcagaatggcggttcgtgcaaggatcaactgcagtcatacatctgtttctgcctgcccgctttcgagggcagaaattgtgagacgcataaggacgatcaactgatctgcgtcaatgaaaatggaggttgtgagcaatactgctccgatcacactggtactaagcgcagctgtcggtgccacgagggatactccctattggctgatggagtgagctgtactccaactgtggaatatccatgtggtaaaataccgattctggagaaacgcaatgcatccaaaccccaggggcgcatcgtggggggaaaggtgtgccctaaaggggaatgcccgtggcaggtcctgctgctcgtgaacggtgcccagctatgtggggggacactcatcaatactatttgggtggtgagcgcagcgcattgtttcgataagatcaaaaactggcgcaacttaatcgctgtgctgggagagcacgacttaagtgagcatgacggcgacgagcagtcgcggcgcgtggcccaggtaataattccctccacgtatgtgcccggcacaacaaaccatgatatagcgctgttgagactgcaccaaccagttgtgctgactgatcacgtggtacctctatgccttccagagcgcaccttctccgagcgcacgttagccttcgtgaggttttcgctggtttccggatggggacaactgttagaccgaggtgccactgctctcgaactgatggttttaaacgtccctcggctgatgacacaggactgcctccagcagtcacggaaggtgggggattccccaaacattaccgaatatatgttctgcgccggctattctgatggatccaaagattcttgcaaaggcgacagcggcggtcctcacgctactcattatagagggacttggtatttgacgggaatcgtatcctggggacagggctgcgccacagtaggccatttcggcgtgtataccagagtttcccaatatatcgaatggctgcagaaattgatgcgtagcgagccgcgtccaggtgtgctactccgtgccccattccct

SEQ ID NO: 2374 - DNA, 1398 bp, Artificial Sequence
  derived and/or modified sequence
atggtgtcccaggccctccggctcctgtgccttttgctggggttgcagggatgcctggccgcgggaggagtcgccaaagcctcgggcggagaaaccagagacatgccgtggaagcctggcccgcatcgggtgttcgtgacccaagaagaagcccatggagtgctgcaccgccgtagaagagcaaatgcgtttctggaggagctgcgccctggatcattggaacgcgagtgcaaggaagaacagtgttcgtttgaagaagcaagggagattttcaaggacgcagaaaggaccaaattgttctggatctcctactctgatggcgatcaatgcgcatctagcccatgtcagaacggaggatcgtgcaaagaccagctccagtcatatatctgtttctgcctgcctgctttcgaaggccgcaactgcgagactcacaaagacgaccagctcatttgtgtcaacgaaaatggagggtgcgagcaatactgctccgaccataccggcactaagaggtcgtgtcggtgccacgaaggctactcactgctcgccgacggagtgtcctgcacgccgactgtggaatacccatgcggcaagataccgatcctggagaaacggaacgcctcaaagccgcagggccggatcgtcggtggaaaggtgtgtcccaagggagagtgcccgtggcaggtactgctgctggtgaatggcgcccaactgtgtggtggaaccctgatcaacactatttgggtcgtgtccgcagcgcactgtttcgacaagatcaagaactggcggaatttgatcgctgtcctcggggagcacgacctgtcagagcacgacggcgatgagcagagccgtcgggtggcgcaggtgatcatcccatccacttacgttcccggtactactaatcacgacatcgcactcctgcggctgcatcagcctgtggtcttgacggatcacgtggtcccgctctgcctgccggaacggaccttttccgagcgcaccctcgcttttgtccgcttcagcctcgtgagcgggtgggggcaattgctggatcgcggcgccacggcgttggagcttatggttctgaacgtgccgcgactgatgacccaagactgtctccagcaatcaaggaaggtgggagattcccctaacatcacggaatacatgttctgcgccggatactcagacggatcgaaggatagctgcaaaggtgatagcggaggtccacatgcgacccactaccggggcacttggtacctgaccggaatcgtgtcctggggacagggctgcgctaccgtgggacatttcggagtatatactagagtgtcccaatacattgaatggcttcaaaaacttatgagaagcgaaccaaggccaggggtactgttgcgagcgcccttccca

SEQ ID NO: 2375 - DNA, 1398 bp, Artificial Sequence
  derived and/or modified sequence
atggtgtcacaagctctccgattactctgtctcctcctgggcctgcaggggtgtctagctgcaggaggcgttgcaaaggcctctggaggtgagacacgtgacatgccttggaaaccggggccccatagagttttcgtcactcaggaagaggcccatggcgtcctccatcggcgccgccgcgcgaatgctttcctggaagagctgcgccccggttccctggagcgggaatgcaaagaagagcaatgtagctttgaagaggcccgggagatttttaaggacgccgagcgaactaaactgttctggattagttacagcgacggcgatcaatgtgcctcgtcaccatgccagaacggtggcagctgcaaagaccagttacagtcctacatatgtttctgcctccccgcttttgaaggccggaactgtgaaacccataaagatgatcaactcatttgtgtgaacgaaaatgggggatgtgagcaatactgcagtgatcatacaggtaccaagcgttcatgccgctgccatgagggttatagtctactagcagatggtgtaagctgcacccccacggtagagtacccttgcggcaaaattcccatcttagaaaaacgaaatgcaagcaaaccacagggtcgcattgtcggcggcaaggtctgtccgaagggagaatgtccctggcaggtcttattgctcgtaaatggcgcacagctgtgtgggggaaccctcatcaacactatttgggtagtctctgcagcacactgttttgacaagattaaaaactggcgcaatttgatcgctgtgttgggtgagcatgatctgtcagagcacgatggcgatgagcagtcacggagagtcgctcaggtgatcatcccgagtacctacgttccaggaacaacaaaccatgacatcgcgttgctaaggctacaccagcctgtcgttctgactgatcatgtggtcccgttgtgcctcccggagcgcacattcagcgagaggaccctggcgttcgttcgtttcagcctcgtctctgggtggggacagctactagatagaggggccaccgctttggagttaatggtacttaatgtcccgaggctgatgactcaagattgtttacagcagtccagaaaagttggggattcacccaatatcaccgagtatatgttctgtgcggggtactcagatggtagcaaggacagttgtaagggtgattcaggtggcccccacgctacccattacagaggtacctggtatcttactgggatcgtgtcgtggggacaggggtgtgccactgtcggacactttggagtatacacccgcgtgagccaatacattgaatggcttcaaaagctaatgcgttccgagccgagacctggagtattgctccgtgctccctttcct

SEQ ID NO: 2376 - DNA, 1398 bp, Artificial Sequence
  derived and/or modified sequence
atggtgtctcaggcactcagactgctgtgtctgttgctaggactccagggctgtctggctgctggaggagtcgctaaagcttccggaggagaaacccgggacatgccctggaagccgggaccacacagagttttcgtaacacaagaggaagcacacggcgtgctgcaccggcgcagaagagcaaacgctttcctcgaagaactcaggcccggatcactggagagggagtgtaaagaggagcagtgctcctttgaggaagcaagggaaatcttcaaggacgcagagagaaccaagctcttttggataagctactcagacggcgatcagtgcgcttcttcgccctgtcagaacggcggctcatgcaaggaccaactacagagttatatttgtttttgtctgccagcctttgaaggtagaaattgcgagacccataaagatgatcagttgatttgcgtgaatgagaacggggggtgcgagcagtattgctctgaccatactggaaccaaacggtcttgccggtgccacgagggctacagccttttagcagacggcgtgagttgcacgcctactgtggagtacccgtgcggcaagatccccattctggaaaaaaggaacgcttcaaagccccaagggcgcatcgtgggtggcaaggtgtgccccaagggcgagtgcccttggcaagtgctgctcttagtgaatggggctcaactctgtggcgggacactaatcaacacaatctgggtggttagtgcggcccattgtttcgacaaaatcaaaaattggagaaatctcatcgcagtgcttggagaacacgacttatctgagcacgatggggacgagcagagtaggagagtagctcaggtgatcatcccatccacttacgttcccggcacaaccaaccatgacatcgccctgctgagattgcatcagccagtggtgctgactgaccatgtagtccccctctgcttgccagaacggacattttccgaaagaacactagcattcgtgcggttttcacttgtgtccggatggggccagctacttgatcgcggagccaccgccctcgaactgatggtcctcaatgtgcctcggctgatgacccaggattgcctccagcagtctcgcaaagtgggggattcacctaacatcaccgagtacatgttctgcgctggctatagcgacggaagcaaagactcctgtaaaggcgactctggaggacctcacgccacacactatcgggggacttggtacttaacaggcatagtgagttggggccagggctgcgctacagtgggtcatttcggagtttacacaagagtctcacagtacatagaatggttacagaagctcatgcggtctgagcctcgtccaggagttctgctgagggcccctttcccc

SEQ ID NO: 2377 - DNA, 1398 bp, Artificial Sequence
  derived and/or modified sequence
atggtctcacaagctctgcgtttgctctgcctgctcctggggctgcagggttgtcttgccgctggcggagtggccaaggcgagcggaggggagactagagacatgccctggaagcctggacctcatcgggtgttcgtgacacaggaagaggcccacggagtgctgcatcgcaggcgtcgggcgaacgctttcctggaagagctgaggcccgggtcccttgaaagggagtgcaaggaggagcagtgtagttttgaagaagctcgggaaatttttaaggacgcggagcgcacgaagctcttttggataagctactctgatggcgaccagtgtgctagctcaccctgtcaaaatggaggctcctgcaaggaccagctacagtcatacatatgcttttgtttgcccgcgttcgagggcaggaattgtgaaacccacaaggacgatcagctgatatgcgtcaacgagaatggtgggtgcgagcagtactgctcagatcacaccgggacaaaacgttcttgccggtgccacgaaggctattccctgttggcggacggagtaagctgtaccccgacagtggagtatccgtgcggaaaaatacccatactggaaaagagaaacgcaagcaagcctcaggggcgcatcgtagggggtaaggtgtgtcctaagggtgaatgtccgtggcaggtcttgttgctggtaaacggagcacagttgtgcggaggtacgctcataaacaccatttgggtcgtgagtgccgctcattgcttcgataagattaaaaactggaggaacttgattgccgttctcggggagcatgatttatcagaacacgatggggacgagcagagtcggcgggtggctcaggtcattatacccagcacatacgtgccaggtactacaaatcacgatatcgctctgcttaggttgcaccagcccgtagtcctaactgatcatgtggtacctctgtgtctacctgaacggacgtttagcgagcggacactggccttcgtccggttcagtctggtgtccgggtggggccaattactggacagaggtgctactgcacttgagttgatggtgctgaatgtgcctcgcctcatgactcaggactgcctgcaacagtcccgcaaagtcggggactctcccaatatcacagagtacatgttttgcgccggctatagcgacggctccaaggattcttgcaagggcgattcaggcggaccccatgccacccactacagggggacatggtatttgactggcatagtctcatggggccagggatgtgcaacagtcgggcattttggcgtctatacaagagtgagtcagtacatcgagtggttacaaaagttaatgcgcagcgaacctcggccgggggttctgctgagggcgccgttccct

SEQ ID NO: 2378 - DNA, 1398 bp, Artificial Sequence
  derived and/or modified sequence
atggtgtctcaggccttgcggctcttgtgtttgctgctgggactgcaagggtgcctcgcggcaggaggcgtggcaaaggccagcggaggagaaacgcgcgacatgccatggaagcctggaccgcaccgcgtctttgtcacccaagaagaggcacacggagttctgcatcgcaggagacgggcgaacgcattcttggaagagctgcggccggggagcctcgaacgcgaatgcaaggaagaacaatgctcgttcgaggaggcaagagagatcttcaaggacgctgaacggactaagctgttctggatctcctacagcgacggggaccagtgcgcatcctccccatgccaaaatggtggctcctgcaaagaccagttgcagtcctacatatgtttttgcctcccagctttcgaaggaaggaactgcgaaacccacaaggatgatcaactgatctgtgtgaacgagaatggcggatgtgagcaatactgttccgaccatactggcaccaaaaggtcttgcagatgccatgagggatattcgctcctggccgacggagtgagctgcacgcctactgtggaatacccctgtggaaagattccaatcctggaaaagcggaacgccagtaagccccaaggccgcatcgtgggtggcaaggtgtgcccgaaaggagagtgcccgtggcaggtactgctgctggtcaatggagcgcagctttgtggaggaactcttatcaacaccatttgggtcgtttccgcggcgcactgcttcgataagatcaaaaactggagaaatctcattgcggtcctgggtgaacacgatctcagcgaacatgacggagacgagcagtcacggcgcgtggcacaggtgatcatcccgtcgacttacgtgccaggaaccaccaaccacgacatcgcgctgctgcggcttcatcaacccgtcgtgctgactgatcatgtggtgccgctttgcctgccggagagaaccttctcggaacggaccctggccttcgttcgcttttcactcgtgagcggctggggacaactgctggatcggggtgcgacggcgctcgagctgatggtgctcaatgtgcctcggctgatgactcaagactgcctgcaacagagcagaaaggtgggagactcgccgaacattactgaatacatgttttgtgcggggtatagtgacggatcaaaagattcgtgtaaaggagactcgggtggacctcatgcaacgcactacaggggaacctggtacctgacgggtatcgtgtcctggggtcagggctgcgcaaccgtgggacacttcggtgtctacacgcgggtgtcacagtacatagaatggctgcagaagctgatgcgctcagagccacggcccggagtgctgttgagggccccattcccg

SEQ ID NO: 2379 - DNA, 1398 bp, Artificial Sequence
  derived and/or modified sequence
atggtatcacaggccctgaggctgttatgtctgctcttggggctgcaggggtgccttgctgcaggcggtgtagccaaagccagcggaggggaaactcgggatatgccttggaaaccaggaccacatagagtgttcgtcacccaggaggaggctcacggggtcctgcatcggcgcagacgggctaacgcctttctggaggaattgcgacccggtagcctcgagcgcgaatgcaaagaggagcagtgcagctttgaagaggctagagaaatctttaaagatgctgagagaaccaagctcttctggatttcctactccgatggcgaccagtgcgccagcagcccgtgtcagaacggtggatcctgcaaggaccagctgcagtcttacatttgcttctgtctcccggcattcgagggaagaaactgtgaaacccacaaagatgaccagttgatctgcgtaaatgaaaacggagggtgtgagcagtactgctcggatcataccggaaccaagcgctcctgtagatgccacgagggttactcactattggcagatggcgttagttgcacaccgacagtggaatatccctgcggcaagatccctatcctggagaagcgaaacgcctcgaagccacagggccgtattgtgggcggcaaggtgtgtcctaagggagaatgcccttggcaggtcctcctgctcgtaaacggcgcacagctgtgcgggggaacactgatcaacacaatctgggtggtgagtgcggcccactgcttcgataagatcaaaaattggaggaacctgatcgcagtgcttggggagcacgacctgtctgaacacgacggtgatgagcagagcaggcgtgtggctcaggtaataatccctagcacttacgttccaggaacaactaatcatgatatagcactgcttaggctgcatcagccggtagtgttaaccgaccacgtagttccgttgtgtctgcccgaaagaaccttcagtgagagaacacttgcatttgttcgtttcagcctggtcagcggctggggtcagctcctcgacaggggcgccacagctctggaactgatggtactcaatgtccctaggcttatgactcaggactgtctgcaacagagtagaaaggttggagatagtcctaatatcacagagtacatgttctgtgccggctactcagatggtagcaaagattcttgcaaaggcgacagtgggggcccacatgccacacactacaggggtacctggtacttaaccgggatcgtttcatgggggcagggatgcgcgactgtgggccacttcggggtctacacacgcgtttcgcagtacattgagtggcttcagaaactgatgcgcagcgagccaagacccggtgtgctgttgagggctcccttccca

SEQ ID NO: 2380 - DNA, 1398 bp, Artificial Sequence
  derived and/or modified sequence
atggttagccaggctttgcgcctcctgtgtttactcttggggttgcaggggtgcttggcggccgggggcgtggctaaagctagtggcggagagacaagagatatgccctggaagcccgggccacaccgcgtattcgttactcaggaggaggcccacggagttctacaccgccggaggcgagccaatgccttcctggaagagctccggccggggtctttggagagagagtgcaaggaggagcagtgtagcttcgaagaagcaagagagatcttcaaggacgcagaacggacaaaactcttttggattagttactctgatggagaccagtgcgcctcgtccccctgtcaaaatggcggctcatgcaaggatcagctacagtcctacatttgcttctgtttgccagctttcgagggacggaattgtgaaacccacaaagacgaccagctgatttgtgttaatgagaacggaggctgcgaacagtactgcagcgaccacaccggcaccaaaaggtcttgtcggtgccacgagggatactccctgctcgccgacggagtctcctgtacccctactgtggagtatccttgcggtaagatccccattttggagaaacgtaacgcatcaaaaccacagggccgcattgtgggagggaaggtctgcccaaagggagagtgcccatggcaggtcttgttgctcgtgaatggagcacagctgtgtggagggacgctcatcaacacaatctgggtggtatctgccgcccactgttttgacaaaattaagaattggaggaatttgattgcggtgttaggtgagcacgacctttctgagcatgatggtgatgagcagtcacggcgcgtagcccaggtaattatcccctccacctacgtgccgggaaccaccaaccacgacatagcgctgttgaggctacaccagccggtggtcctcacggatcacgttgtgcctctgtgcttgccagagaggactttttcggagcggaccttggcctttgtgcggttctcacttgtttcgggctgggggcagcttctggataggggggctacggctctggagctgatggtgctgaacgttccaaggctcatgactcaggactgcctccagcagtccaggaaagtgggtgacagcccaaacattacagagtacatgttttgcgcagggtatagcgacggctcaaaagactcctgcaagggggactctggggggcctcatgcaacacattaccggggaacctggtacctaacaggtattgtctcttggggccaaggttgtgcaaccgtgggtcacttcggagtgtacacccgggtctcccagtatattgagtggttgcaaaaacttatgagatctgagccacgcccaggagtgctgctgcgcgctccatttccc

SEQ ID NO: 2381 - DNA, 1398 bp, Artificial Sequence
  derived and/or modified sequence
atggtgtcccaagcgctgagactgctgtgcctcctccttggactgcaagggtgtctggccgcgggtggggttgcgaaggcctccgggggcgaaaccagagatatgccatggaagcccggcccccatcgcgtgttcgtgacccaggaagaagcacatggagtcctgcatagacgacgccgagcaaacgcgtttctggaggagcttcgaccaggctcccttgagagggagtgtaaggaggagcaatgttcctttgaggaagcgcgggaaatcttcaaagatgcagagcgcactaagctgttttggattagctactcagacggagatcagtgcgcttcgagcccatgtcaaaacggaggatcttgtaaagaccagcttcagtcgtacatttgtttttgtttgcctgcgttcgaagggagaaactgtgaaactcacaaggatgatcagctgatttgcgtcaatgaaaacggaggttgtgaacaatactgtagcgatcacaccggaaccaagaggtcatgtcgctgtcatgaaggctactcgttgcttgcagatggggtgagctgtacccctacggtggaatacccttgtgggaagattccaatcctggaaaagcgtaatgctagcaagccacaaggaagaattgttggaggaaaggtgtgtcccaagggggaatgtccctggcaagttttgctgctcgtcaacggcgcccaactgtgtggtggcactctgataaacaccatctgggtggtttcggcagcacattgctttgataagatcaaaaactggcgcaaccttattgctgtgctgggggagcatgatcttagcgaacatgacggtgatgagcaatcacgacgcgtggcacaggtcattatcccttcgacttacgtgcccggtacgaccaaccacgacattgcacttctccgcctgcatcaacctgtcgtgctgaccgatcatgtggtgccactttgccttccggaaagaacttttagcgaacgtaccctggcgtttgtgcggttttcgctcgtgtccgggtggggacagttgcttgatcggggtgcaaccgcactggaactgatggtgctcaacgtgcctcgtctgatgacccaggactgcctgcaacagtcaagaaaggtgggagactcacccaacattaccgagtatatgttctgtgcaggatactccgatggttcgaaagattcctgcaagggagactccggaggtccacacgcgacccactaccgaggtacctggtaccttactgggatcgttagctggggtcaagggtgcgcaacggtgggacattttggagtgtacaccagagtgtcacagtacatagaatggcttcaaaagctgatgagatctgaaccacggcctggtgtgctgcttcgggcaccatttccc

SEQ ID NO: 2382 - DNA, 1398 bp, Artificial Sequence
  derived and/or modified sequence
atggtgtcacaggccttacgtctcctgtgcttgctcctggggcttcaggggtgcttggctgccggcggagttgccaaggcttccggtggagagactagggatatgccttggaagccggggcctcatcgagtttttgttacccaggaggaagcccatggagtcttgcaccgacggcgcagagccaatgccttcctggaggagctgaggccaggatcactggaacgggaatgtaaggaagaacaatgcagctttgaagaagccagagagattttcaaggatgctgagaggacgaaactcttttggatcagttattctgatggcgaccaatgcgcgtcttccccgtgccagaatggagggtcctgtaaggatcagcttcagagttacatttgcttctgtcttccggcatttgagggcagaaactgtgagacccacaaggatgatcagctgatctgcgttaatgaaaacgggggttgtgagcagtactgttctgaccatactggaacgaagcggtcgtgtcgctgtcacgaggggtactcccttctggctgatggagtgagttgtacccctacggttgagtacccctgtggaaagatccccattctggagaagcgcaatgcttctaaaccccaggggcgaatcgttggtggaaaagtttgccccaaaggcgagtgcccctggcaggttttgcttcttgtaaatggcgcccaactgtgcgggggcaccctgataaacacgatttgggtagtttcagccgcccactgtttcgataaaatcaaaaactggcgcaatttgatagccgtgctcggggaacatgacttatctgagcacgatggagatgaacagagcagacgcgtggcacaggttatcattccttccacctacgtgccaggaacaaccaaccatgatatagcgctgctgcgacttcatcagcccgttgtgctcactgatcacgttgtacccctgtgcctgccagaacgtacgttctctgaacgaacacttgctttcgtgcggtttagcctggtgagtggctgggggcagctgctcgaccgcggcgcaactgcattggagctgatggttctcaacgtacccaggctgatgacgcaggattgccttcagcagtctcgaaaggttggcgactccccaaatatcacggagtacatgttctgcgccggatactcagatgggagcaaggatagctgtaagggggactctgggggaccccacgctactcactatagaggtacatggtatttgactggtattgtttcttggggacagggttgcgcaacagtggggcatttcggcgtgtatactcgggtgtcgcagtatattgagtggctgcagaagctgatgcgcagcgagcctcgacctggtgtgctactccgcgcaccttttccg

SEQ ID NO: 2383 - DNA, 1398 bp, Artificial Sequence
  derived and/or modified sequence
atggtgtctcaagccctccggctcctctgccttctgctcggactgcagggctgtctcgccgcaggaggcgtggccaaagcctcgggaggagaaactagggacatgccgtggaagccgggaccgcacagagtgttcgtgacgcaggaggaagcacacggtgtcctgcataggagacgtcgcgccaatgcttttctggaagagctgcgcccaggttcgcttgagcgcgaatgtaaggaggaacagtgctcgttcgaggaagcgcgcgaaatcttcaaagacgcggagcggactaagttgttctggatcagctactcggacggagatcagtgcgcgtcatcaccctgccagaacggaggttcgtgtaaggaccagctgcaatcgtacatctgtttttgcctcccagctttcgagggtcgcaactgcgagacgcataaggacgaccaacttatttgcgtgaacgaaaatggaggatgtgaacagtactgctccgaccacaccgggactaaacggagctgtcggtgccacgaaggctactcgctgctggcagatggagtttcctgcactcctactgtggaatacccgtgtggaaaaatccccatcctggagaagcgaaacgcgagtaagcctcagggcagaattgtcggaggcaaggtctgcccgaaaggcgaatgcccttggcaagtgctgctcctcgtgaatggagctcaattgtgcggggggaccttgatcaataccatctgggtggtgagcgccgctcactgcttcgacaagatcaagaactggcgcaatctcattgccgtcctcggagaacatgaccttagcgagcacgatggagatgaacaatcccgcagagtcgcccaagtgatcatcccatcaacctatgtgcccgggaccaccaaccacgacatcgccctgctgcgcctgcatcagccggtcgtactcactgaccatgtggtcccgctgtgcctgccagagaggactttcagcgagaggactctggcttttgtccggttctcactcgtgagcgggtggggtcagctgcttgatagaggcgcaaccgcgctggagctgatggtgctgaacgtcccgagactcatgactcaggactgcttgcaacagtcgcggaaagtgggagatagcccgaacatcaccgaatacatgttctgcgccggctactcagatggatccaaggattcctgcaagggagactcaggaggtccacacgccacccactaccgggggacgtggtacttgaccggaattgtgtcctggggccagggctgcgcaaccgtgggccattttggggtgtacactcgggtgtcccaatacatcgaatggctgcagaagctgatgcgctccgagccacgccctggagttctgctgcgggcgcctttcccg

SEQ ID NO: 2384 - DNA, 1398 bp, Artificial Sequence
  derived and/or modified sequence
atggtcagtcaagcccttcgtctgctttgtttacttctcggacttcaaggatgccttgccgcaggaggagtcgcaaaggcctcgggaggagagactagagatatgccatggaaacctgggcctcatcgagttttcgtaactcaggaggaggcacatggagttctgcaccgtcgccgtcgggctaatgcctttttggaagagcttcgccctggatctctcgagcgtgaatgtaaagaagaacaatgctctttcgaagaggcccgagaaattttcaaagacgctgagcgtactaaacttttttggatatcatactcggatggtgatcaatgcgcatcctccccatgtcagaatggaggatcatgtaaagaccaacttcagtcctatatatgtttttgtttgcctgcttttgaaggaagaaattgtgaaacgcataaggatgatcaacttatttgtgtaaatgaaaatggaggatgcgaacagtattgctcggatcatacaggaacaaaacgaagttgccgatgccatgagggatactctctactggcagatggagtctcgtgtactcctactgtggagtacccatgcggaaaaattccaattcttgaaaaaaggaatgctagtaagccacagggacgtatagtgggaggtaaggtttgtccaaaaggagagtgtccatggcaggtgctccttctggtgaatggagctcaattgtgcggagggacgttgattaatactatatgggttgtttcagctgcacattgtttcgataagatcaaaaattggcgaaatctcattgcggtcttgggagaacatgacctgtctgaacatgatggggatgaacaaagccgacgagtggctcaagtgattattcccagcacatacgttccaggcacaactaaccacgacattgctcttcttcgtttgcaccagcctgtggttttaacagatcacgtagttccactgtgtctcccagagcgaacattcagtgagcgtaccctcgcatttgtgagattctctttagtctctggatggggacaacttcttgacagaggagcaaccgcgctagaacttatggttctgaatgtacctcgtttaatgacacaagattgcctacagcaatctaggaaggtaggtgattcaccgaatatcacagagtacatgttctgtgccggctattccgatggatctaaagatagctgtaagggcgactccggaggacctcatgcaactcattatcgcggaacatggtacctcacgggaattgtctcttggggtcagggatgtgccacagttggacattttggagtttacacacgtgtctcacaatacattgaatggttgcaaaagctaatgcggtcggaaccacgccctggggtccttttgcgggctccattccca

SEQ ID NO: 2385 - DNA, 1398 bp, Artificial Sequence
  derived and/or modified sequence
atggtcagtcaggcgctcagacttctctgcctcctgctggggttgcaaggatgtctggccgccggaggcgttgctaaggcctctggaggggaaacccgcgacatgccgtggaagccgggccctcaccgagtgttcgtgactcaagaggaagcccacggagtgctgcaccggcgcaggcgggcaaatgccttcctcgaggagcttcgccccggttcactcgagcgcgaatgcaaggaagaacagtgcagcttcgaggaagcccgcgagatcttcaaggacgcggaacggacgaaattgttttggattagctactcagatggagatcaatgcgcatcctcaccttgccagaatggaggctcgtgtaaggaccagctgcaatcgtacatctgcttttgtctgcctgcatttgaggggaggaactgcgagactcacaaggacgaccagctgatctgcgtcaacgaaaatggaggatgcgaacagtattgctccgatcacaccggcactaaacgatcgtgccgctgccatgagggttactcactcctggcggatggagtcagctgcaccccgactgtggagtacccatgcggaaagatccccatcttggagaaacgcaatgcgtcgaaacctcaaggacgaatcgtgggaggaaaggtgtgcccgaagggagaatgtccatggcaagtactgttgcttgtcaacggcgcccagctctgtggtggtaccctcattaacactatctgggtggtatcggcagcacactgcttcgacaaaatcaaaaactggcggaacctgatcgctgtgctcggagagcacgacctgagcgaacatgacggagatgagcagtccagacgcgtcgcgcaagtcatcattccatcaacctacgtcccgggaacgaccaaccacgacatcgccctgcttcggcttcatcagccagttgttctcactgaccatgtggtgcctttgtgtttgccggaacgcaccttctcagaacggactctggctttcgtgcgcttttcactcgtgtcaggatggggtcagctgctggaccgcggagcgaccgccctcgaactgatggtgcttaacgtgccgcgcctcatgacccaggattgcctgcagcagtcgcgcaaagtgggcgattccccgaacattaccgaatacatgttctgcgccgggtattcagacgggtccaaggactcgtgcaagggtgactccggaggtccgcacgcgacccattaccgcggaacttggtacctcactggaatcgtgtcgtgggggcagggctgtgccactgtgggacacttcggcgtctacaccagagtcagccagtacatcgagtggctgcagaaacttatgcgctcggaaccgcgccctggtgtcctgcttagagccccgtttcct

SEQ ID NO: 2386 - DNA, 1398 bp, Artificial Sequence
  derived and/or modified sequence
atggtgagccaggcactgaggctgctgtgtctccttctcggactgcagggatgtcttgcagccggtggagtcgcaaaagcgagcggcggcgaaacccgcgacatgccgtggaagccaggccctcatagagtgtttgttactcaggaagaggcgcacggcgttctgcataggaggaggcgtgcaaatgccttccttgaagaacttcgccctggttcgctggagagggaatgtaaggaggagcagtgcagctttgaggaagcgcgggagatattcaaggatgccgaaaggaccaaacttttttggatttcctactctgatggtgaccaatgtgccagctcaccatgtcaaaacggaggatcatgcaaggatcaattgcagtcctacatttgcttctgtctgccggcatttgagggcaggaactgcgaaacccataaggatgatcaactgatatgcgtcaacgaaaacggaggttgtgaacagtattgttcggatcataccggtactaaacgctcgtgccggtgccacgagggttactctctgctggcggatggagtgtcctgtactccaactgtggaatacccatgcgggaaaatccctattctcgaaaagcgtaacgcctccaagccacagggtcgcattgtcggcggtaaggtgtgtcctaagggtgaatgtccttggcaggtccttttgcttgtgaacggcgcacaactttgtggaggtacgctgatcaacactatctgggtggtcagcgcagctcattgcttcgataagatcaaaaactggaggaacctgattgcggtgcttggagaacacgacctttcggaacatgatggagacgaacaatcgagacgggtggcacaagtcattatcccgtccacctacgtgccagggacgactaatcacgatatcgcactccttcgacttcaccaaccggtggttctgactgatcatgttgtgcctctttgtctgcccgaaagaaccttttccgaaagaactctcgcgtttgtgcggttttcactcgtgtcagggtggggtcagctgctggacagaggggcaaccgcactggagttgatggtccttaatgtgcctagacttatgacgcaagactgcctgcaacaatcgcggaaggtgggagactcccctaatatcaccgagtatatgttctgtgctgggtactcggatggttctaaggattcatgtaaaggggactccggtgggccacacgcgacccattaccggggaacctggtacttgactggtattgtgtcgtggggccaagggtgtgcaactgtcggacatttcggagtgtacacgcgggtgtcgcaatacatcgagtggctccagaaacttatgcggagcgaacctcgacccggggtccttctgagagcgcctttccct

SEQ ID NO: 2387 - DNA, 1398 bp, Artificial Sequence
  derived and/or modified sequence
atggtcagccaggcgctacgattgctgtgcctcctgttgggactgcagggctgccttgccgcgggaggcgttgccaaggctagtgggggggagaccagagatatgccgtggaagcctggcccacaccgggtctttgtgacacaagaagaagcccacggggtgctgcatcggcgtcggagggcgaacgcctttttggaggagctacggcctgggtcgctagaacgcgagtgtaaagaagagcaatgttctttcgaagaggcgcgcgagatcttcaaagacgctgagcgcaccaagttgttttggatcagttatagcgacggcgaccagtgcgctagcagtccctgccaaaatgggggaagctgtaaagatcagctgcagtcttacatctgcttttgcctccctgcctttgaaggtagaaactgtgagacgcataaggatgaccaactgatctgtgtgaatgagaatggcgggtgcgagcagtactgttctgatcacactggcacgaagagatcctgtcgctgccatgagggatacagtctgctggccgacggagtgagttgcactcccactgttgagtacccttgcgggaagattccgatcctggagaaaaggaacgcttcaaaaccacagggtcggattgtaggaggtaaggtctgccctaaaggcgagtgcccttggcaggtcttattattggtgaatggtgcccaactctgcggcggcacgctgattaacactatctgggtggtgtcggcagctcactgttttgacaaaatcaagaactggaggaatttaatcgccgtcctcggcgaacacgacctgtctgagcacgatggtgacgagcagtctcgcagggtcgcacaggtgattatcccctcaacgtatgtgcctggcaccacaaaccacgatatagcgttgctcagattacaccagccagtcgtgctgacagatcacgtggtcccactctgtctgcccgaacgaaccttttctgaaaggacactcgcatttgtgcggttctccctggtgtccgggtggggacaactgctggataggggagcaactgccctggaactgatggtcctgaatgtcccccggctgatgacacaggactgcttgcagcagtctcgaaaggtcggcgacagtccaaacatcacagaatatatgttttgcgctggatattctgacggaagcaaagacagttgcaaaggcgacagtggagggcctcatgcaacacattaccgagggacttggtatttgacggggatagttagctggggacagggttgtgccaccgtaggccatttcggagtatacacccgcgtgagccagtacatcgaatggttgcagaaacttatgcgatctgaaccacggcccggggtgctgctcagagctccattcccg

SEQ ID NO: 2388 - DNA, 1398 bp, Artificial Sequence
  derived and/or modified sequence
atggtcagccaagcccttcgcttgctgtgtctgcttttgggtctgcagggttgcctcgcggctggaggggttgcgaaagccagcggaggcgaaacgagggacatgccttggaaaccaggcccacacagagtgttcgtgactcaagaagaagctcatggcgtgcttcaccgccgccgtcgggccaacgcattcctggaggagctccgcccgggtagcctcgaacgggaatgcaaggaggaacagtgctccttcgaggaagcccgggaaatcttcaaggacgcagaaaggaccaagctcttctggatttcgtactccgacggtgatcagtgcgcgtcctcaccgtgtcagaatggcggatcctgcaaagaccaactgcagtcctacatctgcttttgtctcccggcattcgagggacggaattgcgagactcataaggacgaccaactgatctgtgtgaacgaaaacggcggatgtgaacagtattgctcggaccacaccggaaccaaaagatcatgcaggtgccatgagggatacagcctgctcgcggacggagtgtcatgcacccctacggtcgaatacccttgcggcaagatcccgatcctggagaagcgcaacgcgtcaaagccgcagggacgcatcgtgggagggaaggtgtgtccgaagggggaatgcccatggcaggtgctccttctcgtcaatggagcccaattgtgtggaggcaccctgatcaacaccatctgggtggtgtccgccgctcattgcttcgataagatcaaaaactggcgcaacctcatcgcggtcctgggggaacacgacctgtccgagcacgacggagatgaacaaagccgcagagtggcccaggtgatcatcccctccacctacgtccctggaacgaccaatcatgatatcgcgctgctgaggctgcaccagccggtcgtattgactgaccacgtggtgccgctgtgcctcccggagagaactttttccgagcggactctggcattcgtgcgcttcagcctggtgtcgggctggggacagctgctcgaccgcggcgccactgcacttgaactgatggtgctgaacgtgcctcgcctcatgacccaggactgccttcaacagtcccggaaagttggcgactcaccaaacatcactgagtatatgttctgcgcgggatattcggatggatccaaggactcgtgcaaaggggactcgggaggaccccatgcgacccattacaggggaacctggtatcttaccggaatcgtgtcttggggacaaggatgcgcaactgtgggtcatttcggagtgtacacccgggtttcgcagtacattgagtggctccaaaagctcatgagatccgagccgcggccgggcgtgctgctccgggcccctttccct

SEQ ID NO: 2389 - DNA, 1398 bp, Artificial Sequence
  derived and/or modified sequence
atggtgtcacaggcgttgagactcctgtgcttgttgctcggacttcagggctgcttggcggcaggaggagtggcaaaggccagcggtggcgagactcgtgatatgccttggaagcctggtcctcatcgtgtctttgtgacccaagaagaggcgcatggagtgcttcatagacgacgccgcgcgaatgcctttcttgaggaacttaggccgggaagtctggaacgcgaatgcaaggaagagcaatgctcgtttgaggaagccagagaaatctttaaggacgcagagcggaccaagttgttttggatctcttactcagatggtgaccaatgtgcatcgtccccatgccagaacggaggttcgtgtaaggatcaactgcaaagttatatctgtttttgtctgcccgcctttgaaggccgaaattgtgaaactcacaaggatgaccagctcatatgtgtcaatgagaacgggggttgcgaacaatactgctcggatcatactgggactaagagatcatgtcgctgtcatgaaggctactcgctgctggcagatggagtctcgtgtactcccactgtggaatacccttgtggtaagattcctatacttgagaaacggaatgcttccaaaccacaaggtcggattgtggggggcaaagtctgcccaaagggagaatgtccgtggcaggtgcttttgctggtaaacggagcacagttgtgtggtggaactctgataaacaccatttgggtggtgtcggctgcgcattgtttcgataagatcaaaaactggagaaacctgattgcagtgcttggcgaacacgacctgtcggaacacgacggcgacgaacaatcacggcgcgtggcgcaggtcatcattcccagcacctacgtgccgggaactaccaaccacgacatagcactgctcaggctgcaccaacctgtggtcctcactgaccatgtggttcctctgtgcctgcccgaaagaactttctcagaaaggacccttgcctttgtacgcttctccctggtttccgggtggggccagcttcttgacagaggagcaacggcactggagcttatggtgctgaacgtgccccgtcttatgacccaggattgcctgcaacagtccaggaaggtgggcgattcgccgaatatcactgagtacatgttctgcgccgggtactcggatggttcgaaggattcgtgtaaaggagatagcggaggtccacatgcaacccattatcggggtacgtggtaccttaccggcatcgtcagctggggacaaggctgtgccacggtgggtcattttggtgtctacactcgtgtgagccagtacatcgagtggctgcagaagctcatgcgttccgagcctcggcccggggtcctgctgagagcacccttccct

SEQ ID NO: 2390 - DNA, 1398 bp, Artificial Sequence
  derived and/or modified sequence
atggtgagtcaagcattgcgattactgtgcctgctgctaggactgcagggatgcctcgcagccgggggcgtggcaaaagcctcgggaggcgagacgcgggatatgccttggaaacccgggcctcaccgagtgttcgttacacaggaggaagctcacggggtccttcatcgacgtcggcgcgcaaatgccttcctggaggaactgcggcccggatcgctagagagggaatgtaaggaggagcagtgctcattcgaggaagcgcgcgagatatttaaggatgccgagcgcacaaaattattctggataagttactctgatggggatcaatgtgcatcaagtccctgccagaacgggggctcctgtaaggaccagctgcaaagctacatatgcttctgtttgcctgccttcgagggacgcaattgtgagacacataaggacgaccagctgatttgtgtgaatgagaatggtgggtgcgaacagtactgctcggatcacactgggacaaaacgatcatgccggtgtcacgagggttactcactgttggccgacggagtcagttgtactccaacggtcgaatatccgtgtgggaagatacccatcctggaaaaacgcaatgcatccaagcctcagggacgtattgtgggtggtaaggtgtgccctaaaggcgagtgtccctggcaggtcttactcctggtcaatggcgctcagttatgtggaggtactctcattaacactatatgggtagtgtctgctgctcattgcttcgacaagattaagaattggcgcaatcttatcgccgttctgggagaacatgacctcagcgagcacgacggcgacgaacagagtcgccgggtcgcccaagtgattattccctccacctacgtgccagggactacgaaccatgatattgcccttctccgtctgcaccaacctgtggttctcaccgatcacgtggtgcccctctgtcttcccgagcgaaccttcagtgagaggacattggcctttgttcgatttagcctggtgtcaggatggggacagctgcttgaccggggtgcaacagccttggaactcatggtattgaacgtcccccgtctcatgactcaggattgtctgcagcagagtcgcaaagtgggagactctcctaacatcaccgagtacatgttttgcgctgggtactcagatggttccaaggactcatgcaaaggggacagcggaggccctcatgctacccactacagagggacttggtacctgactgggattgtttcctggggacaggggtgcgccaccgtaggacacttcggagtgtacaccagggtgtcgcagtacattgagtggttacaaaaactgatgcggagcgaaccaagacctggagtcttgctgcgggcccccttccca

SEQ ID NO: 2391 - DNA, 1398 bp, Artificial Sequence
  derived and/or modified sequence
atggtttcacaggccctacgcctgctctgtttgcttctgggacttcagggatgcttagctgccggtggggttgccaaagcctcgggcggcgaaacaagggatatgccatggaaacccggccctcatcgggtgtttgttacacaggaggaggctcatggtgtactgcacaggaggagacgtgccaatgcgttcctggaggagttgcgacctggcagtttggaacgagagtgtaaggaagaacagtgttcttttgaggaagcacgggagatcttcaaagacgctgagagaacaaagctgttttggatcagctactcggatggagatcagtgcgcttctagcccttgtcagaatgggggatcgtgtaaggatcagctgcaatcctatatttgtttttgcctacctgcattcgagggacgtaattgtgaaacccataaggatgatcaactgatctgtgtgaatgaaaacggcgggtgtgaacagtactgctccgatcatactggtacgaagcgctcttgccgctgccatgagggatatagcctgttggccgatggagtatcctgtactccgacagttgagtatccatgcggcaaaatcccaatcttagaaaagcgcaacgcaagcaaacctcaaggccgcatcgttggcggcaaagtctgtcccaaaggggaatgtccgtggcaggtactgctactagtgaatggtgcccagctgtgtggaggcacactgatcaataccatctgggtcgtttctgcggcacactgttttgacaagatcaagaattggcggaacttaattgccgttcttggcgagcacgacctgtctgagcatgacggagatgagcagtctaggagggttgctcaagtcatcattccctcgacatacgtacccggcacaactaaccatgatattgccttactgaggttgcaccagccagtggtgttgactgaccatgtcgtccctctgtgcctgcctgagaggacgttttctgagcgcaccttggctttcgtacgattctcactggtatctggatggggtcagctcttggaccggggtgcaacagcattggaactgatggtgctgaatgttcctcggctgatgactcaggattgcctgcagcagagtagaaaagtcggggattctccaaacatcacagagtacatgttttgcgcgggctactcagacgggtctaaggattcgtgtaaaggagacagtggcggtccccatgccacccactatcggggcacttggtatcttacggggatcgtttcgtggggtcaaggatgcgctactgtcggacactttggggtgtacacccgtgtgtctcagtacattgaatggctgcagaaactgatgcgttctgagcctcgaccaggtgtgctgttgcgcgcccccttccca

SEQ ID NO: 2392 - DNA, 1398 bp, Artificial Sequence
  derived and/or modified sequence
atggtcagccaggcactgcgcctgctgtgtttacttctgggtttgcagggatgcctggctgcggggggggtggcgaaagcctcaggaggcgagactagggacatgccttggaagcccggtcctcaccgcgtgttcgtcacccaggaggaggctcacggcgtcctccacaggcggaggcgagcaaatgcgttcctggaggagctgcgcccaggttctctggagagagagtgtaaggaggaacagtgttcattcgaggaggcaagagaaatttttaaggatgccgagcggaccaagttattttggatttcatatagtgacggggaccagtgtgcttcatcaccatgccagaacggcggaagctgtaaagaccaactacagtcatacatttgcttttgtcttccggcgttcgagggaaggaactgcgagacccacaaagacgaccagctgatctgcgtcaatgaaaatggcggatgcgaacagtattgctccgaccacaccggcacgaaacggtcctgccggtgccacgagggctatagcttgctggcggacggtgtcagctgtacccccaccgtggagtatccgtgcgggaagatccccatcctggagaaacgaaacgcgtccaaaccccagggacgtatagtgggcgggaaggtgtgtccaaagggcgagtgcccatggcaggtgctcctgctagtgaatggcgctcaactttgcggggggacccttatcaataccatctgggtagtcagcgccgctcactgtttcgacaaaatcaagaattggcgaaaccttattgcagtgttaggcgagcatgacttatccgaacacgatggcgacgaacaatccaggcgggtggctcaggtgataatccccagcacatacgtcccggggacaaccaaccacgacatagccctcctgcgccttcaccagcccgtagtgctgacggaccacgtcgtgccactctgcctcccggagcggacattttccgaacggactttggcctttgtgaggtttagcctggtttccggttggggacagctactggatcgtggagcaaccgccttagagctgatggtattgaatgtgccccggctgatgacacaggattgcctacagcagtccagaaaagtaggggactcacctaacataacagagtatatgttttgcgcggggtacagcgatgggtccaaagactcctgtaaaggcgactcgggcggcccccacgctacacattatcgggggacctggtacttgaccggcattgtgtcatggggacagggatgtgctacagttgggcattttggcgtgtacacaagagttagccagtacatcgaatggttgcagaagctcatgaggtcagagcccaggcctggcgtgctgttaagggcccctttccca

SEQ ID NO: 2393 - DNA, 1398 bp, Artificial Sequence
  derived and/or modified sequence
atggtgtcgcaggctctgcgcttgctgtgcctgctgctggggctccaggggtgtctcgctgcgggaggagtcgctaaggcctccgggggagaaactcgcgacatgccgtggaaaccgggaccccatcgggtgttcgtcacccaagaagaagcccatggagtgctccaccggcgccgccgggcaaatgcattcctggaagaactgcggccggggtccctcgaacgcgaatgtaaggaggagcagtgcagcttcgaggaggcacgagaaatcttcaaggacgcggaacgcactaagttgttctggattagttatagcgacggcgaccagtgcgcttcgtcgccttgccagaatggcggaagctgcaaagatcagctgcagtcctacatctgcttctgcctgccggcattcgagggccgaaattgtgagactcacaaagatgaccaactgatttgcgtgaacgagaatggaggatgcgagcaatactgttccgaccatactggaactaaacgctcgtgcagatgccacgaaggttactcgctccttgcggacggagtgtcgtgtactccgactgttgagtacccgtgtgggaaaattccgatccttgaaaagcgcaacgcctcgaagcctcaaggccgcatcgttggaggaaaagtgtgccccaaaggcgagtgcccctggcaggtgctcctgctggtgaacggcgcccaactctgcgggggcaccctgatcaataccatctgggtggtgtctgccgcacactgcttcgataagatcaaaaactggcggaacttgatcgcggtgctgggagagcacgatctctcagagcacgacggagatgagcaatcacggcgggtggcgcaggtgatcatcccttcgacctacgtccccggaacgaccaatcacgacatcgctctgctgagactgcatcaaccagtcgtgttgactgatcatgtggtgccgctctgtctccctgaacggaccttttcagaaagaaccctggccttcgttcggttctctctggtgtccggttggggccagctgctggaccggggcgccactgctcttgaactgatggtgctgaacgtgccacgcctgatgacgcaggattgcctccagcagagccgcaaagtcggagattccccaaatatcactgagtacatgttttgcgcaggctactccgatggatcgaaggattcgtgcaagggagactccgggggcccccacgccacgcattaccgcggaacctggtacctgaccggaattgtgagctggggacagggatgtgccactgtgggacacttcggcgtgtacactcgggtgagccaatacatcgaatggctgcagaagctgatgcggtcggaacctaggccgggagtgctgctgagggccccgttccca

SEQ ID NO: 2394 - DNA, 1398 bp, Artificial Sequence
  derived and/or modified sequence
atggtgagccaggcgctgcgcctgctgtgcctgctgttgggactgcagggctgcctggccgctgggggtgtggcgaaggcatctggtggtgaaacccgcgacatgccatggaagcctggtcctcacagagtctttgttactcaggaggaagcccacggtgtgctgcatcgacgacgcagggcgaacgccttcctggaagagctgcgcccggggtcactggagcgcgagtgcaaggaagagcagtgttccttcgaagaggcgcgcgaaatttttaaagacgcggagagaactaagttattctggatcagctattccgatggcgaccagtgcgcatcatctccgtgtcaaaacggtggtagctgcaaggaccagttgcagagctatatctgcttctgcctgcctgcgtttgaaggtcgcaactgcgagacgcataaagacgaccaacttatttgtgtcaacgagaatgggggctgcgagcagtattgcagcgatcatactggtaccaagcgaagctgtcgttgtcacgaaggctacagcctcctggcggacggcgtcagctgcactccaacagttgaatacccctgcggcaaaatcccgattctggaaaaacgcaacgcgtccaaaccgcaagggcgaattgtcggtggtaaggtatgccctaagggcgagtgcccttggcaggtcctgctgctggtgaatggtgcgcagctgtgtggcggaacgctaataaatactatctgggtagtcagtgcggcgcactgctttgataagatcaaaaactggagaaacttaattgcagtgctgggtgaacacgacctcagcgagcacgacggtgatgagcagtcccgcagggttgctcaggttattatcccaagcacctacgttcccggcacgaccaatcacgatatcgcactgctgcgcctgcatcagcccgttgttctgaccgaccacgtggtcccactgtgcctgccggagcgcacctttagcgaacgcaccctcgcgtttgtgcgcttttctcttgttagcggttggggtcaactactggacaggggcgccacggctctagaactgatggtgctgaacgtgccaagactgatgactcaagattgtttgcagcagtctcgcaaggtcggcgactccccaaatattaccgagtacatgttttgtgccggttacagcgacggctccaaagactcttgcaaaggtgatagcggcggcccgcacgcgacccactatcgtggtacttggtacctgactggtatcgtgagctggggccagggttgcgccaccgtgggccatttcggcgtttacacgcgagtgtcccagtacatagaatggttacaaaaactgatgcggtccgaacctcgtcctggtgtactacttcgcgctccattccca

SEQ ID NO: 2395 - DNA, 1398 bp, Artificial Sequence
  derived and/or modified sequence
atggtttcacaggcacttcgacttttgtgtctgctgttggggcttcagggctgccttgctgctgggggagtggcaaaggcatcgggaggagagactcgtgatatgccttggaagcccggacctcaccgcgtgttcgtcactcaagaagaagcacatggagtccttcaccgtagaaggcgcgcgaacgcatttctggaagagctgcgaccaggtagtctcgagagagaatgcaaagaggaacagtgctcgttcgaagaggcccgggagattttcaaagacgccgaaagaaccaagctgttttggataagctattcggacggggatcaatgtgcctcctcgccatgccagaacggtggatcgtgtaaagatcagcttcaaagctacatctgcttttgtttgcctgcatttgaaggaagaaactgtgaaactcataaagatgatcaactcatatgtgtgaatgaaaacggagggtgtgaacaatactgttcggaccacaccggtaccaagcgctcctgccgctgtcacgaaggttactccctgctcgcggatggcgtgtcttgcactcctactgtcgagtacccttgcggtaagattccaattctggagaaaaggaacgcatccaagcctcaaggtcgcattgtggggggtaaggtgtgtcctaagggagaatgtccgtggcaggtgcttctgcttgttaacggagcccagctctgtggtggaactcttatcaatactatctgggttgtgtctgcagcacattgctttgacaaaatcaagaattggagaaatcttatcgcagtgcttggtgagcatgatctttccgaacacgatggagatgagcaatcgaggcgcgtggctcaagtcataatcccatccacctacgtgcctggtaccactaaccacgacattgcccttctgagactgcatcagcctgtcgtgcttaccgatcatgtggttccactttgtctgcctgagcggaccttctcggagcgaactctcgcttttgtgcgattttcacttgtttctgggtggggtcaactgctggatcggggtgcaaccgcactcgagctgatggtccttaacgtcccccggcttatgacccaagattgtctccagcagagcagaaaggtcggtgactccccaaatatcacggaatacatgttttgtgcaggatactctgacggttcaaaggactcgtgcaagggagattcaggtgggccgcatgctacccattataggggcacctggtacttgactgggattgtgagctggggtcaaggttgtgcaactgtgggccacttcggagtctacacgagggtgtcccaatacattgagtggctgcaaaagttgatgcgttcagaaccacggcccggtgttctccttcgcgctccatttcca

SEQ ID NO: 2396 - DNA, 1398 bp, Artificial Sequence
  derived and/or modified sequence
atggtcagccaagctttacggctactttgtctgctccttggtcttcagggatgtctcgccgcaggtggagttgccaaggcaagcggcggtgagactcgagatatgccgtggaaacctggaccacatagagtctttgtgactcaagaagaggctcacggcgtgctacatagacggcgtcgagcaaatgccttccttgaggagctcagacctggttctcttgagagagagtgtaaggaagaacaatgttcgtttgaagaggccagagaaatcttcaaggatgcagaaagaactaagcttttctggattagttattctgatggtgatcaatgtgcgagctcaccttgccaaaatggtggaagctgtaaggatcagctgcaaagttacatttgtttttgtcttccagcgtttgagggaagaaattgcgaaactcataaggatgaccagttaatatgcgttaacgaaaacggaggttgcgagcagtactgctccgatcataccggtactaagcgttcttgcagatgccacgaagggtactctcttcttgctgatggtgtgtcatgtactcctacagtcgaatatccatgtggtaagattccgatcctcgagaagcgtaatgcatccaagccacaaggcaggattgttggaggaaaagtctgtccgaagggtgaatgtccttggcaggttcttctccttgttaatggagcacagctatgcggcgggacacttatcaatacaatctgggttgtgtcagcagcacattgtttcgataaaatcaagaattggcgtaaccttattgccgtgcttggcgaacacgatctcagtgaacatgatggtgatgaacagagccgccgggttgctcaggtcatcataccatcaacttatgttccaggcactaccaaccacgatatcgcacttcttagacttcatcagcccgtggtgctcaccgatcatgtggttccattgtgcttgcctgaacgcacgttttcagagcggaccttagccttcgtgaggttttctctcgtctcaggatggggccaactgttggaccgtggcgcaactgctctagagcttatggtgctcaacgtaccacgtcttatgacccaagattgtttgcaacagagcaggaaagttggagattcaccgaatataactgagtacatgttttgcgcaggctattccgatggttcaaaggactcatgtaagggcgactctggggggcctcatgctacacattatagaggaacatggtatcttacagggatcgtgtcttggggacaaggatgcgctactgttgggcatttcggagtttatacaagggtctcacaatacatagagtggttgcagaagctcatgcgtagcgaacccaggcctggtgttcttttgcgcgctccatttcca

SEQ ID NO: 2397 - DNA, 1398 bp, Artificial Sequence
  derived and/or modified sequence
atggtatcgcaagcgctgcggctcctgtgcctgctgcttggcctgcagggatgcctggccgccggaggagtcgccaaggcctccggaggagagactcgggatatgccgtggaaaccgggacctcaccgggtgtttgtgacccaggaggaggcacacggagtgctgcatcgccggagacgggccaacgcattcttggaggaactcaggccgggcagccttgagcgcgagtgtaaagaggagcaatgttcattcgaggaagcaagggaaatcttcaaggatgccgaaaggactaagctgttctggatctcctactccgatggagatcaatgtgcttcgtcgccctgccagaacggaggctcctgcaaagaccagctccaaagctacatctgcttctgtttgccggctttcgaagggagaaactgcgagactcacaaggacgaccaattgatttgcgtgaacgaaaacggaggttgcgagcagtactgtagcgatcacacgggaaccaagcggtcgtgcaggtgccacgaggggtattcgctgctggcggacggagtctcgtgtactccaactgttgagtacccatgtggaaagatacccatcctcgagaagcgcaatgcttccaaaccgcagggacggatcgtcggcggaaaggtgtgccccaaaggcgaatgcccgtggcaggtcctgctccttgtgaacggcgcccagttgtgtggcggaaccctgatcaatacgatctgggtcgtgtctgcggcccattgtttcgacaagatcaagaattggaggaatctgattgccgtcctgggcgaacacgacctgtcagagcacgacggagacgaacagtcacggagggtggcccaggtcatcatacctagcacctacgtgccgggaacgaccaaccacgacattgcacttcttagactgcatcagcctgtcgtgttgactgatcacgtggtgccgctgtgtctgcctgagcgtaccttctcggaacgcactctggctttcgtgaggttcagcttggtgtcgggttggggacagctcctggacagaggagcgaccgcgcttgaactcatggtgctcaatgtgccacgcctgatgacccaggactgcctccagcagtcacgtaaggtgggagactcgccgaacatcaccgagtacatgttctgcgccggctattccgacggatccaaggattcgtgtaagggagattccggcggaccgcacgccactcactaccgcggcacctggtatctgaccggaatcgtttcatgggggcaaggctgcgcgactgtgggccattttggcgtctacacccgcgtcagccagtacatcgaatggctccagaagctgatgcggtcagagcctcgcccaggggtcctgctgcgggcgccatttccg

SEQ ID NO: 2398 - DNA, 1398 bp, Artificial Sequence
  derived and/or modified sequence
atggtgagccaggcacttcgacttctgtgcctcttgttgggactgcaggggtgtctggctgctggaggagtcgctaaggcaagcgggggcgaaaccagagacatgccctggaagcctgggccccatcgggtgtttgtgacacaggaggaggcccacggagtgttgcatcggcgacgacgcgccaatgcgttccttgaggagctgcggcctgggtctcttgagagggagtgtaaagaggagcagtgttcattcgaggaagctcgcgaaattttcaaggacgcggagcggactaagttgttttggatctcttattcagatggagatcagtgcgccagctcaccctgtcaaaacggtggaagttgcaaagaccagcttcagagttacatctgtttttgtcttccagcctttgaaggtcggaactgtgagacccacaaggacgatcagttgatttgcgtgaacgagaacggcgggtgtgaacagtattgctcagaccacactgggactaagagatcttgccggtgtcacgaggggtattcactgcttgcagatggagtgagttgcactcccaccgtggaatatccttgtggcaagatacctattcttgagaagaggaacgcctccaagccacagggaaggatcgtgggggggaaagtctgccctaagggtgaatgtccgtggcaggtcctcctgctggtgaacggcgcgcagctttgcggcggaaccctcatcaataccatctgggtggtcagtgctgcacattgctttgataagatcaagaactggcggaacctgatcgctgtgctgggtgaacacgatctctctgaacatgacggggatgagcagtcacggagagtcgctcaagtgattataccgagtacctatgtacccggtaccacaaaccacgatattgccctgttgaggcttcaccagcccgtcgtcttgaccgaccatgttgtgccattgtgtctgcccgaacgaacctttagtgaaaggactctggcatttgtgaggtttagcctggtctcaggctggggacagctcctggaccgaggagccactgctctggagcttatggtgcttaatgtccctcggctgatgactcaggactgtctccagcagtcacgaaaggtgggggacagtccaaacattaccgaatacatgttctgtgccgggtactccgatggctccaaagattcatgtaagggagattccggcgggccacacgcgacccattacaggggcacctggtacctgactggaatcgtatcctggggccagggctgcgctacggtgggccactttggcgtgtacacccgagtgtctcagtacattgagtggctgcagaaactgatgcggtccgaacctcgccctggcgtcctgcttcgcgctcctttccca

SEQ ID NO: 2399 - DNA, 1398 bp, Artificial Sequence
  derived and/or modified sequence
atggtcagccaagcgcttagactcctttgtctgctgcttggactccagggatgccttgccgcaggaggcgtggccaaggcatccggcggtgagactcgcgatatgccttggaagcccggaccccatagggtattcgtcacccaagaggaagcccatggggtccttcataggcgtagacgggctaacgccttcctggaagaactgcgacctgggagccttgaacgcgaatgcaaagaagaacagtgctcctttgaagaggcacgtgagattttcaaggatgcggaaaggaccaagctgttctggatctcgtactccgatggagatcaatgtgcctcaagcccttgtcagaatggaggttcgtgtaaggatcaactgcagagctacatctgtttttgccttcccgcatttgagggacgcaattgtgaaacgcacaaagatgatcaactgatttgtgtgaatgaaaatggaggttgcgaacaatactgttcagatcatacgggaaccaagcggtcgtgtaggtgccacgagggttactcccttcttgcagatggcgtgtcatgcactcccaccgtggaatacccttgtggcaaaatacccattcttgaaaagcgaaacgcaagcaaacctcaaggacgcattgtgggaggaaaggtgtgtccgaaaggggaatgtccgtggcaggtgttgctcctggtgaacggggcacaactgtgtggtggaactctcatcaatactatctgggtggtgtctgccgcacactgctttgataagattaagaactggaggaatctgatcgccgtgctgggtgaacacgacctcagcgagcatgatggtgacgaacaaagccggcgggtcgcacaggtgattattccatcgacctacgtgcctggaaccacgaatcatgatatcgcactccttagactgcatcagcctgtggtgctgacggatcacgtggtgcctctttgcctgcctgaaagaaccttttccgaacggaccctggcgtttgtcagattttcccttgtgtcaggctggggacaacttctcgaccgaggcgcgaccgcactcgagctgatggttcttaacgtacctcgtctcatgacccaggattgtctgcagcagtcgcgcaaagtgggtgattcccctaacatcactgagtacatgttctgtgcaggatactcggacgggtcgaaagactcatgcaagggagatagcggaggaccacatgcaactcactatcggggaacttggtacctgactggaattgtgtcctggggtcagggatgtgcaaccgtgggacacttcggagtctacaccagagtgtcgcaatacattgaatggcttcaaaaactgatgcgatctgaacccagacccggggtgctcctgagggccccttttcct

SEQ ID NO: 2400 - DNA, 1398 bp, Artificial Sequence
  derived and/or modified sequence
atggtgtcgcaggcattgaggctgctctgcctgctgctgggacttcaaggatgtctggcagcaggaggtgtcgctaaggcttcagggggtgaaacgagagatatgccttggaagcctggaccacatagggtgttcgtgacccaggaggaagcacacggggtactgcatagacggcggagggccaacgcctttcttgaggaacttcggcctggctcactggagagggaatgcaaggaagaacaatgttcattcgaagaggcccgggaaatcttcaaagacgccgagcgaactaagctgttttggatctcgtactccgacggagatcagtgcgcatcctcaccatgtcagaatggaggatcgtgtaaggatcaacttcagtcctacatttgcttttgtttgcctgcgttcgaaggaaggaactgtgaaacgcacaaggacgatcaacttatttgtgtgaatgaaaacggtgggtgtgaacagtactgctcggatcataccggaaccaaacggtcgtgccgatgtcatgaggggtactccctcttggcagatggagtctcctgcacgcctactgtggagtacccatgtggaaagattcctattttggagaagagaaatgcaagtaaaccacaaggaagaattgtgggcggaaaggtctgcccgaagggagaatgtccttggcaagtgctgctgctggttaatggagcacaactctgcggtggtaccctgattaacaccatctgggtcgtgtctgcggcacattgttttgacaaaatcaaaaactggagaaaccttattgctgtgctcggagagcacgatctgtcggagcacgatggtgacgaacagagcagacgcgtcgcacaagttatcatccctagcacttacgtacccggaaccacgaaccatgatattgcacttctcagacttcatcaaccggtggtgttgactgatcacgtggttcccctttgtctcccagagagaaccttttcagaacggaccctggcatttgtgcgctttagtctggtgagcggctggggtcagcttctggatcgtggagcaactgccctggaacttatggttctgaatgtgcctcgactgatgactcaggattgcctccaacagagccgaaaggtcggcgatagcccgaatatcactgaatacatgttttgtgcagggtactctgatggaagcaaagacagctgcaaaggtgactcaggaggaccccacgcaacccattacagaggcacttggtatctgaccggcattgtctcctggggtcaaggctgtgcgactgtgggacatttcggggtatatactcgcgtgagccaatacattgaatggcttcagaagttgatgcggtccgaacctcgccctggcgtcctgcttcgcgccccttttcca

SEQ ID NO: 2401 - DNA, 1398 bp, Artificial Sequence
  derived and/or modified sequence
atggtgtcccaggcgctgaggctcctgtgtctccttttgggactgcaaggatgcctggcagcaggcggagtcgctaaggcctcgggaggtgaaactcgcgacatgccttggaaaccgggaccccacagagtgttcgttactcaagaggaagcgcatggagtcctccaccggcggcggcgcgctaacgcttttcttgaggaactgcgcccggggtcgctcgagagagaatgtaaagaagaacaatgcagcttcgaggaagctcgggaaatctttaaggatgctgaaaggaccaagctgttctggattagctacagcgatggggaccagtgcgcgtcatccccttgtcagaacgggggaagctgcaaagaccaactccaatcctacatctgcttttgcctgccggcctttgagggcagaaattgcgaaactcacaaagatgatcagcttatctgcgtcaacgaaaatggaggatgtgaacaatactgttccgaccatactggaactaagcgcagctgcagatgtcacgaaggatactcgctcctggccgacggggtgtcctgcactccaactgtcgagtatccgtgtggcaagatcccgatccttgagaagcgcaacgcctcaaagccgcaagggcggatagtcgggggaaaggtctgcccaaagggagagtgcccgtggcaggtgctcctgctggtgaacggcgcccaattgtgcggaggcacgctgatcaacactatctgggtggtgtcagcggcacactgcttcgacaagatcaaaaactggcggaatcttattgccgtgctcggtgagcatgacctgtccgaacacgatggggacgagcagtcgcggcgcgtggcccaagtcatcatcccttctacctacgtgcctggcaccacgaatcatgacatcgcactgttgcggctgcaccagccggtcgtgctgactgatcacgtggtgccgctttgcctcccagaacgcactttctcggagcgcaccctcgctttcgtgcgcttctccctggtttcaggatggggccagttgctcgatcggggtgccaccgccctggagctcatggtgctcaatgtgccgaggcttatgacccaggactgcctgcagcagtcacggaaagtgggcgattcgccaaacattaccgagtacatgttttgcgcaggatactcggatggatcgaaggacagctgcaagggggactctgggggacctcacgcgacccattatcggggaacgtggtacctgaccggtatagtctcttggggtcagggctgtgccaccgtggggcatttcggtgtgtatactcgcgtctcgcagtacatcgaatggctgcagaagctgatgcggtcagagccgcggccaggggtcctgttgagagcgcccttcccg

SEQ ID NO: 2402 - DNA, 1398 bp, Artificial Sequence
  derived and/or modified sequence
atggtctctcaggccttgcgccttctgtgtcttctgctgggtcttcaggggtgcttggccgcaggcggggtcgcaaaagcgtcgggtggtgaaaccagggacatgccttggaagcccggtcctcatcgcgtgttcgtcactcaggaggaggcgcacggcgtcctgcaccgtaggcggcgcgccaatgccttcttggaggagttacgcccgggctccttggagagagaatgtaaggaggaacagtgtagtttcgaagaggcccgtgagatctttaaggatgctgagcggactaagctgttctggatttcctacagcgatggggaccagtgcgcttcgagtccctgccagaacggtggtagctgcaaggaccagctccagagttacatctgcttctgcctcccagccttcgagggccgtaactgcgaaacacataaggacgaccagttaatctgcgtgaacgagaatggtggctgtgagcagtactgttccgatcacaccggcaccaagcggtcctgccgctgccacgagggatactcattgctggcagatggcgttagctgtactcctaccgtcgagtacccctgtggcaagatccctatacttgaaaagcgcaacgccagtaagccccagggacgcatcgtgggagggaaggtgtgtccgaagggggaatgtccctggcaggtgctgctgctcgtgaatggggcccaactgtgcggtggtacactgatcaacacgatctgggtcgtctctgcagcgcactgtttcgacaagatcaagaactggcggaacctgattgcggttctgggcgagcatgatctgtctgaacatgacggcgatgagcagtcgagaagggtcgcgcaagttatcatcccgtcaacgtacgtccccggcacgactaatcacgacattgcgttgttgcgccttcaccagccggtcgttcttacggatcacgttgtaccactctgtttgccggagcgaaccttctctgagcgcaccttggccttcgtgcgtttttctctggtctcgggttggggacagcttctggaccgtggcgctaccgccttagagctcatggtgctcaacgtcccaagactgatgacgcaggattgcctgcagcagagccggaaggtcggcgactcccccaacataaccgagtacatgttctgcgccggttactccgacggcagcaaggatagctgcaagggtgactctggcgggccacacgcaacccactaccgcgggacctggtatttgactggcatcgtgtcgtggggacaaggttgcgccaccgtgggtcactttggggtttacacccgtgtctcccagtacatcgagtggctacagaagctgatgaggagcgagccacgcccgggtgtgcttctgcgcgccccgttcccg

SEQ ID NO: 2403 - DNA, 1398 bp, Artificial Sequence
  derived and/or modified sequence
atggtgtcacaggcactgaggcttctttgtctgcttcttggtttgcaaggttgtctggcagcaggaggggtggctaaggcgtcgggcggtgaaactagagatatgccttggaagcccggaccccatagagtttttgtcacccaggaagaggcgcatggagtcctgcaccgccgtcgtagagctaatgcatttctcgaggaactcagacccgggagtcttgagagagagtgcaaggaagagcagtgttcctttgaggaagcaagagagatattcaaggatgctgaacgcaccaagctgttttggattagctatagcgacggagatcagtgcgcttcatcgccttgtcagaacggtggatcatgcaaggaccaacttcagagctacatctgtttctgtttgcctgcatttgagggacgtaattgtgaaacccataaggatgaccaacttatttgtgtcaacgaaaacggaggatgtgaacaatactgtagcgatcataccggcaccaaaaggagctgtaggtgccacgagggatacagcctgcttgcagatggcgtgtcctgtactcctacggtcgaatacccgtgcggtaagattccaattctggagaaacgcaacgcttcaaaacctcaaggacgcattgttggaggcaaggtttgcccgaagggcgagtgtccatggcaggtgctcctgttggtgaatggagcccaactgtgtggtggtaccctgattaacaccatttgggtcgtctccgctgcacactgctttgataagattaagaactggcgaaatcttatagcagtgcttggagaacacgacctttctgagcacgatggtgatgaacaatcgcgacgtgtcgcacaggtgatcattccgtcgacctacgtgcctgggactaccaaccatgacatagcgctgttgcgattgcatcaacccgtggtgctgaccgatcatgtcgtgccactgtgtctccccgaacgcactttttcagaaagaacgcttgcattcgtccgctttagcctggtgtcgggctgggggcaacttctggaccgcggagcgaccgctcttgaacttatggtgctcaacgtaccaagacttatgactcaggattgcctgcaacagtcacgcaaagtgggcgactcccccaatatcactgagtacatgttttgcgcgggatactcagacggatccaaggattcgtgcaaaggtgactcgggtggacctcatgcaacccactatcgtggcacgtggtaccttaccggcatcgtttcgtggggacaagggtgtgccactgtgggtcatttcggagtctacacccgcgtctcgcaatacatcgagtggcttcaaaaacttatgcgtagcgaaccacgcccaggagtgcttctccgggccccattccct

SEQ ID NO: 2404 - DNA, 1398 bp, Artificial Sequence
  derived and/or modified sequence
atggtgagccaggcactgcggcttctgtgcttgctgctcggactgcaggggtgtctcgctgcaggaggggtggcgaaggcatcaggaggagaaacccgcgatatgccttggaagccaggcccccacagagtgttcgtgacccaagaagaagcacacggggtgctgcatagacggcggcgcgccaacgccttcctggaagaactcagaccaggatcgctggagcgcgaatgtaaggaagagcagtgctcgttcgaagaagctagagagattttcaaggacgcggaacgcaccaaactgttctggatttcctactccgacggggaccaatgcgcctcctcaccttgtcaaaatggaggtagctgcaaggatcaactccaaagctacatctgcttctgtttgcctgcgttcgagggacggaactgcgagactcacaaggatgaccagctgatctgcgttaacgagaacggcggatgtgaacaatactgctccgatcatactggcactaagcgttcgtgcagatgtcacgaaggttactccttgctcgctgatggggtcagctgcaccccgaccgtggaatacccctgtgggaagatcccgatcctcgagaagcgcaacgcctccaagccgcagggccggatcgtcggcggtaaggtctgcccgaaaggagaatgtccatggcaggtgctcctgttggtcaatggagctcaactgtgtggaggtactcttatcaataccatctgggtggtgtccgctgcccactgcttcgataagatcaaaaactggcggaacctgatcgcagtgttgggagagcatgacctgtcggaacatgatggagacgaacagtcacggcgcgtggcgcaagtcatcatcccgtcaacgtacgtgcccggtaccactaaccacgatattgcgctgctgcggctgcatcaacccgtcgtgcttaccgaccacgtcgtgccgctgtgtctgccggagcggactttctcagaaagaactctggccttcgtgcgcttttcgctcgtgagcggatggggacagctgctggaccggggcgcgaccgccctggaactcatggtgctcaacgtccctcggctcatgactcaggattgcctgcaacaatcaaggaaggtgggagattcccctaacatcactgagtacatgttctgcgcgggatatagcgacgggtcaaaggacagctgcaagggagactccggaggaccgcatgctacgcactacagaggaacttggtacctgactggaatcgtgtcctggggacagggatgcgcgaccgtgggtcatttcggagtatatacgcgggtcagccaatacattgagtggctccagaagttgatgcggtcggagcctagaccgggggtgctgctgagagctccgttccca

SEQ ID NO: 2405 - DNA, 1398 bp, Artificial Sequence
  derived and/or modified sequence
atggtgagccaggcattgaggcttctctgtctgctgctgggtctgcaaggctgtcttgcagcaggaggagtggctaaggcctcaggcggtgaaacccgagacatgccttggaagcccggtccgcatagagtgtttgtcacgcaagaagaagcccacggagtgctccaccgtagacgacgagcaaacgccttcctggaagagctcaggcccggttcgctcgaacgcgagtgtaaggaagaacagtgtagctttgaagaagctcgagaaatctttaaggacgcggaaagaactaagctgttctggatttcctacagcgacggagatcagtgcgcatcatcaccctgccaaaatggtggatcatgcaaggatcagctccagtcgtacatatgtttttgtctgccagcattcgaaggtcgcaattgtgaaacccacaaggatgatcagcttatttgtgtcaacgagaatggaggttgtgagcagtattgtagcgatcatactggaacgaagcggagctgtcggtgtcacgaaggatactccctgcttgcagatggcgtgagctgcactccgaccgtggagtacccctgtgggaaaatccctatcctggaaaagcggaacgcctctaaaccgcagggtcgaatcgtcggcggaaaagtgtgccctaagggtgaatgcccttggcaagtgcttctgctggtgaatggtgctcaattgtgcggcggaactttgattaacactatatgggtggtgtcggcggcacattgctttgacaagatcaaaaactggaggaaccttatagcggtcctgggggagcacgatctttcagaacacgatggcgatgaacagagccgccgggtggcccaggtcataatcccatccacctacgtgccagggactactaaccacgatattgccctcctcagattgcatcaacctgttgtgctgaccgaccatgtcgtcccactctgcctgcccgagagaaccttttcggaacggacccttgcatttgtgaggtttagccttgtgtcaggctggggacaactgttggaccggggagcgactgccctggaacttatggtcctcaacgtgccacgactcatgactcaggattgccttcagcagagccgcaaggtcggtgattcgccaaatatcaccgaatacatgttttgcgcaggctactcggatggaagcaaggatagctgcaagggtgattccggaggacctcacgcaactcattacagaggcacttggtacctcaccggaattgtgtcgtggggtcagggctgtgcgaccgttggccattttggtgtgtacacccgcgtcagccagtacattgaatggcttcaaaaactcatgcgctcagagccacgccccggagtcctgcttcgggcaccttttccc

SEQ ID NO: 2406 - DNA, 1398 bp, Artificial Sequence
  derived and/or modified sequence
atggtgtcgcaggcgctgaggctcctctgcctgcttctgggactgcaagggtgtctggccgcaggaggcgtggcgaaggctagcggaggcgaaacgagagatatgccttggaagccaggtccgcaccgggtgttcgtgactcaggaggaagcccatggcgtgctgcaccggcgcagaagggccaatgcttttctggaagaactgaggccgggatccttggagcgcgagtgtaaagaggagcagtgttccttcgaagaagcccgcgagatctttaaggacgccgagcggactaagctcttctggatctcctactcggatggagatcaatgcgcttcgagcccctgccaaaatggagggtcctgcaaggatcagctgcagtcctacatttgcttctgcctgccggcatttgagggacgtaactgcgaaacgcacaaggacgaccaactcatctgcgtgaacgagaacggaggatgcgaacaatactgctcggatcataccggcactaagcggtcatgtcggtgccacgaaggatactcactgttggctgacggggtgtcgtgcactcccaccgttgaatatccgtgcggaaagattccaattctggagaagagaaacgcatctaagccgcagggacggatcgtcggaggaaaagtctgccctaagggagaatgtccatggcaagtgctcctgctcgttaacggagcccaactctgtggaggtaccttgatcaacaccatttgggtggtcagcgccgcgcactgcttcgataagattaagaattggagaaacttgattgccgtgctgggagagcatgacctgtcagagcatgacggagacgaacagtcccggcgcgtggctcaggtgatcatcccgagtacttacgtgccgggcaccaccaaccatgacattgcactgctgagattgcaccaacccgtcgtcctgactgaccacgtcgtgcctctctgtctcccggaacgcacctttagcgaacgcactttggcgttcgtcagattctccttggtgtcgggatggggccagcttctggacagaggcgcaaccgccctggagctgatggtgctcaacgtaccacggctgatgacccaggactgtctgcaacagagcaggaaagttggagattcaccgaacattacggaatacatgttctgtgcgggatattccgacggaagcaaagattcgtgcaaaggagactcaggcggacctcacgcaacgcactatcgggggacttggtaccttacggggatagtctcctggggccaggggtgcgccactgtggggcatttcggcgtctacaccagggtgtcacagtacattgagtggctccagaaattgatgcgctcagaacctagacctggggtcctcttgcgcgcaccattccct

SEQ ID NO: 2407 - DNA, 1398 bp, Artificial Sequence
  derived and/or modified sequence
atggtaagccaagcacttcgtttgctgtgcttgcttcttggcttgcaagggtgtctggccgcaggaggagtggctaaggcgagcggaggcgaaacccgggatatgccttggaagcctggaccccatagggtgtttgtcactcaggaagaggctcacggagtcctgcataggcggcgccgggcgaatgcatttctggaggagttgaggccaggttcactcgaacgcgaatgcaaggaagaacaatgctcatttgaagaagcacgagagatcttcaaggatgcagagagaaccaaactgttttggattagctactccgacggtgaccagtgcgcttcgtcaccttgtcagaacggtggctcttgtaaggatcagcttcagtcatacatatgcttctgccttcccgcatttgaagggcgaaactgcgagactcataaagacgaccagttgatttgtgtgaacgaaaacggtggttgcgaacaatactgtagcgaccatactgggacgaagaggagctgtcgctgccacgagggctactctctgctggcagatggtgtgtcctgtactcccaccgtcgaatacccgtgtggtaagattccaatactggagaaaagaaacgcgtcgaagccgcaaggcagaatcgtcggaggcaaggtgtgcccaaaaggagaatgtccttggcaagtgcttctgcttgtgaatggggcacaactttgtggcggcaccttgattaacactatctgggtagtttccgccgcacactgttttgacaagatcaaaaactggaggaacctcattgctgtgctgggagaacatgatctgagcgaacatgatggggatgagcaatcaaggcgtgtggcgcaggtgattatcccgagcacttacgtccctggcacgaccaatcacgatattgcacttcttcggctgcatcagcccgtggtgctgaccgatcacgtggtcccactgtgtctccccgagcggacgttctccgaaagaacgctggcatttgtgcggttttcccttgtgtcaggctgggggcaacttcttgatcgcggcgcaaccgccctcgaattgatggtgctcaatgtcccacgactgatgacccaggattgtctgcaacagtcccggaaagtgggcgactcgcctaatatcaccgagtatatgttttgtgcaggatactcagacggatccaaggattcctgtaaaggtgatagcgggggccctcatgcaactcattatagaggtacttggtacctgaccggtattgtgagttggggacaaggatgtgccaccgttggccacttcggggtctacaccagagtgtcgcagtacatagaatggctccaaaagctgatgagatccgagcctagacctggggtgctgcttcgcgcacccttcccc

SEQ ID NO: 2408 - DNA, 1398 bp, Artificial Sequence
  derived and/or modified sequence
atggtcagccaggccctgcggcttctttgtctccttctggggctccaggggtgcctcgcagcaggaggagtggcaaaggcttctggcggagaaacccgggatatgccatggaaaccaggtcctcacagggtctttgttacccaagaagaagcccacggggtgctgcatcgacggagacgggccaatgcctttctggaagagctcagaccagggtcactggagcgcgaatgtaaggaagaacagtgttccttcgaagaggcaagagaaatcttcaaggacgccgaaagaacgaagttgttttggatcagctactccgacggggaccaatgtgcaagctcgccatgccaaaacggcgggtcgtgtaaggatcagcttcaaagctacatctgcttttgtctgcccgcctttgaaggccgtaactgcgaaacccataaagatgaccagcttatttgcgtcaacgagaatggaggatgtgagcagtactgttctgatcatacgggtaccaagaggtcgtgccggtgtcatgaaggttactccctcctggcagatggggtgagctgtaccccaactgtggaatatccttgcggaaagattcccatccttgaaaagcgtaacgcaagcaagcctcaaggtcgcatcgtggggggaaaggtgtgtcctaagggagaatgtccatggcaggtgcttcttcttgtgaacggagcacaactgtgtggaggcaccctcatcaacactatctgggtggtgtccgcagcacattgcttcgacaaaatcaagaattggcgcaacctcatcgcagtgcttggagaacatgacctgtcggaacacgatggagacgagcagtcacgccgtgtggcccaggtcataattccctccacctacgtgcctggcactaccaaccatgatatcgcactgctccgcctccaccagcccgtggtgcttactgatcatgtagtgccactgtgtctccccgagaggacgtttagcgagaggacgcttgcgttcgttcggttctcacttgtgtcggggtggggtcagcttctggatcgaggagcaaccgcactcgagcttatggtgctcaatgtgcctagactgatgacccaggattgtctgcagcaatctaggaaggtgggtgattcgcctaacattactgaatacatgttttgtgccggctacagcgatgggtccaaagatagctgcaagggagattcgggaggaccacacgccacccattaccggggtacctggtacctgactggtattgtgtcctggggtcaaggctgtgcaaccgtcggacactttggggtgtatacccgggtcagccagtacattgagtggctccaaaagctcatgcgctccgagccccgcccgggcgtccttctccgggcgcctttccca

SEQ ID NO: 2409 - DNA, 1398 bp, Artificial Sequence
  derived and/or modified sequence
atggtaagccaggcccttagactgctgtgcctcctcttggggctccagggctgtttggccgccggaggcgttgcgaaggcgtctgggggcgagacaagggacatgccttggaaacccggtccccaccgcgtgtttgtgacgcaggaagaggcacacggtgttctgcaccggcgcaggcgagcaaatgcttttcttgaagaactcagaccagggtctcttgaacgggaatgtaaagaagaacagtgctctttcgaagaggctcgtgaaattttcaaggatgctgagagaaccaaactgttttggatttcctacagtgacggcgaccaatgcgcatcttctccatgccagaacgggggatcctgcaaagaccagctgcaatcttatatttgtttctgccttcccgcattcgagggccggaactgtgagacacacaaggacgaccagctgatctgcgtcaacgagaacggaggctgtgagcagtactgctccgaccacactggaacaaagcgcagttgcagatgtcacgaaggatactctttgctagcagatggagtgtcctgtacacccaccgtggagtacccatgcgggaagattcccatccttgagaagaggaacgcgtctaaaccacagggccggatagtgggagggaaggtttgccctaaaggagagtgtccctggcaggtcctgctgctggtcaacggcgcgcagctgtgcggtggaacgctgatcaatacaatttgggttgtgtcagcggctcattgcttcgacaaaataaagaattggagaaacttgatcgcagtcctcggggagcatgacttatcagaacatgacggcgatgaacaaagtaggcgtgtcgcccaggtcattatccctagcacatatgtgcctggtaccacaaaccacgatatcgcgctattgagactgcatcagccagtggttttaaccgaccacgtcgtccctttgtgtctgccggagaggaccttctcagagcgcaccctagcattcgttcggttcagcctggtttccggatggggacaattgttggacagaggcgcgaccgccctggaacttatggtgctaaacgtccccagattgatgactcaggactgtcttcagcagtccagaaaagttggggatagtcccaacattacagagtacatgttctgcgctggttacagcgatggctcaaaggatagctgcaaaggggacagtggcggcccacacgccacacattatagagggacttggtatctgacggggatcgtctcctggggacagggttgcgccaccgtgggccatttcggggtttacacacgggtgagtcagtacattgaatggctacagaagctgatgcggtcagagccgcgccctggcgtccttcttagagcgccgttccca

SEQ ID NO: 2410 - DNA, 1398 bp, Artificial Sequence
  derived and/or modified sequence
atggttagtcaagcattgcgtctgctttgtctcctgctaggccttcaggggtgtctcgcggccggaggcgtcgctaaggcatccggcggggaaactcgggatatgccgtggaaacccgggccccatagagtgtttgtcacccaagaggaagcccacggcgtgctgcaccgaaggcgaagggccaatgccttcctggaagaattacgccctggatctcttgaacgcgagtgtaaagaggaacagtgttccttcgaggaggccagagagatatttaaagacgccgagaggactaagctgttctggatcagctatagtgatggcgatcagtgtgcaagctcaccctgtcaaaatggaggctcatgcaaggaccagctgcagtcctacatttgcttctgtcttcctgcattcgagggccgtaattgtgagacccataaggacgaccagcttatatgcgtcaatgagaacgggggctgcgagcagtactgttcagatcacaccggcaccaagcgatcttgtcgctgccatgaagggtactctctgctggccgacggagtaagttgtacaccaactgtggagtacccatgtggcaaaatcccaattttagaaaagaggaacgcatcgaagcctcagggacgcattgtgggtgggaaggtttgtcctaagggcgagtgcccctggcaggtattattattagtgaacggggcccaactgtgtggggggacccttataaacacgatatgggttgtttcagctgcgcattgcttcgacaagataaaaaactggaggaatttgatcgcggtgcttggtgagcacgacctctcagaacacgatggggatgagcagagtcgccgggtagcgcaggttatcatcccttcaacctatgtgcccggaactaccaaccacgacatcgccttgctgaggcttcatcagccggtcgtgctgactgatcacgtggtccccttgtgtctgccagagaggacattctccgaacgcactctcgcgtttgtgagattcagcctcgtttctgggtgggggcagctgcttgaccggggcgccacagcattagaattaatggtgctgaatgtccctagactcatgactcaggactgcctacagcagtcccggaaagtgggcgactcaccaaacattaccgagtacatgttttgtgccggttatagcgatgggtctaaagattcatgcaagggggattccggggggcctcacgctactcattataggggcacatggtacttgaccgggatcgtatcttggggacaagggtgcgctacagtcggccacttcggcgtgtatacacgggttagccagtatattgagtggctccagaagctgatgagaagcgagccaaggcccggggtgctgctcagggccccatttcct

SEQ ID NO: 2411 - DNA, 1398 bp, Artificial Sequence
  derived and/or modified sequence
atggtgtcccaagccttgaggcttctgtgtctgctccttggactgcagggatgccttgcggccggaggagtggcgaaagccagcgggggagaaacccgagatatgccgtggaagccaggaccgcatagagtgttcgtgactcaagaagaggcccatggagtcctgcaccgacgtaggcgcgcaaacgctttcctcgaggagcttcgcccaggatcactggaacgggaatgtaaggaggagcagtgttcgtttgaagaggcccgggaaatctttaaggacgcagagcggactaagctgttctggatctcatactccgacggggaccaatgcgcgtcatccccatgccagaatggaggatcgtgcaaagaccagctccagtcgtacatctgtttctgcctgccggcttttgagggaagaaattgtgaaactcacaaggatgaccagctcatctgcgtgaatgagaacggaggctgcgagcaatactgctcggaccataccggaaccaagcggagctgcaggtgccatgaggggtacagcctgctggcagatggagtgtcatgcacccctacggtcgagtacccttgcggcaagatccccatcctggaaaagcgcaacgccagcaagcctcagggccgcatcgtcggcggcaaagtctgccctaaaggagagtgcccgtggcaagtgctccttcttgtgaatggggcccaactctgtggaggcactctgatcaatactatctgggtcgtgtcggccgcccactgcttcgataagataaagaattggaggaacctcatcgcagtgcttggggaacatgatctttcggagcacgatggagacgagcaatctcgccgggtggcccaggtcattatcccctccacttacgtcccgggaaccactaatcacgacatcgcattgctgcggctccatcagccagtggtgctgactgaccacgttgtgccgctgtgcctgccagagagaaccttttccgaacggaccctcgccttcgtgcggttcagcctcgtctcaggatggggacagctgctggaccgcggcgccaccgcgctcgaactgatggtgctgaacgtgccgagactcatgactcaagattgcctccagcaatcgagaaaggtgggagactccccgaacatcactgagtacatgttctgtgccggatactccgatggatccaaagacagctgcaagggagactccggaggcccgcacgccacccactacagagggacctggtacctgaccggaatcgtcagctggggacaaggatgtgcaaccgtcggccacttcggggtctacacgcgggtttcgcagtacattgaatggctccagaaactcatgcggagtgaaccaagacccggagtgttgctgcgggccccttttcca

SEQ ID NO: 2412 - DNA, 1398 bp, Artificial Sequence
  derived and/or modified sequence
atggtgtctcaagccctgcgccttctgtgtctgctcctcggtctgcagggctgcctggctgcagggggtgtcgccaaggcaagtgggggggagacacgggacatgccctggaaaccaggaccgcaccgagtgtttgtgacccaggaggaggcgcatggggtgctgcatcgaagacgacgggctaacgcgttcctcgaagagctgcggccaggtagtcttgagcgtgaatgcaaggaagaacagtgttcatttgaagaagcgcgggagatttttaaagatgccgagagaacaaaacttttttggatcagttattctgatggcgatcagtgcgcctcctcaccctgccagaacgggggctcttgcaaagatcagctacagagctatatatgtttctgtctcccggccttcgaagggagaaactgcgagacgcacaaagacgaccagctgatatgtgtcaacgagaatgggggctgtgagcagtactgttccgatcacaccggcaccaagcgctcctgccgctgccacgagggctattcgctgcttgcggacggtgtatcgtgcacgccgacagtggagtacccttgtggcaagattcctattttggaaaagcgcaatgcatccaagccccaaggacgcattgttgggggaaaagtttgccctaaaggagagtgcccatggcaagtgctcttgctcgtcaatggggcccagctctgcggaggaacgcttatcaatacaatctgggtagtttccgccgcacactgtttcgataaaattaagaattggagaaacctaatcgctgttttgggggaacacgacctgtcggaacacgatggggatgagcaaagtagaagagtggctcaagtgatcatcccttcgacatacgtcccaggtacaacgaatcacgatatcgctttgctgagactgcaccaaccagtggtgctcacagatcatgtcgttccgctttgcctcccagaaagaacatttagtgaaaggacactagcttttgtgcgcttcagcctcgtctctggctgggggcagttgctggaccgaggagcaactgcattggagctcatggttcttaacgtgcctcgtctaatgacacaggactgtctgcagcaatcccgaaaagtgggggacagtccgaatattaccgaatatatgttctgcgccggatatagcgatgggagcaaagactcgtgtaagggcgactccggcggaccccacgccacccattacaggggaacgtggtatctcaccgggattgtgagctggggccagggatgcgctaccgtaggtcactttggcgtctacacaagggtctcccagtacatcgaatggctccagaaactaatgagaagcgaacctagaccaggagtcttactccgggctccgttcccg

SEQ ID NO: 2413 - DNA, 1398 bp, Artificial Sequence
  derived and/or modified sequence
atggtgagtcaggctctgaggctcctgtgcttgctcctgggccttcagggttgtctcgcagcaggtggagttgccaaagcatcaggcggggagacacgggatatgccttggaaaccgggcccccacagggtattcgtcactcaggaagaggcccacggggtgctccatcgccgtcgtcgcgccaacgcttttctggaagagctgaggcctggctctcttgaaagagagtgtaaggaggagcagtgcagcttcgaggaggccagggaaatctttaaggacgccgagcgtaccaaattgttttggatttcctattcggacggcgatcagtgtgccagttctccatgtcaaaatggagggagttgcaaagatcaactccagtcctatatttgtttctgcctgccagcatttgaagggcgtaattgcgagacgcacaaggacgaccagctgatctgcgttaacgaaaatgggggctgtgagcagtactgttccgatcatacagggacgaagcgctcttgccggtgccacgaagggtacagtctcctggccgatggcgtgtcttgtacacctaccgttgaatacccttgtgggaagattccaatcctcgagaaaaggaacgcaagcaaaccacaaggacgaatcgttggtggaaaagtgtgtccaaaaggcgagtgcccttggcaggttttattgctggtcaatggtgcacaactgtgtggaggcactttgatcaacaccatttgggtggtgtcagcagcacattgtttcgataagattaagaactggagaaacctaatagctgttttgggggagcatgacctgagtgagcatgacggcgatgagcagagtcgtcgcgtggcccaggtgatcatcccctcgacctacgttcccggtaccacaaaccacgacattgccctgcttaggctccaccagcctgtggtgctgacagatcatgtagtgcctctttgcctccccgagcgcacattctcggaaagaaccctggcctttgtgagattctccttggtttcgggctgggggcagctactagatcgcggagcaacagcactggagctcatggtgctcaatgtacccaggctcatgactcaagactgcctccaacagtcccggaaggtgggagacagccccaatataacggagtacatgttttgtgccggttacagcgatggatctaaggattcttgtaaaggtgatagcggcgggcctcatgctactcactaccggggaacctggtaccttaccggcatcgtcagttggggacagggatgcgctacggtggggcacttcggagtttatacgagagtgtcacagtatatagaatggctccaaaagctcatgcggagtgaaccgcgaccaggtgtgctgttgagagccccctttcca

SEQ ID NO: 2414 - DNA, 1398 bp, Artificial Sequence
  derived and/or modified sequence
atggtgtctcaggccctcagattgttgtgtctcctactcggcctccaggggtgtctggcagccgggggggttgcaaaggcttctggtggagaaacaagggacatgccatggaagcctggcccgcatcgagtgttcgtcacgcaagaggaggctcacggggtgttacacagacggcgccgtgctaacgcctttctcgaagagcttaggcctggaagtctcgaacgggaatgcaaggaggaacaatgctcctttgaggaagctcgtgaaatcttcaaagacgctgagagaacaaagctgttctggatcagctacagcgacggcgaccagtgcgcgtcatctccatgccagaatggcggtagttgtaaagaccaactacagtcatacatctgtttctgcctgcccgccttcgaggggaggaactgcgagactcacaaagatgatcagctcatctgtgtcaacgagaatggagggtgcgaacaatactgttctgatcacacaggaaccaaacggagttgccgatgtcacgagggatactcacttttagctgatggagtttcctgcactcccacagtggagtacccctgtggcaagatccctatactggaaaagaggaatgcaagtaagcctcagggaagaattgtgggaggcaaagtgtgtcccaaaggcgagtgtccttggcaggtcctgctgctggtgaacggggcacagttatgtggaggcacactcattaacactatttgggtagtgagcgcagcacattgcttcgataagatcaagaattggcgcaacctaattgccgtactgggggaacacgatttgagcgaacacgacggtgacgagcagtctcgtcgcgtggctcaggttatcattccttccacgtatgtccccggaacaacgaatcacgacattgctctcctccgactgcatcagcccgtggtgctgacggaccacgtcgtccctctctgcctgcctgagcgaaccttttcagagcgcaccctcgcattcgtgagattttccctggtctctggctggggccagctcttggatcgaggggctacggcacttgaactaatggtgttgaacgtgcctagattaatgacccaggattgtctgcaacagtcacgtaaggttggcgattctcctaatatcactgagtatatgttctgtgctggatatagtgatgggtctaaagactcttgcaagggggattcaggcggtcctcacgccacccattaccggggcacttggtacctaacgggcattgtgagctggggccaagggtgcgccacggtgggacacttcggcgtgtacaccagagtgtctcagtatatcgagtggttgcagaagctgatgagatccgagccaagacctggcgtccttctgagggcacccttcccc

SEQ ID NO: 2415 - DNA, 1398 bp, Artificial Sequence
  derived and/or modified sequence
atggtctctcaggctcttcgcctgctgtgcctcctgctgggccttcagggatgtcttgcagccggcggagtggctaaagccagcggcggtgagactagagacatgccatggaaacccggcccccatcgcgtttttgttacacaggaagaagctcatggcgtccttcatcggcgcagaagggcaaacgcattcttggaggaactgcggcctggaagtttagaacgcgagtgtaaggaggaacagtgcagctttgaagaagctcgggaaatattcaaggatgctgaacgtaccaagctgttttggatttcctactcagacggtgaccaatgtgccagctccccatgtcagaacggtggcagttgcaaagaccagttgcaaagttacatctgcttctgtcttccagccttcgaggggaggaactgcgaaacgcacaaagacgatcagctgatctgcgtcaacgaaaatggagggtgcgagcagtattgtagcgatcacacaggcactaagcgatcatgcaggtgtcacgaaggttacagtcttcttgctgatggggtgtcctgtaccccaactgtggagtatccgtgcggaaaaataccaatattggagaaaagaaatgcttcgaagccacagggcaggatcgtaggcggcaaggtttgtccgaagggagaatgcccatggcaagtgctgttgttggtcaatggtgcccagctgtgcggaggaactctcatcaacaccatttgggtggtatccgcagcacactgctttgacaagattaagaattggcggaacttgatcgcggttctaggggagcacgacctatccgaacacgacggcgatgaacagtctagacgcgtcgctcaggtgattatcccctccacctacgtgccaggcaccaccaatcacgatattgccttgttacgcctacatcagcccgtagtgctgactgaccatgttgtgccgctttgcctgcccgaaagaacttttagcgagagaacgctggcgttcgtccggttttcactggtgagcggttggggccaactgctggatcgtggagctacagctctggagctcatggtgctgaacgtccccagactaatgactcaggactgcctacagcaatctcgaaaagtcggagattcgcccaacatcaccgaatacatgttctgtgccggatattcagacggtagcaaagatagctgcaagggggactccgggggaccacatgctacacattaccggggcacatggtacctgactggcatcgttagttggggccaagggtgcgccacagttggacactttggtgtatatacccgtgtttctcagtatattgagtggttgcagaagctgatgcgcagtgaacccaggcccggggtgctcctgcgggccccattccca

SEQ ID NO: 2416 - DNA, 1398 bp, Artificial Sequence
  derived and/or modified sequence
atggtttcacaggccctgagactgctctgtctgctgctgggcctgcagggctgtctggctgcgggcggagttgcgaaggcttctggcggtgagacccgcgatatgccttggaagcccggcccccaccgcgtttttgtgacacaggaagaagctcacggtgtccttcatcgcaggagaagagccaatgcttttctggaggagcttaggcctggaagtctggaacgcgaatgtaaggaagagcagtgttccttcgaggaggcaagagagatcttcaaagatgccgaaaggacaaaattgttctggatctcttacagtgacggcgatcagtgtgcaagcagtccgtgccagaatggaggcagctgcaaagatcagctgcagtcatacatctgcttctgcctgccagccttcgaaggcaggaattgcgaaacccataaagacgaccaattgatctgcgtcaatgagaatggtggctgtgagcagtattgctcagatcacaccggaactaaaagatcatgtcgctgtcatgagggctattccctgctcgctgatggcgtttcctgtaccccaaccgttgagtacccgtgcggtaaaataccaatcttggagaagagaaacgcctcaaagccacaaggcaggatcgtaggcggcaaagtttgtcccaaaggtgagtgcccctggcaagttctgctgctggtcaatggtgctcagttgtgtggcggcactctgattaacacaatttgggttgtaagtgccgcccactgctttgataaaatcaaaaattggaggaacttgatcgctgtgctgggcgagcacgacctgagcgagcacgacggtgatgaacaatccagaagggtcgcacaggtcattatcccttctacatatgtgccaggcacaacgaaccacgatatcgctcttctgagattgcaccagcctgtcgtccttaccgaccacgtcgtgccgctctgtttgcccgagcgcaccttttcagaaaggacactcgccttcgtgagattcagtttggtgtccggttggggtcagctgcttgatcgcggtgccacagccctggagctcatggtgctcaacgtccccaggttgatgactcaggactgcctgcagcaaagcaggaaggtgggcgacagccccaacatcacggagtatatgttctgtgcgggttacagcgacggttccaaggactcctgcaagggagatagtggtggtccccacgccacccattacagaggcacatggtacctgactggcatcgtctcctggggccagggctgcgccactgtgggtcattttggtgtatacactagggtgtcccaatacattgaatggctgcagaagttgatgaggagcgagcctagacctggagttttgctgcgcgctcctttccct

SEQ ID NO: 2417 - DNA, 1398 bp, Artificial Sequence
  derived and/or modified sequence
atggtgtcccaggccctgcgtcttctctgtctgttgttaggtttgcaaggctgtcttgctgcaggaggagtggctaaggctagtggaggcgagactagggacatgccatggaaaccgggaccacatagggtgtttgtgactcaggaagaggcacatggggtactgcatagacgccggcgggccaatgctttcctggaggaattgcgacctgggtctctagagagagagtgcaaagaggagcagtgcagttttgaagaagcacgcgagattttcaaggatgctgaacgcaccaaactgttctggatctcctacagtgatggtgatcaatgtgcatcctccccctgccagaatggcggctcgtgtaaggatcagttgcagagctacatttgtttctgtttgcccgccttcgaggggcggaattgcgaaacccataaggacgatcaattgatctgcgtcaacgaaaacggtggttgcgagcaatattgctccgaccacactgggaccaaacgttcttgccgctgccatgagggatattcgctgctggcagacggagtttcctgtactcctaccgtggaatacccttgcggaaaaattcccattctcgagaagcggaacgcctcaaaaccccagggtcgcattgtcgggggcaaagtgtgcccgaagggcgaatgcccatggcaggttctcctgttagtgaacggcgcacaactgtgcgggggtaccctcataaacactatctgggtggtttccgcagcccactgtttcgataaaatcaaaaactggcgcaatttgatcgctgtgcttggcgaacacgatctctccgaacacgacggcgatgagcaaagccgacgggtggcccaggtgattattccgagtacttacgtgccagggactactaatcatgatatcgccctactcagattgcaccagccagtggtcctcacagaccatgtcgtaccactgtgcctgccagaacgaaccttctccgagcggacactagccttcgtccgcttctctttggtatctggatggggtcagctgttggaccgcggagctacagccctagaactgatggtgctaaatgttccacgactcatgactcaggattgccttcaacagagcagaaaagtaggggattcaccaaacataacagagtacatgttttgcgccggttactccgacgggtcaaaggattcatgcaaaggagatagcggcggaccccacgcgacccattaccgaggtacatggtatctgacaggaatcgtgagctggggacagggttgcgctaccgttggacatttcggggtgtacactcgagtctcccagtatatcgaatggctgcaaaaattgatgaggagtgagccacgaccaggcgtgctgctcagagccccatttccg

SEQ ID NO: 2418 - DNA, 1398 bp, Artificial Sequence
  derived and/or modified sequence
atggtgtctcaagcactccgtctgctgtgcttgcttctggggttgcagggatgtctggcggctggaggagtagccaaagccagcgggggcgaaacacgagacatgccgtggaaaccgggtccgcatagagtgtttgtgactcaggaagaggcccacggggtgttgcatcgccgccgtcgcgccaatgctttcctcgaggagttaaggccagggagtctggagagggaatgcaaggaagagcagtgcagctttgaggaggcacgagaaatctttaaggatgccgagcgaacgaaactgttttggatctcgtacagtgacggtgatcagtgtgccagcagtccctgtcaaaacggaggatcttgtaaagatcagctccagtcatacatttgtttctgtctgcccgcttttgagggcagaaactgtgaaacccataaagacgatcagctgatttgcgtcaacgaaaatgggggctgtgagcagtactgttccgatcacactggaaccaagcggagctgtcggtgccacgagggatactctcttcttgccgatggtgtgtcttgcacccctactgtcgagtatccttgcggcaagatacccatcctggagaaacggaacgccagtaagccccaggggcgaatcgttggcgggaaagtatgcccaaaaggagaatgcccctggcaggtgctactactggtcaacggggcccaactgtgcggcggtaccctaattaataccatttgggtggtcagcgcagcccattgctttgataagatcaagaattggcgcaacctgatcgctgtgctaggcgaacacgatctgtcagaacacgacggagacgagcagtcacggagggttgcccaggtgattatcccttccacttacgtacctggtactaccaatcatgatattgcactgctgagacttcatcaacctgttgtgctgaccgatcacgttgtcccactctgtttacccgagcggacattcagtgaaagaacactcgcatttgtgcgatttagtctggtgtcagggtggggccagctgttggaccgcggagccaccgcccttgagttaatggtcctgaacgtgccccgactaatgactcaggactgtttacagcagtcccgcaaggtgggtgattccccaaacattactgaatatatgttctgcgctggatactctgacggctctaaggactcgtgcaagggcgattccggtgggccgcatgccacgcactatagggggacgtggtatctcacagggatagtgtcatgggggcagggctgcgcaactgtgggtcacttcggggtgtatacacgtgtctctcaatacattgagtggctccagaaactaatgcgctcagagccgcggccgggggtattgctgagggctccgttccca

SEQ ID NO: 2419 - DNA, 1398 bp, Artificial Sequence
  derived and/or modified sequence
atggtgtcacaggccttgcgcctcctctgtctgctcttgggcctgcaggggtgcctggcagccggaggtgtggcaaaggccagcggtggagaaacccgcgacatgccgtggaagccgggaccgcatcgtgtgttcgtgacccaggaggaagcacacggagtcctgcacagacggaggagagccaacgctttcctggaagagctgcgcccgggtagcttggaacgggagtgcaaagaagaacagtgttcatttgaggaggccagagagatcttcaaggatgcagagaggactaaactgttctggatctcctactccgacggtgatcaatgtgcgtcatccccatgtcagaatggaggatcctgcaaggaccagctccagtcgtacatctgcttctgcttgccggcgtttgaaggaagaaactgcgaaactcataaggatgaccagttgatctgtgtgaacgaaaatggaggctgcgagcaatactgctcagaccacactgggacgaaacggtcctgccgatgccacgagggctattccctccttgctgacggagtgtcatgtaccccaactgtggagtacccgtgcggtaagatcccgatccttgagaaaagaaatgcgtccaagccacagggacgcattgtgggcggaaaagtgtgcccaaagggggaatgtccgtggcaggtgctgctcttggtcaatggcgcgcagctctgtggaggaaccctgataaacaccatctgggtggtcagtgcagcgcattgtttcgataagatcaaaaactggcgcaacctgatcgcggtcctcggagaacatgacctgtcggagcacgacggtgatgaacagtcgcgccgggttgctcaagtgattatcccgtccacttacgtcccgggaactaccaatcacgatattgccctgttgcgcctgcaccaacccgtggtcctgaccgatcacgtggtgccgctctgccttccagaaaggactttctcggagcgcaccttggcctttgtccgcttctccctggtttcggggtggggacaactgttggacaggggggcgaccgcgcttgagctgatggtccttaacgtgcctcgcctcatgactcaggactgcctgcagcagagccggaaggtgggagattcgcctaatatcactgaatacatgttctgcgcaggatacagcgacggtagcaaggactcttgcaaaggtgactcgggagggccgcacgcgactcactaccgcggaacttggtaccttaccggcatcgttagctggggacaaggctgcgctaccgtcggccacttcggcgtttacacccgggtttcccagtacatcgaatggctccaaaagctgatgcgtagcgagccgcgcccgggtgtgctcctcagagcccctttcccc

SEQ ID NO: 2420 - DNA, 1398 bp, Artificial Sequence
  derived and/or modified sequence
atggtgtcgcaggccctgagactgttatgtctgctcttgggtctgcagggatgcttggccgctgggggcgtggccaaagcctccggcggcgagactagagatatgccctggaaacctggaccccatcgggtgttcgtcactcaagaagaggcccacggggtactgcaccggcgccgtcgggctaatgcttttctggaggagctacggccaggttcgttggagcgcgaatgtaaagaagaacagtgctccttcgaagaggcaagagaaattttcaaggacgccgaacgcacaaaattgttctggatatcatacagtgatggtgaccagtgtgcaagttccccttgtcaaaacggtggcagttgcaaagatcagctgcagtcctatatttgtttctgtctgccagcctttgagggcaggaattgcgagacccacaaagatgaccagcttatctgcgtgaatgaaaatggcggctgcgaacaatattgtagcgaccacaccggaaccaagcgcagttgtcgctgtcatgaaggatattcactcctggcagacggcgtgagctgcaccccaactgttgaatacccatgcgggaaaattcccattctggagaaacgaaatgctagcaagcctcaaggtaggatcgtcgggggcaaagtgtgccccaagggcgagtgcccgtggcaggtgcttctgcttgtcaatggagcccagttatgcggggggacattgataaatacaatctgggtcgtttcggcagcccactgttttgacaagatcaagaattggcgcaacttgatcgccgtactgggagagcatgatctaagcgagcatgatggagacgaacagagcaggcgtgtcgcccaggtaataatccctagtacatatgtgccaggcaccaccaaccatgatattgccctgttgcgtttgcatcagcctgttgttcttacggaccatgtggttccactgtgcctccccgaaagaaccttttctgaaagaaccctcgcattcgtgcggttctccctggtgtccggttggggtcagctgctagaccgtggagccacggctctggaattgatggtcctgaacgtgccacgcctcatgactcaggactgcctgcagcagagcaggaaagtgggcgacagccctaacatcaccgagtacatgttttgcgccgggtacagcgatggcagcaaggactcctgtaagggcgactccgggggacctcacgcaactcattacaggggtacatggtacctgactggtattgtctcgtggggacagggatgcgctaccgtcggacactttggtgtgtataccagagtctcacaatacattgaatggctacaaaaactaatgcgtagcgagccaagaccaggcgtgctgctcagagccccgtttccc

SEQ ID NO: 2421 - DNA, 1398 bp, Artificial Sequence
  derived and/or modified sequence
atggtgagccaggcactgcgcctactgtgtctcctgctgggattgcaggggtgcctggcagctggtggcgtggccaaggcaagcggaggcgagacacgagatatgccttggaagcccgggccacatcgggtgttcgtcacccaggaggaagcacacggtgtgcttcaccggcgaagaagagccaatgcatttctggaggagctccgccccggatccctggaacgggagtgcaaagaagaacagtgtagctttgaggaggcccgcgagatctttaaagacgctgaaagaaccaaactgttctggatttcatattcagatggggaccagtgcgcctcatccccatgccagaacggagggtcctgcaaggatcagctgcagagttacatttgtttctgcctgccagcattcgagggcagaaactgcgagacccacaaagacgaccaactcatttgcgtgaatgaaaatggtggttgtgaacagtactgctctgaccacaccggtacaaaacgaagctgcaggtgtcacgaaggttatagtctgctggccgatggcgtgtcttgtactccaactgtggaatacccttgtgggaagatcccaatactggaaaaacggaatgcctccaagccacagggccgaatagtgggaggaaaggtttgtcctaagggcgagtgcccttggcaagtgctgctgctcgtgaacggagctcagttgtgcggcgggaccttaataaataccatatgggtggtaagcgcagcccactgcttcgacaaaatcaaaaattggagaaatttaatcgccgtgctaggagagcacgatctatctgagcacgacggtgatgagcagtcccggcgcgtggctcaagttatcattccaagtacatacgtgcccggaacaaccaaccacgatatagccctgcttcgattacaccagccagtggtactaactgatcatgtggtacctttatgcctgcccgaacggactttttctgagcgaacattggcattcgtgcggtttagcctcgtgagcggatgggggcagctgctggacagaggtgctactgccctggagctgatggtcctcaatgtgcctcgtctcatgacacaggactgcctgcaacagagccggaaagtgggcgattcaccaaatataactgagtacatgttttgcgccggatatagcgatggttccaaggatagttgtaagggagattccggaggacctcacgctacacattatcgcggcacttggtacttaacaggcattgtcagttggggccaggggtgcgccaccgtgggacatttcggcgtgtatactagggtaagtcagtatatagagtggttgcagaagctgatgcggagtgagcctagaccgggcgttttgctgcgagctcccttcccc

SEQ ID NO: 2422 - DNA, 1398 bp, Artificial Sequence
  derived and/or modified sequence
atggtgtcacaagccctgagactcttgtgcctgctgctgggactccaaggatgcctcgcagcaggaggcgtggccaaggctagcggcggagaaacccgggacatgccatggaaacctggcccgcaccgggttttcgtgacccaggaagaggcccatggagtgctgcaccggcgcaggagagccaacgcattcctggaagaactccggccaggctcattggaaagagagtgcaaggaggaacagtgttcatttgaggaagcccgggaaatctttaaagacgcagaacgcaccaagctgttctggatttcatattccgatggtgaccagtgcgcctcgtccccgtgccagaacggaggatcgtgcaaagatcagctgcaatcgtacatctgtttctgcctgccggcgtttgaaggacggaactgtgagactcacaaagacgatcaactgatctgcgtgaacgagaacggagggtgcgagcagtactgttcggatcacaccggcaccaagcgcagctgtaggtgtcacgagggttactcccttttggccgacggagtctcatgtacgccgactgtcgagtacccgtgtggaaagatcccgatcttggaaaagcggaatgcttccaaaccgcagggtcgcatcgtcggcggaaaggtgtgcccgaagggcgaatgcccatggcaagttcttctcttggtgaacggcgcccagctctgcggcggtacgctgataaacaccatttgggtggtatcggccgctcactgtttcgataagattaagaactggagaaacctgatcgccgtgctgggagagcatgatctgtccgaacacgatggagatgaacagagcaggcgcgtggcacaggtcatcatcccttccacctacgtccccggaaccaccaatcacgatattgcactgctcagactccatcagccagtggtgctgaccgatcatgttgtgccgctctgcttgcctgaacggacgttctctgaaagaaccctggccttcgtgcgattctcgctggtgtcgggctggggacagctccttgaccgtggagcgacggcactcgaactgatggtcctcaacgtgccacggctcatgactcaggactgcctccaacagtcgcggaaggtgggagactcgccgaacattactgaatacatgttctgcgccggatactccgatggatcgaaggactcatgcaagggagactccggtggcccccatgcgacccactatcgtgggacctggtaccttacgggaatcgtctcgtggggccagggttgcgccacggtcggacatttcggagtgtacactagagtgagccaatacattgagtggctgcaaaagctgatgagatcggaaccgcggccaggagtcctgctgagagctccgtttccc

SEQ ID NO: 2423 - DNA, 1398 bp, Artificial Sequence
  derived and/or modified sequence
atggtcagccaagcgctgcggcttctctgccttctgcttggactgcaaggttgtctggctgccggaggagtcgcaaaggcatcagggggcgagactcgagacatgccttggaagcctggaccacacagagtctttgtcacccaagaagaagcacacggggtcctgcatcgcaggagacgggcgaacgcctttctcgaggagctgaggcccggcagcctggaacgtgaatgtaaagaagaacaatgttccttcgaagaagcacgcgagatctttaaggatgcggagagaacgaaattgttctggataagctattccgacggtgatcaatgtgcaagctcgccgtgccaaaacgggggatcgtgcaaagatcaactgcagagctacatttgcttttgcctgccagcctttgaaggccgaaactgcgagactcacaaagacgaccagcttatttgtgtgaatgagaatggtggctgtgaacaatactgttcggaccatactgggaccaagcggtcgtgcaggtgtcatgagggatactccttgctcgccgatggtgtgtcctgtactcctaccgtggagtacccttgcgggaagatcccaattctcgaaaagagaaacgcatcaaagccgcaaggcagaattgtgggcggaaaggtgtgtcctaaaggagaatgtccctggcaggtgctgcttctggtgaatggtgctcagctgtgtggtggtaccctgattaacactatttgggtcgtttcggcagcgcattgcttcgacaaaatcaagaattggcgtaaccttatagcagtgctgggagagcatgatctttcggagcacgatggcgatgagcagagcaggagagtggcacaggtcattatccctagcacctatgttcctgggaccacgaaccatgacatcgcgcttctgaggctgcatcaaccagtcgtccttactgaccatgtggtgccactttgtctcccggaaagaactttttccgaaagaacccttgcattcgttcgcttttcccttgtgtcaggttgggggcagctcctggacaggggcgccaccgcacttgagctcatggttctgaacgtgccccggcttatgacgcaagactgcttgcagcaatcgagaaaagtgggtgactcgccaaacatcactgaatacatgttctgtgcaggatactcagatggatcaaaggattcatgcaagggtgatagcggggggcctcacgcaacgcattacaggggaacgtggtacctcacgggcatcgtctcgtggggacagggatgtgcgaccgtgggtcactttggagtttacaccagagtgagccagtacatcgaatggctccaaaagctgatgcgttccgaaccccgtccaggtgtgctgctgagagcaccgtttcca

SEQ ID NO: 2424 - DNA, 1398 bp, Artificial Sequence
  derived and/or modified sequence
atggtcagccaggctctccgcttactctgcctgctcctgggactgcaaggatgtctggcggcgggcggtgtggccaaggcctctgggggcgaaacacgagacatgccttggaagccaggtccccacagggttttcgttacccaggaagaggcacatggtgtcctccatagacgccggcgcgcgaacgcgttcctggaggagctgagacctggatcgctagagcgtgagtgcaaagaggagcagtgctccttcgaggaagcgcgtgaaatcttcaaggacgccgaacgaacgaaacttttctggattagctattcggatggagaccagtgtgcttcttccccgtgccagaatggcggttcctgtaaggaccaactgcagtcgtacatctgcttctgcctcccggcctttgagggcaggaactgcgagactcacaaggacgaccagttgatctgtgtgaacgagaacggcggctgcgagcagtattgttccgaccatacgggcactaagcggtcttgccgctgtcatgagggatattccctcctggccgacggtgtgtcatgcactcccacggttgagtacccctgtggtaagattcccatattggagaagcgaaatgcttccaagccacagggccggatcgtgggtggcaaggtgtgtccaaagggtgaatgcccatggcaagtcctgttactggtcaacggcgcgcagctgtgcggtggaaccctgattaataccatctgggttgtttccgccgctcactgctttgataaaattaaaaattggcgtaatttgatcgctgtacttggcgaacacgacttgagcgaacacgatggagatgaacagtctcgcagggtggcgcaggtgatcatcccatctacttacgtgcccggaaccaccaaccatgatatagctttgttgcggttacaccagccagtcgttctcaccgatcacgtggtgccgctgtgccttccggaacgaacgttttccgaacgtacgctcgctttcgtgcgcttctcgttggtgagcgggtggggccagctgttagaccgcggtgccacggctcttgagctaatggtcctgaacgtgccaaggttgatgacccaagactgtctgcagcaaagtcggaaggtcggcgactccccgaacattaccgagtatatgttctgcgccggctactctgatggctccaaggattcctgcaagggagattccggaggaccacacgcaacacattacaggggtacctggtacctaacgggcatcgtatcgtggggccagggctgcgccaccgtcggtcacttcggagtttacactcgggtgagccagtacatagagtggctgcagaagctaatgaggtctgaaccgcgcccgggtgtcttgttgcgtgctccatttccc

SEQ ID NO: 2425 - DNA, 1398 bp, Artificial Sequence
  derived and/or modified sequence
atggtcagtcaagcacttaggctgctctgtcttctgcttggtttgcagggatgccttgctgcaggtggtgttgctaaagcttctggcggagagactcgtgacatgccctggaaaccaggtccccatcgcgtgttcgtcacacaggaagaagcccatggtgttctgcatcgcagacgccgtgctaacgcctttttggaagagctgagacccggttcactggaaagagaatgcaaagaggaacagtgctccttcgaagaggcaagagaaattttcaaagatgctgagagaacaaagttgttttggatcagttactctgacggcgatcaatgcgccagctctccttgccaaaatggaggttcttgtaaggatcagctccaatcttatatctgcttctgcctcccagcctttgagggcaggaactgtgagacacacaaggacgatcaactcatctgtgttaacgagaacggcggctgcgagcagtactgtagcgatcatactggcaccaagaggagttgccgctgtcacgagggttattcacttctggccgatggtgtctcctgtacccctactgtggagtatccttgcggtaagatccccattctggagaagcgcaatgccagtaagccccagggtagaatcgtcggcggcaaagtctgtccaaagggagagtgcccctggcaggtactcttgctggtgaacggtgcccagttgtgcggcggcactctgattaacaccatctgggtggtaagtgcagctcactgctttgacaaaatcaaaaactggcgcaatctgattgctgtcctgggagagcacgacctgtctgaacatgacggcgacgaacagtcacgccgtgtcgctcaagtgattattccttccacctacgtgccaggaacaactaaccatgacatagccctgctgcgcttgcatcagcccgtggtcctcactgatcacgtcgtcccactgtgtcttcctgagaggactttctcagagaggacactggcttttgtcagatttagcttggtctccggctggggccaattgctggacaggggagctaccgcccttgaacttatggtgttgaatgtaccacgtttgatgactcaggattgtctgcaacagtcccgcaaggttggagattcccctaatatcaccgaatacatgttctgtgccggctacagtgatggttctaaggactcttgcaagggcgactcaggaggccctcacgcaactcattacaggggcacatggtaccttaccggaattgtgtcttggggtcagggctgcgccactgtgggtcacttcggcgtttacaccagggttagtcagtacatcgagtggctgcagaaactgatgaggtctgaacctaggcctggtgtgctgctcagagcaccattccca

SEQ ID NO: 2426 - DNA, 1398 bp, Artificial Sequence
  derived and/or modified sequence
atggtgtcacaagcgctgcggctgctgtgtttgcttctcgggttgcaggggtgtctcgcagcaggtggagtcgcgaaagccagcggcggagaaactcgggatatgccttggaagccaggtcctcacagagtgtttgttactcaggaagaagcgcacggagtgcttcataggaggcgtcgcgcaaacgcgtttcttgaagaacttagacctggatcgctggaaagagagtgcaaggaggaacaatgttcttttgaggaagcgcgtgagatcttcaaggatgcagaaagaaccaagctcttctggatttcgtactcagatggagatcaatgcgcatccagcccatgtcaaaatggaggatcgtgtaaagaccaacttcaatcgtacatatgcttttgccttcccgcatttgaaggtcggaattgtgaaactcataaggatgaccaacttatttgcgtcaacgaaaacggtggttgtgagcaatactgtagcgatcacaccggtaccaagcgctcctgtaggtgtcatgagggttactcactgctggccgatggggtgtcatgcacccctacggtggagtacccttgcgggaaaatccctatcctcgagaagagaaacgcatccaagccccaaggacgcatagtggggggaaaggtctgtccaaagggagaatgtccctggcaagtccttctgttggtcaatggggcacagttgtgcgggggcactctgataaacaccatctgggttgtctcggcagcacattgctttgacaaaatcaaaaactggcggaatctgattgcagttcttggagaacacgatctgtctgagcatgacggggatgagcagtcgcgacgggtggcccaggtcattattccttctacttacgtgcctggaactactaaccatgatattgcccttttgcgcttgcaccagcccgtggtgcttaccgaccatgttgtgccgctttgtctgccagaacgcaccttctcggaaagaacgctggcatttgtaagattctcgcttgtatcgggatggggccaacttcttgaccgcggtgcaactgcgctggaactgatggtgctcaacgtgccccgtctgatgactcaggattgtctgcaacagtcccgaaaggtcggtgattcgcctaacattaccgagtacatgttctgtgccggttattccgacgggagtaaggacagctgtaagggcgattcgggcgggccacacgctacgcattacagggggacctggtaccttacgggaatcgtgtcctgggggcaaggatgcgccaccgtgggacattttggagtgtacaccagagtctcccagtacattgagtggcttcagaaattgatgcgatccgaaccgcgccccggggtgctgttgcgggcaccttttcca

SEQ ID NO: 2427 - DNA, 1398 bp, Artificial Sequence
  derived and/or modified sequence
atggtctcacaagctcttaggttactctgccttttgctgggacttcaaggctgcctcgcggcagggggtgtcgctaaagcttcgggtggcgagaccagagatatgccttggaaaccaggaccgcatagagtattcgtcacacaggaagaagcccatggcgttctgcatcggcggcgccgagcgaacgcatttctggaagaactgagaccggggtcattggaacgcgagtgcaaagaagaacaatgctcttttgaggaagcgagggaaattttcaaagatgctgaacgtactaaactcttctggataagttactcagacggcgatcaatgcgcatcatctccttgtcaaaatggcgggagctgcaaagaccaattacagagttatatctgcttttgcctaccggcgttcgagggaagaaattgcgagactcataaagatgaccagctgatttgtgttaatgaaaacggtgggtgcgagcaatattgttctgatcacacgggtacgaaacggtcttgccgctgtcatgaaggctactctttactggctgacggcgtaagctgtacgccaacagttgagtatccgtgtgggaagatcccaattttggaaaaacgcaacgcttcgaaaccccaggggagaatcgtcggcggaaaagtgtgccctaaaggcgaatgcccgtggcaagtcttgcttctggtcaatggggctcagctgtgcggtgggaccctaattaatacaatatgggtcgtttccgcggcgcattgttttgataaaatcaaaaattggagaaatctgattgctgtactgggagaacatgacttatcagaacatgacggcgatgagcagtcgagacgagttgctcaggtgatcatcccgtctacgtatgtaccgggtacgactaatcatgatattgctctcctgcgcctccatcaaccggtagtgctcacggaccacgtagtaccgttgtgtcttcccgaacgcacgttttcagaacgtacccttgccttcgttagattttctcttgtgtcaggttggggacagctgctggatcgaggggccacagcccttgagcttatggtccttaatgtcccgcgtttgatgacacaagactgcctgcaacagtctaggaaagttggggactcgcctaacattacggagtatatgttttgtgcgggctattcagatgggtccaaagattcatgcaaaggcgacagcggcggaccgcacgccactcattaccgcggtacgtggtacctgacaggaatcgtttcttggggccaagggtgtgccactgttggacattttggtgtttatacaagagtctcacagtacatcgagtggctccagaagcttatgcgttctgagccacgcccaggcgtgcttttgcgcgcgccttttcca

SEQ ID NO: 2428 - DNA, 1398 bp, Artificial Sequence
  derived and/or modified sequence
atggtgtctcaagcgctccggctgctatgcttgctgttgggattgcaaggatgtttggcagcgggcggagtggctaaggcatctggaggagaaacacgcgacatgccctggaaacccggtccacaccgcgtgttcgttacccaggaggaagcacacggcgttctgcacagacgaaggcgtgcaaatgcttttttagaggagctgcggcctgggagtctggaacgggaatgcaaagaagaacagtgtagcttcgaagaggcacgcgagatctttaaggacgctgaacgtactaaactgttttggatctcatacagcgacggggatcagtgtgccagctcaccatgccagaacggaggatcatgtaaagatcagctgcagtcctacatttgcttctgtctcccagcgttcgaagggcgaaactgcgagacacacaaagatgaccagttgatttgtgttaacgaaaacgggggctgcgaacagtactgttccgaccacacaggcacaaaaaggtcttgccgatgccacgaagggtactccctcctcgccgacggtgtcagttgcacgccaactgtagaatacccctgtggtaaaatcccaatcctggagaagcggaatgctagcaagcctcagggacgtatcgtggggggaaaggtgtgtccgaaaggtgaatgtccatggcaggtcctcttattagtgaacggagcgcagctgtgcgggggcaccctcatcaacacaatttgggtcgtttctgctgcacactgctttgacaaaatcaagaattggagaaaccttattgccgtgctgggcgaacacgatctctctgagcacgatggtgatgagcaatcacgccgcgtagctcaggtgatcatcccctctacctacgttcccggcaccaccaatcacgatattgccttgttgcgtttgcaccagcctgtagtgctgacagatcacgtggtgcccctgtgcctgccagagaggacgttctcagaacgaaccttggccttcgtgcgcttctctctcgtatcagggtgggggcagctgctcgatagaggagctacagcactggagctgatggtcttaaacgtgccaagattgatgacacaagattgcctccagcagtcacggaaggttggtgattctcccaatataactgaatatatgttttgtgctggatacagcgatgggagtaaggactcctgcaagggggattccggcggaccccacgctacacattacagggggacgtggtatctgacaggaatagtgtcctggggccagggctgcgccaccgtcggccattttggcgtgtacacacgagtttcacagtatattgagtggctccaaaagctcatgaggtccgagccgcggccaggggtcttgttgagagcaccgtttcct

SEQ ID NO: 2429 - DNA, 1398 bp, Artificial Sequence
  derived and/or modified sequence
atggtgtcccaggccctccgattactgtgccttttgctcggactgcaggggtgtttggccgcgggaggcgttgccaaggcatctggaggggagacaagagacatgccatggaagccgggaccgcatcgcgtattcgtgacacaggaggaggcccacggtgtcctgcatcgccggcgccgggcgaatgctttccttgaagaattgcgcccagggtcactggaacgagaatgcaaagaagagcagtgttctttcgaagaagctagagagatctttaaggacgctgagcgtacaaagctcttctggatctcttactctgacggggaccagtgtgcaagttctccttgccagaatgggggcagctgcaaggatcagctgcaatcttatatatgtttctgcttgccagccttcgagggcagaaattgtgaaacccataaagacgaccagctgatttgtgtgaatgaaaacggcggatgcgagcaatactgtagcgatcatacaggtactaagaggagctgtcgttgccacgaaggctattcccttctggccgacggcgtcagttgtacccccacggtcgaatacccctgtggaaaaatacccattttagaaaagaggaatgcgtccaagccccaaggccgcattgtcggagggaaggtatgtcctaaaggtgagtgcccatggcaggtgttgctgctagtcaatggtgcacagttgtgtggtggcaccctaattaataccatttgggtcgtatccgcagcccactgtttcgataaaattaaaaactggagaaacttgatcgctgtgctgggcgaacacgacttgtcagagcatgacggagacgagcagagtcggcgcgtggcgcaggtgattataccttccacatatgtgcccggcaccaccaaccatgacatcgctctgctgcgcctgcatcaaccggtggtgctgaccgaccacgttgttccactgtgcctaccggagaggaccttttccgaacggacgttggcttttgtgagattctccctggtcagtggctggggccagctgttagaccgtggggccaccgcccttgaactgatggttctaaacgtgcctaggcttatgactcaggattgtctgcagcagagcaggaaggtgggcgacagtccaaacatcactgagtatatgttctgcgcaggatattccgacgggtcaaaggactcctgtaaaggcgatagcggtgggccccacgcaactcactacaggggaacctggtatctgacaggaattgtgtcatggggccagggatgtgcaaccgttgggcatttcggagtttacaccagggtctcccagtatatagagtggctgcagaagctgatgcgctcggagcctaggccaggcgtgttactgcgtgcccctttcccg

SEQ ID NO: 2430 - DNA, 1398 bp, Artificial Sequence
  derived and/or modified sequence
atggtgtctcaggccctgagattgctgtgtctgctcctggggctgcagggatgtctggcagccggcggagtggccaaggctagtggcggcgaaacacgcgatatgccttggaagccagggccccaccgtgtctttgtcacacaagaagaggcccacggggtgctgcacaggaggcgccgagcaaacgcattccttgaggagctcagaccgggtagcctggagcgagagtgcaaggaagaacagtgtagcttcgaagaggcccgtgaaatttttaaagatgccgaaaggaccaagctattttggatttcttattccgatggagaccagtgtgcctcttcgccctgtcagaacgggggcagctgcaaggatcagctgcagagctatatctgcttttgtctgcctgccttcgaagggcgtaactgtgagacacacaaggatgatcagttgatctgcgtgaatgagaatggcggctgcgaacagtactgctccgaccatacagggacaaagcgctcctgccgctgtcacgaggggtactcactgctggcggatggagtctcctgtacgcccacggtcgaatatccatgtggcaagataccaattctagaaaagcgaaacgcctccaaaccccagggacgcattgtgggcggcaaggtttgccccaaaggggaatgtccctggcaggtactcttgctggtgaacggtgctcagctgtgtggcggcacccttataaatacaatttgggtggtctctgctgcgcactgctttgacaaaatcaagaactggcggaaccttatcgcagtgttgggcgagcacgacctctccgaacatgacggggacgagcaaagcagacgcgtggcccaggtgattatccccagtacctatgtgcccggtactacaaaccacgacatcgcactcctgagactgcatcagcccgtggtactgacagatcatgtagtgcccctgtgcttacctgagaggacattcagtgagcggaccctggcgttcgtgcgcttttccctggtctcgggatggggccagctcctcgaccgaggcgccacagctctggaacttatggtgctcaacgtcccgagattaatgactcaggactgtctgcagcagtcccgcaaagtcggagatagtccaaatatcaccgaatatatgttctgtgccgggtacagtgatggatctaaagactcttgcaagggcgactctggcgggccgcatgctacacactatcgagggacttggtatctgaccggaatcgttagctggggacagggatgtgcaacagtggggcactttggggtctatacccgcgtgtcgcaatacattgaatggctgcagaagctcatgagaagcgagccacggccaggtgtactacttagagccccatttccc

SEQ ID NO: 2431 - DNA, 1398 bp, Artificial Sequence
  derived and/or modified sequence
atggtaagccaggcgctccggctgctgtgtctgctgcttgggcttcagggctgtctggctgcaggaggagtggccaaagcatcaggtggcgaaacgcgcgacatgccgtggaagcctggcccccacagagtctttgtgactcaagaggaagcgcacggagtgttgcatcgtcgcaggcgagctaacgccttccttgaggagctgcggccaggttcgttggaaagggagtgtaaggaagagcagtgctcctttgaagaagcccgggaaatcttcaaggacgccgagcgcaccaagctgttttggatctcctactccgatggggatcaatgtgcaagctccccatgccaaaacggcggaagttgtaaggatcagctccagtcctatatctgcttttgccttcccgcattcgaagggagaaattgcgaaacccacaaggatgaccaactgatatgtgtgaacgaaaacggtgggtgcgaacaatactgtagcgaccatactggcacgaagagatcatgtcggtgccatgaaggatactccctgttggcggatggagtcagctgcacccctaccgtggagtacccgtgtggaaagattcctattctggaaaagcgaaacgcatccaagccacaggggcgtatcgtgggaggcaaagtgtgtccaaagggggaatgtccttggcaggtccttttgctcgtgaatggtgcacaactgtgtggaggtaccctgataaacactatttgggtggtgtctgccgctcactgctttgataagattaagaactggcggaaccttattgctgtccttggtgagcatgacctgtccgagcatgatggagatgagcagtctcgaagggtggcacaagtcattatcccctcaacttacgtgcctggtaccactaatcatgacatagcccttctcaggctgcatcagccagttgtcctcaccgatcatgtggtgcctctgtgtctccctgagaggactttctcggaacgtactttggcttttgtgagattttcgctggtgtcaggctggggccaacttctggaccgaggcgcaactgcattggaactgatggttcttaatgtgcctcgtctcatgacccaggattgcctccaacaatcaaggaaagtgggagacagccctaacatcacggagtacatgttttgcgcaggatattcggacgggtctaaggattcctgtaagggcgattcagggggccctcatgcaacccactacaggggcacctggtacttgaccggtatcgtgtcatggggacagggatgtgcaaccgtggggcactttggagtgtacactagggtttcacaatacatcgaatggctgcagaagctcatgagatcggagcctaggccaggggtgctccttagagccccttttccg

SEQ ID NO: 2432 - DNA, 1398 bp, Artificial Sequence
  derived and/or modified sequence
atggtcagccaggctctgcgcctgctgtgcctgctgctgggactccaaggatgtttggcagccggaggagtggctaaggcgtcgggtggagaaacccgcgacatgccttggaaaccgggaccgcaccgcgtctttgtcacccaagaagaggcgcacggcgtcttgcatcggcggcggcgggccaacgcttttctggaagagctccgccctggttcgcttgaacgggaatgcaaggaagaacaatgtagctttgaggaagccagagaaatcttcaaggacgccgaacgcactaagctgttctggatcagttactccgacggcgaccagtgcgcatccagcccatgccagaatggagggagctgtaaggaccaattgcaatcctacatctgtttctgtctgcccgcgtttgagggacggaactgcgaaactcacaaggacgaccagctgatttgtgtgaatgagaacggtgggtgcgaacagtactgctcggatcacactggaaccaaacgcagctgcagatgtcacgagggatactcactgcttgcagacggtgtctcgtgcaccccgaccgtcgagtacccttgcggcaaaatcccgatccttgaaaaaagaaatgcctcaaagcctcagggaagaattgtgggcggcaaggtctgccctaagggcgaatgcccatggcaggtgcttctgttggtgaacggcgcccagctgtgtggcggcactctcatcaacaccatctgggttgtctctgcggcccattgcttcgacaagatcaagaattggagaaaccttatcgcagtcctgggcgagcatgatctgagcgagcacgatggggacgaacagtcgcggcgggtggcgcaggtgattatcccatcgacctacgtgccgggaactaccaatcacgacattgccctgttgcgcttgcatcagccggtggtccttaccgatcatgtggtgccactgtgcctcccagagcggaccttctccgaacggactctggccttcgtgcggttttccctggttagtggatgggggcagttgctggatcgcggagcgactgccctggagctgatggtgcttaatgtgcctcgcctgatgactcaggactgtctgcaacagtcacggaaggtgggcgacagcccgaacatcactgaatacatgttttgtgctggctactcagatggaagcaaggactcgtgcaagggagattccggaggcccacacgccacccattacagaggaacttggtacctgacgggtatcgtgtcctgggggcaggggtgcgctactgtgggccactttggagtgtatactagggtgtcccagtacattgaatggctgcagaagctgatgaggtcggagccgcgacctggagtgctgctgagagctccattcccg

SEQ ID NO: 2433 - DNA, 1398 bp, Artificial Sequence
  derived and/or modified sequence
atggtctctcaggctctcaggctcctctgtcttcttctagggctccaggggtgcttggccgcaggcggagtggccaaggccagcggcggggaaacgcgggatatgccctggaaacccggtccccaccgggtatttgtcacacaggaggaagcgcatggagtcttgcatcggagaagacgagcaaatgccttcctcgaagagctaaggccaggaagtctcgaacgtgagtgcaaagaggagcagtgttcattcgaggaggcaagagaaatcttcaaagacgcggagcgtactaaactgttctggatctcctactctgatggtgaccagtgtgcaagttcaccgtgtcagaatggcggctcctgtaaggaccaattacagagttacatctgcttctgtctgcccgccttcgagggaaggaattgcgagacacataaggacgaccaactaatttgcgtgaacgaaaacggaggttgcgagcagtattgttccgaccataccggtacgaagcgaagctgcagatgccacgaaggttacagtcttttggccgatggagtcagctgtaccccaacggtcgagtacccctgtgggaagattcctatacttgagaaaaggaacgcgtccaagccccaggggcgcatagttggagggaaggtgtgtcctaaaggcgaatgcccgtggcaggtcttgctcctcgtcaacggggcacaactatgcggaggcaccctgatcaatacaatatgggtggtcagcgcagcccactgcttcgacaaaatcaaaaattggaggaatcttattgccgtgctgggcgaacatgacctatcggaacacgatggggatgaacagtcaagacgggttgcgcaggtgatcattccatctacttacgtccctgggactactaaccacgatatcgccttgttaagattgcatcagcccgtggtgttgactgatcacgtagtgccgctgtgtttgccggagagaacattctcagagagaacccttgcttttgtgcggttcagcctggtttctgggtggggacagctgctggatagaggcgccacagccctggagctgatggtgctgaatgttcctcggctgatgacacaggattgtcttcaacagtcccggaaagttggcgactctccaaacatcacagaatacatgttctgcgcggggtacagcgatgggtctaaagactcatgcaagggcgactccggcggtccccatgccactcattacaggggcacctggtatctgaccggcatcgtctcctggggacagggttgcgcgacagtgggtcacttcggtgtctacacacgagtgtcacagtatattgaatggctgcagaagctgatgcgtagcgagcctcggcctggggttctactacgcgcacccttccca

SEQ ID NO: 2434 - DNA, 1398 bp, Artificial Sequence
  derived and/or modified sequence
atggtgtcacaagcactgcgattgttatgccttttgttgggtttgcaggggtgcctggccgctggaggcgtggctaaggcttcaggaggcgagacccgggatatgccttggaagcccgggccccacagggtgtttgtcacgcaagaagaggcgcacggagtgcttcatcgtcgccgaagagccaacgcttttctggaggagctgagacctggctccctggagagggagtgcaaagaggaacagtgctcattcgaggaggctagagagatcttcaaagatgccgagcggactaagttgttttggatatcctacagcgacggggaccagtgtgcttcttcaccctgtcagaatggaggaagttgtaaggatcaactgcaatcttatatatgtttctgcctcccagcttttgagggtcgtaactgcgagactcacaaggatgatcaactgatctgtgtcaatgagaatgggggttgtgagcagtactgcagcgaccacacaggcaccaaacggagctgtcggtgccatgagggatacagcctcctcgccgacggggtgtcctgcacgcccacggtcgagtatccgtgcggcaaaattcctattcttgaaaagcggaacgcttctaagcctcaggggcggatcgtgggcggcaaagtctgtccaaaaggggaatgcccttggcaggtgctcctgctggtgaatggggcccaactttgcggcggaactctgattaacacaatatgggtggtttcagcagcccactgcttcgataaaatcaagaactggcgcaatctgattgctgtccttggcgaacatgacttatcagaacacgacggagacgagcagagtaggcgcgtcgctcaggtcattatccccagtacatatgtcccaggaacgacgaatcacgacatagccctcctgcggcttcaccagcccgtggtgttgactgaccacgtcgttcccctgtgtctgcctgagcggactttttcagagcgcacactcgcttttgtacggttctcattggtgtctggctggggtcagctgcttgatcgaggcgctactgctctggaattgatggtccttaatgtcccgcggcttatgactcaagactgccttcagcagtcaagaaaggtcggcgactccccgaacatcacggaatacatgttctgtgcagggtattcagatgggtcaaaagattcctgcaagggcgatagcgggggcccacatgcaactcattaccggggcacctggtacctgacaggcatagtgtcgtggggacagggctgcgccaccgtgggtcactttggagtctacacacgggtctcacagtacatcgagtggctacagaagctgatgcgctcagagcccagacctggggtgctactccgagccccattccca

SEQ ID NO: 2435 - DNA, 1398 bp, Artificial Sequence
  derived and/or modified sequence
atggtgtcacaggccctacgactactttgcctgcttcttggcctacagggatgtctggcagccggaggagtcgcaaaggcaagtggcggtgagactagggacatgccctggaagccaggaccccacagagtattcgtgacacaagaagaggcccacggtgtactccaccgacgacgtcgtgcaaacgccttcttagaagaattgcgaccaggcagcctggagcgagagtgtaaagaagagcagtgcagcttcgaggaagcgagggagattttcaaggatgccgaaaggaccaaactcttctggattagctatagtgatggcgatcagtgtgccagcagcccctgtcaaaatggtggatcttgtaaggaccagttgcaatcgtacatttgcttctgccttcctgcctttgaaggcagaaactgcgaaacacacaaggatgaccagctcatatgtgtgaatgaaaacggtggctgcgaacagtattgctcagaccacaccggtacgaagagatcttgtcgatgccacgaaggatactcgctgttagcagatggtgtgtcttgcaccccaactgttgagtacccatgtggcaagatcccaatattagaaaagagaaacgcgtctaaaccacagggcaggattgtgggggggaaagtgtgcccaaaaggtgagtgcccatggcaggtgttgctgcttgtgaatggtgctcagttatgcggagggactttaatcaatacgatttgggtcgtgtcggctgcccattgcttcgacaagataaagaattggcgaaatctgatcgccgtactaggagaacacgatttgtccgagcacgacggggatgagcagagccgaagagtggcccaggtgatcattccgagtacctatgtaccaggcactacaaatcacgacatcgcattgcttcgcctgcaccagcctgtggtcctcacagaccacgtggtgccactgtgccttcccgagcgcacattctcagaaagaactctggctttcgttagattcagcttggtctcaggatgggggcagttgttggatcgaggtgctactgccctcgagctgatggtgctcaatgttcctcgcctcatgacgcaagattgtctacagcagagtagaaaggtgggcgattctcccaacatcaccgagtacatgttctgtgccggttactccgatggaagtaaggactcatgtaaaggggattccggggggcctcatgctacacactaccgagggacctggtatctgacaggtattgtgtcttggggacagggatgcgcaacggttggacactttggtgtgtatacaagggtcagccagtacattgagtggcttcaaaagctgatgagaagcgaacctagacctggcgtgttgctgcgcgccccctttcca

SEQ ID NO: 2436 - DNA, 1398 bp, Artificial Sequence
  derived and/or modified sequence
atggtgtcccaggccctgagactgctgtgcctgttgctgggacttcagggttgcctggcagccgggggagtggcaaaggcgtctggaggcgaaaccagagacatgccgtggaagccgggaccccacagagtgtttgtgacccaggaggaggcccacggagtgctgcatcggagacgcagagcaaacgccttcctggaagagttgcgcccgggaagcctggaaagagagtgtaaagaagaacagtgcagcttcgaagaagcgagagaaatcttcaaggacgcggagcgcaccaagctgttctggatctcctactcggatggcgatcagtgtgcatcgagcccgtgtcaaaacggagggagctgcaaggaccagctgcaatcgtatatctgtttctgcctgccggccttcgagggaaggaattgcgagacgcacaaagatgatcagctcatttgtgtgaatgaaaacggcggatgcgagcagtattgttctgaccacaccggaactaagcgctcatgcagatgtcacgaaggttactcactgcttgcggacggtgtctcatgcactccgaccgtcgagtacccctgtggtaaaatccctatccttgagaagaggaacgcctcaaagccgcagggtagaatcgtggggggaaaggtgtgcccgaagggcgagtgcccgtggcaagtcctgctgctggtgaacggcgcccagctctgcggcggaactctcattaacaccatctgggttgtgtcagcggcgcattgcttcgacaagatcaaaaactggcggaatctgatcgccgtgctgggagaacatgacctctcagagcacgacggagatgagcagtcccgccgcgtcgcgcaggtgatcatcccatccacttacgtgcctggtactaccaaccacgacatcgcactgctcagactccatcagcccgtggtcctcactgatcatgtggtccctctgtgcctcccggaacgcaccttttccgaaaggactctcgcattcgtgcggttctcattggtatcgggatgggggcaacttctcgacaggggcgcgaccgccctggagctgatggtcctgaatgtcccgcggctgatgactcaagattgtctgcagcaatcgaggaaggtgggagattcaccaaacatcactgagtatatgttttgcgccggatatagcgacgggagcaaggactcatgtaaaggagactcgggcggaccgcacgcaacccattaccgggggacttggtacctgaccgggattgtttcgtggggacaaggatgcgcaacggtgggacacttcggagtctacaccagagtgagtcagtacatcgaatggctccagaagttgatgcgatcggagccaagaccaggagtgctgttgcgcgcccctttcccg

SEQ ID NO: 2437 - DNA, 1398 bp, Artificial Sequence
  derived and/or modified sequence
atggtgtcgcaggcacttcgacttctgtgtctcctgctgggacttcaaggatgtttggccgcgggaggagtggccaaggcttcaggaggcgagacgagggacatgccgtggaagcctgggccccatcgggtgtttgttacgcaagaggaagcacatggcgtcctccacaggcggcgacgtgcaaacgccttcttggaagagctgcggccaggtagcctcgagcgcgagtgtaaggaggaacagtgttcattcgaagaagcaagagaaatcttcaaggatgccgagagaaccaaacttttctggatttcctacagcgatggtgatcagtgtgcttcctcaccctgtcaaaatggaggatcgtgcaaagatcagctccaatcctacatctgtttctgtctgcctgcttttgaaggtagaaattgtgaaactcataaagatgatcaactgatctgtgtgaacgagaacggtggatgtgagcaatactgtagcgaccataccggcacgaaaagaagctgtagatgtcacgaaggatacagcctgcttgcagatggagtgtcatgcaccccaactgtggaatatccatgcggtaaaatcccgatccttgaaaagagaaatgcgtccaagccccagggtcgaatagtcggaggtaaggtgtgtcctaagggagaatgtccttggcaggtgctgctgctggtcaacggagcacaactttgtggaggcactcttatcaacaccatttgggtcgtctcggctgcccattgttttgataagattaagaactggagaaatctgattgcggtgctgggagaacacgatctttccgaacacgacggggacgaacagtcccgacgcgtcgcccaagtcatcataccttccacctacgtgcctggaaccactaaccatgatattgccctcctccgccttcaccagcctgtggtgttgactgatcacgtggtgccgctctgcctgcctgaacggacgttttcggaacgcactcttgcattcgtgagattttcactggtgtcagggtggggtcaactgctcgatcggggcgcaactgccctggaactgatggtgttgaacgtgcctcggctgatgacccaggactgccttcagcaatcccggaaagtgggcgattcacctaacattactgagtacatgttttgtgcaggatactcagacggctcgaaggatagctgcaaaggtgattcaggaggtcctcatgcaacgcactacaggggtacctggtatcttaccggcatcgtttcgtggggccagggatgtgctaccgtgggtcactttggagtctacactagggtgagccagtacatcgagtggctgcagaagctgatgaggtccgaacccagacctggtgttctcctgagagcacccttccct

SEQ ID NO: 2438 - DNA, 1398 bp, Artificial Sequence
  derived and/or modified sequence
atggtgagtcaggctcttcgacttctttgtctgctgttgggattacaggggtgtcttgccgctgggggagtcgccaaagcttccgggggagaaactagggatatgccatggaaacccgggccacatcgagtgtttgtgacacaggaagaagcccacggagtgctacaccggagacgacgggccaacgccttcctggaagaactaaggcctggatcactcgaacgggaatgcaaagaggaacagtgtagtttcgaagaagcacgcgaaatatttaaagatgctgaaaggacaaagctgttttggatttcttattctgatggagatcagtgcgcttcttctccttgtcagaatggagggagttgcaaagatcagctgcaaagttacatctgcttctgcctccctgcattcgaggggagaaactgcgaaacacataaggatgatcagctgatatgcgtgaatgaaaacgggggatgtgaacagtactgttctgaccacactggaactaaaaggtcttgcagatgtcatgagggatattctctcttagctgatggggtttcttgcactcccactgtcgaatatccatgtgggaagatcccaatccttgaaaagcgcaatgcaagtaaaccacaggggaggattgtcggagggaaagtgtgtcctaagggggaatgcccctggcaagtactgttgctggttaatggggctcagttgtgcggggggacattaattaacactatctgggttgtgtcagcagcccactgcttcgacaaaataaaaaattggcgaaacttgattgcggtgctgggagaacatgatctgtccgaacatgatggggatgaacagtcacgccgggtggcccaggtaatcatcccatccacatatgtaccagggactacaaaccacgatatagcactactcaggctacaccagcccgtggtgttaactgaccacgtcgtgcctctttgcctcccagagcggacattctccgaaagaacactcgcgttcgtacgtttctcccttgtatccggatgggggcagctgctagacagaggagcgacagcgctggaactaatggttctgaatgtgccacgactgatgactcaggattgtctccagcagtctcgaaaagtgggagattctccaaacatcactgaatacatgttctgtgctggatattctgatggatctaaagactcatgtaaaggggattcaggagggccccatgctacgcactataggggaacttggtacctcactggaatagtgtcatggggacagggatgtgcaactgtcgggcattttggagtgtacactagggtatcccagtatattgaatggctccagaaacttatgcgctcggaacccaggcctggagtgctccttagggcaccttttccc

SEQ ID NO: 2439 - DNA, 1398 bp, Artificial Sequence
  derived and/or modified sequence
atggtgtcccaggcactccgcctgctttgtctgctcctgggacttcaaggctgtctggccgcaggaggtgtcgcgaaggcttctggcggcgaaactcgagacatgccctggaagccagggcctcacagggtgttcgtgactcaggaggaagcacatggtgtccttcatcgcaggaggcgggcaaacgccttcctcgaagaactccgccctggatcgctggagcgggaatgcaaagaggaacaatgttcgtttgaggaagcccgcgagattttcaaggatgccgagcgtactaaactgttctggatttcctactcagacggggaccaatgcgcatcgtccccctgccagaacgggggttcctgtaaagatcaacttcagtcatacatttgtttttgtctgccagcatttgaggggagaaactgcgaaacccataaagatgatcagctgatatgtgtcaacgagaacggtggctgcgagcaatactgcagcgatcacactggtactaagaggtcatgtaggtgtcacgaagggtacagccttctcgccgatggggtgtcatgtacgcctaccgtggaatacccctgtggaaagatacctattcttgaaaagagaaatgcaagtaagccacaaggaaggatagtcggcggtaaggtctgtcccaaaggtgaatgtccgtggcaagtgctgcttctggtcaacggcgcacagctctgcggtggcaccctgattaacacgatctgggtggtgtcagccgcacattgctttgacaagatcaagaattggagaaatttgattgccgtgctgggagaacatgatctttcggaacatgacggcgatgagcagtctcgccgagtcgcacaagtcatcatccctagcacctacgtcccaggtaccactaatcacgatatcgcactgcttcgcctgcaccagcctgtggttctgactgaccatgtggtgccactgtgtttgccagaaagaaccttctctgaacgtactctggcctttgttcgtttctcgcttgtctcgggatgggggcagctgctggatagaggagctaccgcattggaacttatggtgctgaatgtgccacgacttatgacccaagactgtctccaacaatcaagaaaggtgggagactccccaaacattaccgaatacatgttttgtgccggttatagcgatggttctaaggattcgtgtaaaggggattcgggcggaccccacgccactcattaccgcggtacctggtacttgaccggaatcgtcagttggggacaggggtgtgcaactgtcggccattttggcgtttacactagggtgtcacaatacattgaatggctgcagaagctgatgcggtcggagcctagacctggggtacttctccgtgcaccgtttcct

SEQ ID NO: 2440 - DNA, 1398 bp, Artificial Sequence
  derived and/or modified sequence
atggtttcgcaagcgttacgtttattatgtttactattaggtttacaaggttgtttagcggcgggtggtgtagcgaaagcgtcgggtggtgaaacgcgtgatatgccgtggaaaccgggtccgcatcgagtatttgttacgcaagaagaagcgcatggtgtactacatcgacgacgtcgtgcgaatgcgtttctagaagaactacgtccgggttcgttagaacgagaatgtaaagaagaacaatgttcgtttgaagaagcgcgtgaaatatttaaagatgcggaacgaacgaaactattttggatatcgtattcggatggtgatcaatgtgcgtcgtcgccgtgtcaaaatggtggttcgtgtaaagatcaattacaatcgtatatatgtttttgtctaccggcgtttgaaggtcgaaattgtgaaacgcataaagatgatcaattaatatgtgtaaatgaaaatggtggttgtgaacaatattgttcggatcatacgggtacgaaacgttcgtgtcgatgtcatgaaggttattcgttattagcggatggtgtatcgtgtacgccgacggttgaatatccgtgtggtaaaataccgatattagaaaaacgaaatgcgtcgaaaccgcaaggtcgaatagttggtggtaaagtatgtccgaaaggtgaatgtccgtggcaagttctactactagttaatggtgcgcaattatgtggtggtacgttaataaatacgatatgggtagtttcggcggcgcattgttttgataaaataaaaaattggcgtaatttaatagcggtattaggtgaacatgatttatcggaacatgatggtgatgaacaatcgcgtcgagtagcgcaagtaataataccgtcgacgtatgtaccgggtacgacgaatcatgatatagcgctactacgattacatcaaccggtagtactaacggatcatgttgttccgttatgtctaccggaacgaacgttttcggaacgaacgttagcgtttgttcgtttttcgctagtttcgggttggggtcaattattagatcgtggtgcgacggcgctagaattaatggtattaaatgtaccgcgtctaatgacgcaagattgtctacaacaatcgcgtaaagttggtgattcgccgaatataacggaatatatgttttgtgcgggttattcggatggttcgaaagattcgtgtaaaggtgattcgggtggtccgcatgcgacgcattatcgaggtacgtggtatttaacgggtatagtatcgtggggtcaaggttgtgcgacggtaggtcattttggtgtatatacgcgagtttcgcaatatatagaatggttacaaaaattaatgcgttcggaaccgcgaccgggtgttttactacgagcgccgtttccg

SEQ ID NO: 2441 - DNA, 1398 bp, Artificial Sequence
  derived and/or modified sequence
atggtttcccaagcccttcgtctcctgtgtctcctgctgggactccagggctgtcttgctgcgggaggagtcgctaaggcatccggaggggaaaccagagacatgccttggaagcctggtccgcatagggtctttgtcacccaggaagaagcgcatggagtgctgcatcggagacggcgcgctaatgcctttcttgaggaactcagacctggctcgctcgaacgtgaatgtaaggaggaacaatgcagctttgaagaagcccgagagatcttcaaggatgcagagcgaaccaagctcttttggatctcgtactcagatggagatcaatgtgcaagctcgccgtgccaaaacggtggttcatgtaaagatcagctccaatcgtacatttgtttttgtctgcctgcattcgaaggacggaattgcgaaacccataaggatgatcagcttatctgcgtgaacgagaacggaggctgtgagcaatactgttcagatcatactggaactaagcgatcgtgtcgatgccatgagggatacagccttctcgccgacggtgtctcctgtactcctaccgtggagtatccctgcgggaagataccaatacttgaaaagcgcaacgcgtccaagccccaggggaggattgtggggggtaaggtgtgtcctaagggtgagtgtccatggcaagttcttctgctggtcaacggcgcacagctgtgtgggggcacccttatcaataccatttgggttgtgtccgccgcgcattgtttcgataagattaagaactggcggaaccttattgcagtgctgggagaacacgacctttcggaacatgatggcgatgaacaatcacgccgcgtcgctcaggtcattattccttcgacgtacgtgccaggtaccaccaaccatgatatcgccctcctgagacttcaccagccggtggtcttgaccgatcacgttgtgccactttgtttgccggaacggaccttttcggaacgcactttggcatttgtgcgtttttcgctggtgtccggatggggacagctcttggaccgcggagccactgcattggaacttatggtgctgaacgtgcctcgcctgatgacgcaagactgcctgcagcaaagcagaaaggtaggtgacagccccaacattactgagtacatgttttgcgccggatatagcgacggatccaaagattcatgtaagggcgattccggagggcctcatgcgacccattaccggggaacctggtacctgaccggtatcgtgtcatggggacagggctgtgcaacggtggggcactttggagtgtacacccgtgtgtcacaatacatcgagtggcttcaaaaactgatgcgctcggaaccgaggcctggagtcctgcttcgcgccccttttccg

SEQ ID NO: 2442 - DNA, 1398 bp, Artificial Sequence
  derived and/or modified sequence
atggtgagccaggcacttaggcttctttgtttactgctgggccttcaaggctgtttggccgcaggcggagtggctaaggcatcagggggtgaaaccagggacatgccgtggaaaccaggcccccacagggtctttgtcacacaggaggaggcccatggagtgcttcacagaaggaggcgcgcaaacgcatttctggaagagttgagaccaggcagcctcgagagggaatgcaaagaagagcagtgctcattcgaggaggcacgggaaatctttaaggatgcagaaagaacaaagctcttttggatctcttactccgacggcgatcaatgtgcctctagcccttgccaaaacggaggatcctgtaaagatcagctccagtcttatatttgcttttgtctccctgcattcgagggccgcaattgcgagacccacaaggacgaccaactgatttgcgtaaacgaaaatggcggatgtgagcaatattgcagcgaccataccgggacgaagagaagctgtaggtgccatgagggatatagcctccttgctgacggggtatcgtgtacaccaactgtggaatacccctgcggaaagatacccattctggaaaaacgtaacgcttctaaaccacaaggccggatcgtgggcggcaaggtgtgcccaaagggggagtgtccatggcaggtattattactggtgaacggcgcacagctgtgcggaggaacactgattaacaccatttgggtggtgtcagcagctcattgcttcgacaaaatcaagaactggagaaacctgatcgcagtgctgggcgagcacgacctgtcggaacatgatggtgatgagcagtctagacgtgtagcccaggttattattccaagcacatacgtgcctggtaccaccaaccatgacattgccctgctccgtctgcatcagcctgtggtcctgacagatcacgtcgtgccgttgtgtctccccgaaagaacctttagcgaacggacccttgcgttcgtcagattctccttggtgtccgggtggggccagctgctcgatcgcggggctaccgctctcgagttaatggtcctgaacgtccctcggctgatgactcaagactgtctccagcaatccaggaaggtaggagactccccgaatatcactgaatatatgttttgcgcaggatatagcgatggaagcaaggattcatgcaagggggactccggtggccctcacgcaactcactacagaggtacatggtaccttactggaatcgtatcatggggacagggctgtgcaacggtaggccatttcggcgtctataccagagtgagtcagtatatcgaatggcttcaaaaactgatgagatccgaacccaggcccggtgtgctcctgcgcgcaccatttcca

SEQ ID NO: 2443 - DNA, 1398 bp, Artificial Sequence
  derived and/or modified sequence
atggtgtcccaggcgcttagactcctctgcctcctgctcgggctgcagggatgccttgcagcaggtggtgtggcaaaggcttccggcggagaaaccagggacatgccgtggaagccgggaccacatagggtgtttgtgacccaagaggaggcgcacggagttttgcataggagacgacgcgccaacgcattccttgaagagctccgcccgggctcgctggagcgagaatgcaaagaagagcagtgctcgtttgaagaagcccgggaaatcttcaaggacgccgagcgcactaagctgttctggatctcatacagcgacggggatcaatgcgcgtccagcccttgccagaacggcggatcatgtaaggaccagctgcagtcgtacatttgcttctgcctgccggctttcgaggggagaaactgcgaaacccataaggatgaccaactgatctgtgtcaatgagaatggaggatgtgagcaatactgctccgaccacactggaaccaagagatcgtgtcgctgccacgaagggtactcgctgttggcagatggcgtctcatgcacgccgaccgtggaatacccgtgcgggaagataccaatcctcgagaaacgcaacgcctccaagccacagggacgcatcgtcgggggcaaggtgtgcccgaaaggagagtgtccgtggcaagtgctgctcctcgtcaatggcgctcagctgtgtggaggcactttgatcaatacgatttgggtcgtgtcagcagcacattgctttgacaaaatcaaaaactggcggaatctgattgccgtgctgggggaacatgatctctccgagcatgatggagacgaacagagccgccgcgtggcccaagtgatcatcccatcgacttatgtcccgggaaccaccaaccacgacattgcactgctgcgcctccatcagcccgtcgtgctgactgatcacgtggtgccgctgtgtctgccggagcgcacgttctcggaacggacgctcgccttcgtcaggttctctctcgtgtccggatggggccaactccttgaccggggtgctaccgccctggaactcatggtgctgaatgtcccccggcttatgactcaagattgcctgcaacagagcaggaaggtgggagattcaccgaacataaccgaatacatgttctgtgccggctactcagatggaagcaaggactcatgcaagggagacagcggcggtccgcacgctacccattaccggggaacctggtacctgactggaatcgtgtcgtggggccaaggatgcgccactgtggggcactttggagtttacacccgcgtcagccagtacatcgagtggctgcaaaagttgatgcgctcagaacccaggcctggcgttctgcttagagcgccgttccca

SEQ ID NO: 2444 - DNA, 1398 bp, Artificial Sequence
  derived and/or modified sequence
atggtatcccaagcgctgcggcttttatgtctgctcctgggattacaaggttgtctggcagccggaggagtagcaaaagcaagtggcggggagactcgggacatgccgtggaagcccgggccgcatcgcgtgttcgtgacccaggaagaggctcacggcgtcttgcaccggagacgtcgcgccaacgctttcctcgaagaactcagacctggatccctggagcgggaatgcaaagaggagcagtgttcatttgaggaagcaagggagatattcaaggacgcggagagaacaaaactgttctggatcagctactctgatggagaccaatgtgcgtccagcccatgccaaaatggcggaagctgcaaggaccagctgcagtcctacatctgtttctgcttgcccgctttcgaaggaagaaactgtgagactcataaagatgaccagctgatttgcgtcaacgagaatggaggttgcgagcagtactgctcggaccacaccgggacgaaacgcagctgcagatgccatgagggctacagtctactggcggatggagtgtcctgcactccaaccgttgagtacccctgtggaaagatacctattttagagaaaagaaatgcctcaaaaccacaaggcagaattgtgggagggaaggtgtgccctaagggtgagtgcccatggcaggtccttcttctggtgaacggcgctcaactttgcggggggactcttatcaacaccatctgggtcgtaagcgcagcccactgctttgataaaatcaaaaactggagaaaccttatcgctgtcctgggtgaacatgacctgtccgaacatgacggggacgagcagagcagaagagtagcccaagtgattatcccaagtacatatgtgcccgggacgaccaatcatgatatcgcactgttgagattacatcagcccgtcgtactcacggatcacgtcgtgcccttatgtctgcccgagaggactttctcagagaggactctagcctttgtgaggttctcactggtgtcaggctgggggcagctcctcgatcgaggcgccaccgccttggagttaatggtgcttaacgtaccgagactaatgacccaggattgtctacaacaatctagaaaggtgggagactcccccaatatcaccgaatacatgttctgcgccgggtattccgatggttcaaaagactcttgtaagggggacagcgggggtccccatgctacacactatcgcggtacatggtaccttacggggatcgtgtcttgggggcaggggtgtgccacagtgggtcactttggagtttacacaagggtgagccaatacatcgagtggctgcaaaagctgatgaggtcggaacctagacccggagtgctccttcgggccccgtttccc

SEQ ID NO: 2445 - DNA, 1398 bp, Artificial Sequence
  derived and/or modified sequence
atggtgtcccaagccctaaggctgttgtgcctgcttcttggcctccaaggctgtctggctgccgggggagtcgcaaaggcctcgggtggcgagacccgggatatgccatggaaaccggggcctcaccgagtattcgttactcaagaagaagcccatggagtactgcacagacgacggagagctaacgctttcctggaagaacttcgtcccggatcactggagcgtgagtgtaaagaagaacagtgcagttttgaggaagcccgcgaaatcttcaaggacgccgagcggactaaattgttttggatctcttatagcgacggagatcaatgtgccagttccccgtgtcagaacggcggaagttgcaaggatcagctccagtcatatatttgcttctgtcttccggcttttgaggggcgaaactgcgagacccataaagacgatcagctgatttgtgtcaacgaaaacgggggttgcgaacagtattgttccgaccacacgggcacaaaacgatcatgtcgctgccatgaaggctacagtcttctggccgacggggtatcgtgcacaccgacggtagaatacccatgcgggaaaatacccatcctagagaaaagaaatgctagcaagccacagggaagaatcgttggggggaaagtttgtccaaagggagagtgtccatggcaggttctgctcttagtgaatggcgctcagctgtgcggcggaacgctgattaacacgatatgggtcgtgtctgccgcccactgttttgataaaatcaagaattggaggaatctcattgcagtcctcggtgagcacgacttaagcgaacatgacggagacgagcagagtcggcgggtggcccaggttataatccctagtacctatgtaccagggacaacaaaccatgatatagcgcttttgagactgcaccaacctgtggtactgacagaccacgtggttccactctgcctgcccgaaaggacgttttcggaaagaactttggcattcgtgaggttttcgctggtatcaggctggggccagctgctcgatcggggcgccacagcattagagctgatggttctgaacgtaccccgtttgatgacccaagattgtctgcagcagagccgtaaagttggagacagccctaatatcaccgaatatatgttctgcgccgggtattcggatggtagcaaggattcctgcaaaggcgacagtggcggcccccacgccacccattaccgcggtacctggtacctcaccggaattgtaagctggggacagggttgcgctacagtcggtcattttggcgtttatactcgcgtttctcagtacattgaatggcttcagaaattgatgcgaagcgaaccaagaccaggcgtgctattgagggctcccttcccc

SEQ ID NO: 2446 - DNA, 1398 bp, Artificial Sequence
  derived and/or modified sequence
atggtgtctcaggctttgaggctgctgtgcttgctgcttggactgcaaggctgcctagcagcaggcggcgtcgccaaagctagcggaggcgaaactagagatatgccttggaagccaggtccccatagagtgttcgtgacccaagaagaagctcacggtgtgctccacaggagacgtcgcgctaacgcttttctggaggagctgaggccaggcagtctggagagagaatgcaaagaggagcagtgcagcttcgaggaggcgcgggaaatctttaaagatgccgagcgcactaagctgttttggatcagctattccgacggcgaccaatgtgctagttcaccttgccaaaacggcggcagttgtaaagaccaactgcaatcatatatctgcttttgcttaccagccttcgaaggtcgcaactgcgaaacccacaaagatgatcagttgatctgcgtgaatgaaaacgggggctgcgaacaatactgtagcgatcacaccggaacaaaacggtcctgcaggtgccacgagggatacagtctgctggccgacggcgttagctgcacaccgacagtcgagtacccatgtggcaaaattcccattctggagaagcggaacgcttctaagcctcaaggtagaatcgtgggtggcaaggtgtgccccaagggcgaatgtccttggcaagtgctcttgttggtcaatggcgctcagttgtgcggtggcactctgatcaacaccatttgggtggtgtctgcagctcactgcttcgacaaaataaaaaactggcggaacctgattgccgtgctgggcgagcacgaccttagtgaacacgatggagatgaacagtcccggagagtcgctcaggtgatcatcccatctacttacgtcccagggaccaccaatcatgacattgctctgctgcggctacatcagccggtggttctgacagatcatgtggttcctctgtgcctccctgagagaaccttcagcgaaagaactcttgccttcgtgcggtttagcctcgtgagcgggtggggccagctgttggataggggcgccaccgccctggaactcatggttctaaacgtccctcggctgatgacccaggactgcctgcagcagagcaggaaagtgggcgattctcccaacatcaccgaatacatgttttgcgctggctacagtgatgggtctaaggactcctgcaaaggcgacagtggtggtccacacgcgactcactacagaggaacttggtacctgacaggcattgtgagctgggggcagggatgtgctactgttggccactttggtgtctacacaagggtttcccaatacattgagtggctccaaaaactcatgcgcagcgagccaaggcctggagtattgttgagagctcccttcccg

SEQ ID NO: 2447 - DNA, 1398 bp, Artificial Sequence
  derived and/or modified sequence
atggtgagccaagccttgagactcttgtgcctcttgctcggactgcaaggttgcctggctgcaggaggcgtggccaaggctagcggaggtgagacccgggatatgccatggaagcccggaccccaccgagtgtttgtcactcaggaagaggcacacggtgtgttgcaccgacgacggcgggctaatgcgttcctggaggaactccgccccgggagcttggaacgggaatgcaaggaagaacaatgtagttttgaggaggctcgggagatcttcaaggacgccgaacggacgaaattgttttggatttcctattctgacggcgaccagtgcgcatcctcaccctgtcagaatggtggaagctgtaaggaccagctgcagagctacatctgcttctgtctcccagcttttgaaggacgcaactgcgagacccacaaggacgaccagctgatctgcgtaaacgaaaatgggggctgtgaacaatactgctccgaccacaccggaaccaagcgatcctgtcgctgtcatgaaggctatagtctgcttgccgatggagtaagttgtactccaaccgtggagtatccatgcggcaaaattcccattcttgagaaacggaacgccagtaagcctcagggcagaattgtaggtggcaaggtgtgccccaagggtgagtgcccatggcaggtcctgctgctggtaaacggcgctcaactttgcggaggcacgcttataaacactatatgggttgtttctgccgcccactgtttcgataagatcaaaaattggcgcaatcttatcgccgtgttgggcgaacatgacttgagcgagcacgatggtgatgaacagtcacggagggttgctcaagtgatcataccaagcacgtacgttccggggactaccaaccatgacatcgcactgttgagactgcaccagcccgtcgtacttaccgatcatgtggttcccctctgtcttccagagagaacgttcagcgagcgcaccctggcctttgttcgattctcactggtttcaggctggggtcagctgctggacagaggggccactgcactcgaactgatggtgttgaatgttcccagactgatgacccaggactgtctccagcagagtcggaaggtgggtgattccccaaacatcactgagtacatgttttgtgccgggtactcagatggaagcaaagactcatgtaaaggcgactcaggaggccctcacgctacccactataggggcacctggtatctgaccggtatagtctcttggggacagggatgtgcgaccgtagggcatttcggggtgtatactcgagtttcacagtatattgagtggctgcagaaattgatgagatcagaaccacgacccggggtgctgttgcgggcacctttcccg

SEQ ID NO: 2448 - DNA, 1398 bp, Artificial Sequence
  derived and/or modified sequence
atggttagccaagcacttaggctgctctgccttctgctcggacttcaggggtgtctcgcggcaggtggagtcgctaaggccagtggtggagagaccagagacatgccatggaaacccgggcctcacagagtgttcgtgacccaggaggaagcccacggcgtcttgcatcgccggcgccgcgccaacgccttccttgaagagctgcgacccgggtcactggagagagagtgtaaggaggagcagtgttccttcgaggaggcccgagagatttttaaggatgctgaacgcacaaaactcttttggatctcatatagcgatggcgatcagtgcgctagttctccgtgccaaaatggtgggagctgcaaggatcagctgcagagctacatttgcttttgcttgcccgccttcgaaggtcgtaattgtgaaacacacaaagacgatcagctgatttgtgtgaatgagaacgggggatgcgagcagtattgctcggaccacacgggaacaaagaggtcatgtcgctgccacgagggttactccctgttggccgacggcgtgtcctgtaccccaacggtcgaatacccatgcgggaaaatcccaattctggagaaacgaaatgcttctaaaccccaagggagaattgttggcgggaaggtgtgcccaaagggcgaatgcccgtggcaggtgctgctcctggtgaacggcgcgcagctgtgtggaggcactcttatcaatacaatatgggtcgtatccgctgctcactgttttgacaagataaaaaactggcgaaatttaatcgccgtcctgggcgaacacgatctctctgagcacgacggcgacgaacagtcgaggcgggtggcccaggtgatcattccttctacttatgtgcctgggactactaaccacgacatcgctttactgcgtttgcaccagcccgtggtgttgaccgatcacgtcgtgccgctgtgtctcccggaaagaactttcagcgagaggactctggccttcgtcaggttttccctggtctccggatggggccagctgctggaccggggagccacagctctggagctgatggttttaaatgtgcccagactaatgacccaggattgccttcagcaaagcaggaaagtgggggactcaccaaacatcactgaatatatgttctgtgcgggctacagcgatggtagcaaagactcatgtaaaggagacagcggcggtccacacgcgacgcactacaggggcacttggtacctgaccgggattgttagttggggacaaggatgcgccactgtgggccatttcggcgtctatacacgcgtatcgcagtacattgagtggctccagaaactcatgcggtctgagccccgtcctggcgtcttgctccgggccccttttcca

SEQ ID NO: 2449 - DNA, 1398 bp, Artificial Sequence
  derived and/or modified sequence
atggtgagccaggcactgaggctgctgtgcctccttctgggcctccagggctgcctggcagcaggaggagtggcaaaggcatccgggggcgagactagagacatgccatggaaaccaggtcctcacagggtgtttgtgacccaagaagaggcccacggtgtgctgcatagaagaagaagggcaaatgcctttctcgaggaactgcgacccggatccttggagcgagaatgcaaagaagagcaatgctcctttgaagaagcaagagagattttcaaggatgccgaacggactaaacttttctggatctcttacagcgatggcgaccaatgtgcatcgtcaccctgtcaaaacggggggtcctgtaaggaccagcttcaatcgtacatatgtttctgtctgccagcatttgaaggacggaattgcgaaacccacaaggatgaccaactgatttgtgtgaatgagaacggtggatgtgagcaatactgttcggaccacaccggaactaaacgcagctgtcgttgccatgaagggtacagcctccttgccgatggcgtgtcgtgtacgccaactgtggaatacccatgtggaaagatacctattcttgaaaaacggaatgcgtcgaagccgcaaggccgtattgtgggtggaaaggtgtgccccaaaggcgaatgcccctggcaggtcctgctcctggtcaatggggcccaactgtgtggtggcactctcattaacactatctgggttgtcagtgccgcgcattgtttcgacaaaatcaagaactggagaaacctgatcgccgtgctgggagaacatgacctgtccgaacatgacggtgacgaacaatcgcgccgtgtggcccaggtgattattccctccacctacgtccctgggaccactaaccacgatattgctctgcttagacttcaccagccagtggtgctgaccgatcacgtggtcccactgtgcctccctgagagaacgttttcggaacgcactctggcattcgtcaggttctcgcttgtctccggttggggtcagcttctcgatcgtggtgccacggcgctcgaactcatggtccttaatgttccacgccttatgactcaagactgtctgcagcagagccgaaaggtgggtgattccccgaacattactgagtatatgttctgcgcaggctactctgatggctcgaaggactcgtgtaagggcgattccgggggaccacacgcgacccattaccggggtacctggtacttgaccgggattgtgtcatggggtcaaggttgcgctaccgtgggtcattttggagtgtatactagagtttcgcaatacattgagtggctgcaaaagctcatgagatccgagcctcggcccggtgtgttgttgcgtgcaccatttcct

SEQ ID NO: 2450 - DNA, 1398 bp, Artificial Sequence
  derived and/or modified sequence
atggtgagtcaggctttgagactgctgtgtctcctgctgggcctgcaaggctgtttggctgccggcggcgtggctaaggcatccggaggtgaaacacgagacatgccatggaagcccggcccccatagagtgttcgtgacacaggaagaggctcacggggtgctgcacaggcggagacgtgctaatgcattcctcgaagaactgaggcctgggagtttggaaagagaatgcaaggaggagcagtgcagttttgaagaagcacgggaaatttttaaggatgcagaaaggaccaaactgttctggatcagctattctgacggggaccagtgcgccagctccccttgccagaatggagggtcatgcaaggatcagctccagtcctatatttgcttctgtctccctgcgttcgagggccgaaattgcgagacccacaaggacgatcaattgatctgtgtgaatgagaacggaggatgtgaacagtactgctccgatcataccgggaccaagagatcttgcagatgccacgaaggctattcactgctcgccgacggcgtcagctgtaccccgaccgttgaatatccttgcggcaaaatccctattttggagaaaaggaacgcaagcaagccacagggcagaatcgtgggcggcaaggtctgccccaagggcgagtgtccctggcaggttttgctcttggtgaacggcgcccaactgtgcggagggaccttgattaacacaatatgggtggtgagcgccgcccattgcttcgataagatcaaaaactggcgaaacttgatcgccgtcttgggagagcacgatctttccgaacatgacggagacgaacagtctcgaagagtggcccaagtgatcattccgtccacctacgtgccaggcactacaaatcacgatatcgcgctcctgaggctacaccagcctgtagtgctgaccgaccacgtcgtgccactctgccttcctgagcgaaccttctcggagagaactcttgcttttgtgagattctctcttgtgagtggatggggccagttattagatcggggcgccactgctttggaactgatggtgctgaacgtacccaggctcatgacccaggattgtctacagcaatctcggaaggtgggcgattctccaaacatcaccgagtatatgttttgcgctggatattcggatggctcgaaggattcttgcaagggagacagcggtggtccacacgccacacattataggggcacttggtatctcacaggcattgtctcttggggacaggggtgtgcgacagtggggcattttggagtatacacacgtgtgtctcagtatatcgagtggctacagaagctcatgaggtcagagcctcggccgggggttttactacgcgcgcccttcccc

SEQ ID NO: 2451 - DNA, 1398 bp, Artificial Sequence
  derived and/or modified sequence
atggtgtcccaggccctgcggctgctgtgcctgttgctcggcctgcaggggtgcctggctgctggaggggtggctaaagcatctggcggagaaacgagagacatgccctggaagcctggccctcaccgagtctttgtcacacaggaagaagcacacggggtgcttcaccggcgccgtagagcaaacgcttttctggaggaactcaggcctgggtcactggaaagagagtgcaaagaggagcagtgttccttcgaggaggcaagggagatctttaaggacgccgagagaactaagctcttttggatttcctacagtgatggtgatcaatgtgcaagcagtccctgccagaacggagggagctgcaaagatcagcttcaatcatacatatgtttttgcttgcctgcatttgagggtaggaattgtgaaactcacaaggacgaccagctgatatgcgtcaatgagaatgggggctgcgagcagtactgcagcgatcacacgggtacaaaacgcagctgcaggtgtcacgaagggtattctttgctcgccgatggcgtgagctgcacacccacagtcgaatacccctgtgggaagattcccatcctggagaagcggaacgcctcaaagccacaaggacgaatcgttggcggcaaggtttgtcccaaaggagagtgtccatggcaggtgttgctcctagtgaatggagcccagctgtgcgggggaactttgataaacacaatatgggtagtgtccgcggcccactgctttgacaagataaagaattggcgtaatttgatcgcagttcttggcgaacacgatctgagcgagcacgacggggatgaacaatctcgaagagtggcacaagtaattatcccttccacttacgtgccaggcactacaaatcatgacatcgcgctcctacggctacatcaacctgtcgttctgactgatcacgtcgtgccattgtgcctacctgaacgcacattctccgagcggacccttgccttcgtgcggtttagccttgtatcaggatggggtcagctcttggacaggggcgctacggccctggaactgatggtgctgaatgtgcctagattgatgacccaggactgccttcagcaatcccggaaggttggcgacagtccaaacattactgagtatatgttttgcgcgggctattctgatgggtcaaaggattcgtgcaagggcgactcaggtggcccccacgccacccactaccgcgggacttggtatctgacgggcatcgtgagctgggggcaaggatgtgctactgtggggcatttcggggtctataccagagtgtcacagtatattgagtggctccagaagctgatgcgtagcgaaccgcgacctggtgtattgttgcgggccccgttcccc

SEQ ID NO: 2452 - DNA, 1398 bp, Artificial Sequence
  derived and/or modified sequence
atggtgtcacaggctctccggcttctgtgcctgctgctaggattgcagggatgcctcgctgcaggaggggtagctaaggccagtggaggggaaactagggatatgccgtggaaacctgggccccaccgggtctttgtgacacaggaagaagcgcacggggttcttcataggcgacgtcgagcaaatgccttcctcgaagaacttcgacccggatccctggaaagggaatgtaaagaagaacagtgttcattcgaagaggctcgggaaatattcaaagatgccgaacggactaaactcttctggatcagttattctgatggggatcaatgtgcctcatctccctgccagaatggggggtcctgcaaagaccagctccagtcatatatttgcttttgtctccctgcctttgagggaaggaattgcgaaacacacaaggatgatcagcttatctgtgtgaacgagaacggagggtgtgaacaatattgttctgatcacactggaacaaagcgatcctgtaggtgtcatgaggggtactctctactggccgatggagtgtcatgcacacctactgtggaatacccctgtgggaagatacctattctcgaaaaacgaaatgcttccaaaccacaggggaggatcgttggagggaaagtgtgtcctaaaggggagtgtccctggcaagtgctcctattggtcaacggagcacagctctgtggagggactctgatcaacacaatatgggtggtttcagcagctcattgcttcgataaaataaaaaattggcggaacctgattgcagtactcggagagcatgatctgtctgagcacgatggggacgaacagtctagacgggtggcccaggtaatcatcccctctacatatgtccccggaactacaaaccacgacatagctctgctcaggctgcaccagccagttgtgttaacagatcacgtggttcccctctgtctgcctgaacgaacattttccgaaaggactctcgctttcgtcaggttctctctcgtgtcagggtgggggcagttgctagaccgaggggccactgccttagaactcatggttctgaatgtcccccgccttatgacacaggattgcttgcagcagtcaagaaaagtcggagactctcccaacataactgaatacatgttttgcgcgggatatagtgatgggtctaaggattcttgtaaaggagattccggaggaccccacgcaacacactatagagggacatggtatcttacagggattgtctcctgggggcagggatgcgcaacagtaggacactttggagtctatactcgagtctctcaatatattgaatggcttcagaaacttatgcgctcagagccccgcccaggagtgctactgcgggccccttttcca

SEQ ID NO: 2453 - DNA, 1398 bp, Artificial Sequence
  derived and/or modified sequence
atggtgtcccaagcactccggctgctgtgtctgctcctgggactgcaaggatgcctcgccgcgggaggagtcgcgaaggcttcgggaggagaaacccgggacatgccgtggaaaccgggtccgcatcgcgtttttgtgacccaggaggaggcacatggggtcctccaccgccgtcggcgcgcaaacgccttcttggaggaactgcggccaggctcgctcgagagggagtgcaaggaagagcagtgtagtttcgaggaagctcgggaaatcttcaaggacgctgaacgcaccaagctgttctggatcagttactccgacggggatcaatgcgcgtccagcccttgccaaaacggcggctcatgtaaggaccagctgcagtcgtacatttgtttctgcttgcccgcctttgagggccgcaattgcgagactcataaagacgaccaactgatctgcgtgaacgagaacggaggatgcgaacagtattgctcagatcacacgggaaccaagcgctcgtgccgatgccatgaaggatactcgctgttggccgatggagtgtcttgcaccccgactgtcgagtacccatgcggcaagattcccatcctggaaaagcgaaacgcgtcgaaacctcaaggacggatcgtgggcggtaaagtgtgcccaaagggagagtgcccgtggcaggtcctcctgctggtgaacggagcacagctgtgtgggggcaccctgattaacactatatgggtcgtgtcggccgctcactgcttcgacaagatcaagaactggcgcaatctcatcgcggttctcggcgaacacgatctttcggagcatgacggagatgaacagtcaagacgcgtggcgcaagtcataatcccctcgacctatgtcccaggcactaccaaccacgacatcgccctgcttcggctgcatcagcctgtcgtgttgactgaccacgtggtacctctgtgtctgccggaacgcaccttctccgaaagaaccctggccttcgtgagattcagcctggtgagcggctggggacaacttttggaccggggcgctactgcactcgaactcatggtgctcaatgtgccgaggctgatgacgcaagactgcctccaacagtccaggaaggtgggagattccccgaatatcactgaatacatgttttgtgcgggatacagcgacggctcgaaggatagctgtaaaggagacagcggaggcccacatgccacgcattaccgcggcacctggtacctgactggcatcgtgtcatggggacagggttgcgccaccgtcggtcattttggagtgtacactagagtcagccagtatatcgaatggctgcagaaacttatgagaagtgaaccgcgcccaggagtgttgcttagagccccgtttcct

SEQ ID NO: 2454 - DNA, 1398 bp, Artificial Sequence
  derived and/or modified sequence
atggtgtcccaggcactgaggctgttgtgcctgttgctcggcctccagggttgcctcgcggcgggaggagtggcaaaagcaagcggaggtgagactcgcgacatgccttggaagccaggccctcaccgggtgtttgttacgcaggaagaagcacatggggtgctccaccggcggagacgtgcgaacgcctttctcgaagaactgcggccgggaagcctggaaagggaatgcaaggaagagcaatgctccttcgaggaagcccgggaaatcttcaaagacgctgagcgaactaaacttttctggatctcctacagcgatggcgatcaatgcgcctcgtccccttgtcagaacgggggctcatgtaaggatcagctgcagagctacatctgcttctgtctgccagccttcgagggccgcaattgcgagacgcataaagacgaccaactcatctgcgtcaacgagaatgggggatgcgagcaatactgctcagatcacaccggaaccaagagatcctgccgctgccatgagggatactcgctcttggccgacggggtgtcgtgtactccgaccgtggagtacccgtgtggcaaaatcccgatcctggaaaagcgcaatgcttccaagccccagggaagaatcgtgggaggaaaggtgtgcccgaagggggagtgcccgtggcaagtcctgctcctcgttaatggtgcccaactttgcggtggtacccttatcaatacgatctgggtggtgtcggccgcacactgtttcgataagattaagaactggcgcaacctgatagctgtcctgggggagcacgacctgtcggaacacgacggggacgagcaaagcagaagagtggcgcaggtcatcatcccatcaacctacgtcccgggaaccactaaccacgatatcgcccttttgcgtctgcatcaaccggtcgtcctgaccgaccacgtcgttcccctgtgcttgccggaacgtactttctcggaacggactttggcgtttgtgcggttctccctggtcagtggctggggacagcttctggaccgcggagccactgcgctggaattgatggtgctcaacgtgccacgcctcatgacccaggactgcctgcagcagtcgcgcaaggtcggcgatagccctaacattacggagtacatgttttgtgctggatactcagacggaagtaaagatagctgcaagggcgatagcggcggaccacatgccacccactataggggaacctggtacctcactggtatcgtgtcctggggacaaggttgtgccactgtgggacatttcggagtatacacccgcgtgagtcagtacattgaatggctgcagaagttgatgcgctcagaacctcggccaggagttctgttgagagcaccattcccc

SEQ ID NO: 2455 - DNA, 1398 bp, Artificial Sequence
  derived and/or modified sequence
atggtaagtcaagcattaagattattatgtcttcttttaggacttcaaggatgtcttgcagctggaggtgttgcaaaagcatcaggaggagaaactcgagacatgccatggaaaccaggtccacatagagtttttgtcacacaagaagaagcacatggagttcttcataggagaagaagagctaatgcatttttagaagaattaagaccaggttcattggaaagggaatgtaaagaagaacaatgtagttttgaagaagctcgagaaatatttaaagatgcagaaagaacaaaattattttggattagttatagtgatggtgatcaatgtgcttcatctccatgtcaaaatggtggatcttgtaaagatcaattacaatcttatatttgtttttgtttaccagcttttgaaggaagaaattgtgaaacacataaagatgaccaattaatatgtgtaaatgaaaacggaggatgtgaacaatattgttcggatcatacaggtacaaaaaggtcatgtagatgtcatgaaggttatagtcttttagctgatggagtatcttgtactccaacagttgaatatccttgtgggaaaattccaattttagaaaagagaaatgcttcaaaaccacaaggaagaattgttggaggaaaagtatgtcctaaaggagaatgtccatggcaagttttattattagtaaatggagcccagttatgtggaggtacacttattaatactatttgggttgtaagtgcagctcattgttttgataagattaaaaattggagaaacctaattgctgtcttaggtgaacatgatttatcagaacatgatggagatgaacaatcaagacgagttgcacaagtaattattccaagtacctatgttccaggaactacaaatcatgatattgcattactaagattacaccaacctgtagttcttaccgatcatgttgttccattatgtttgccagaaagaactttttcagaaaggactttagcatttgttagattttcattagtttcaggttggggacaattacttgacagaggagcaactgctttagagttgatggttttgaatgttccacgtttaatgactcaagattgtttacaacaatcccgtaaagttggggattcacctaatattacggaatatatgttctgcgctggttattcagatggatcaaaagattcttgtaaaggagattctggaggtccacatgcaactcattacagaggaacttggtatttaactggaatagtttcttggggacaaggttgtgctacagtaggacattttggagtttatacaagagtttctcaatatatagaatggttacaaaagttaatgagaagtgaaccaagaccaggagttcttcttagagctccatttcct

SEQ ID NO: 2456 - RNA, 1544 nt, Artificial Sequence
  derived and/or modified sequence
gggaaauaagagagaaaagaagaguaagaagaaauauaagagccaccauggucagccaggcacucagacugcucugccuguugcuugggcugcaggguugcuuggccgcugggggagucgcgaaagcgucggguggagaaacgcgggacaugccauggaagccuggaccccaucgcguauucgugacacaagaagaagcccacggaguguugcauagacggcgcagagcaaacgccuuucucgaagagcucagaccggggucgcucgagagggaguguaaggaagagcaguguuccuuugaagaagcacgcgaaaucuucaaagacgccgaacgaaccaagcuguuuuggaucucguauucagauggagaucagugugccucaucgccgugucaaaaugggggaagcugcaaagaucagcuucagagcuacauuugcuuuuguuugcccgcguucgaggggcggaacugugagacucacaaagaugaccaacugaucugcgucaacgagaauggugggugcgagcaguauugcuccgaccacaccggcacaaaaagaucaugccgcugucacgagggauauucgcugcucgcggacggagucagcuguacgccgacagucgaguauccaugcggaaagauuccgauucuugagaaacgcaaugccucgaagccccaggggcggaucgucgguggaaaagugugcccgaagggggagugccccuggcaggugcuccucuuggugaauggagcccaguuguguggcggcacguugaucaauacaaucuggguaguaucggcugcccauugcuucgacaaaaucaaaaacuggcgaaaccugauugcggugcugggugaacacgacuuguccgagcacgauggggacgagcagucgaggcggguagcgcaagucaucaucccauccaccuacgucccuggaacaacuaaccacgauauugcacugcucaggcugcaccaacccgucguguugacggaucauguggugccccuuugucuccccgagagaaccuucagcgagagaacguuggccuucgugcgguucucgcuugugucggggugggggcagcuucucgauaggggagcgacagcuuuggaacugaugguacugaacguaccgaggcuuaugacccaagacuguuugcaacagucgcgcaaggugggagauucgccgaauaucacugaguacauguucugugcggguuacuccgacggaucaaaggacucaugcaagggugauagcggugguccccaugcgacgcauuaccgagggacgugguaccuuacgggaaucguaucaugggggcagggaugcgcgacgguggggcacuuuggugucuacacucgcgucagccaguauauugagugguugcagaaguugaugaggagcgaaccucggccuggagugcugcucagggcaccguuuccuugauaagcugccuucugcggggcuugccuucuggccaugcccuucuucucucccuugcaccuguaccucuuggucuuugaauaaagccugaguaggaag

SEQ ID NO: 2457 - RNA, 1401 nt, Artificial Sequence
  derived and/or modified sequence
auggugucgcaggcuuugagacuacuaugccucuuacugggccugcagggcugccuugccgccggcggaguagccaaggcaagcgggggagagacgagagacaugcccuggaagccaggcccacauagaguguucgugacucaggaagaggcccauggcgugcuacaccgcaggagacgugcuaaugccuuucuggaagagcucagaccggggagccuggagcgagagugcaaggaggaacagugcaguuuugaagaagcaagggagaucuuuaaagacgcagaacggaccaagcuuuuuuggauaucguacagcgauggagaccagugcgcuagcucucccugccaaaacggaggaucuugcaaggaccagcuucaguccuauauauguuuuuguuugccugcuuucgagggacgcaacugcgagacccauaaggaugaucaguugaucuguguuaaugagaaugguggaugcgaacaguacuguagcgaucacacggggaccaaacggucgugccggugccaugaaggcuauucucuguuagcagacggaguuucaugcacucccaccguggaguacccuugcggaaagauccccauuuuggagaagcggaaugccuccaaaccacagggaaggaucguggguggaaaaguguguccaaaaggugaaugcccuuggcagguucucuuacugguaaauggcgcacagcuguguggaggcaccuugaucaacacgauuuggguugucuccgccgcccacuguuucgacaaaaucaagaacuggagaaaccuuauugcagugcuaggagaacaugaccugucugagcacgauggagacgaacagucacgcagggucgcccaagugaucaucccaaguacuuauguccccgggacuaccaaucacgacaucgcccugcuaaggcuacaccagcccguggugcugacugaucacgucgugccucucugucuucccgagcggacauuuagugagaggacccuggcguucgugcgcuuuuccuuggugaguggguggggccaguuguuggauaggggggcgacugcacuugaacuaaugguauuaaaugugccucgacucaugacgcaggacugccuccaacagucuagaaagguuggcgacucaccgaacaucaccgaauacauguucugcgcuggcuacucugauggauccaaagauucuugcaagggagauagcggcgggccucacgcaacacauuacagaggaacaugguaccuaacuggaaucgucucuuggggacagggcugugcuaccguugggcacuucggcguguacaccagggugucucaauacauugagugguuacaaaagcugaugagaucagagccuagaccuggcguguuguuaagggccccuuucccuuag

SEQ ID NO: 2458 - RNA, 1401 nt, Artificial Sequence
  derived and/or modified sequence
auggucagucaagcccucagguugcucuguuuauugcugggauugcaggguugccuggcugcuggagggguugccaaagccucaggaggagaaaccagagacaugcccuggaaaccggggccacaccgcguguucgugacccaagaagaggcccacggggugcuucacaggcgaaggagggcaaaugccuuucucgaggagcuccggccgggaucacuggaacgggaauguaaagaagaacaguguucauuugaggaagccagagagauuuuuaaggacgccgaacgcaccaaguuauuuuggauuuccuauuccgacggagaccagugugcguccagcccuugccaaaaugguggaucuuguaaagaccagcugcagagcuauauaugcuuuugucuuccugccuucgagggccguaauugcgagacucauaaagacgaccaauuaauaugugugaaugagaacggagggugcgaacaauacugcucagaccauacaggaacaaagcgaaguugccggugucaugagggguauaguuuguuagcggacggagugaguugcaccccuacaguagaauaucccuguggcaagauccccauccuggaaaagagaaacgccuccaagccucaaggcagaauugugggaggaaaggugugccccaaaggggaguguccuuggcaaguccugcuucugguuaauggagcucaacuaugcggaggaacucucaucaacacgauuuggguaguuagcgccgcucacuguuucgauaagauaaaaaauuggcggaaucugauugcugugcuuggcgagcaugaccuaagugaacaugacggagaugaacagaguaggcgaguggcacaagugauaauaccaaguacuuacguuccuggcaccacaaaccacgauaucgcccugcuaaggcugcaccagccaguaguguugaccgaccacguuguuccccuuugccucccagaaaggacauucuccgaaagaaccuuggcguuugugagauucucacuaguguccggauggggucaacugcuggacaggggggccaccgcacuggaauuaaugguuuuaaacgugccccgucucaugacgcaggacugucugcaacaaucaagaaaaguuggcgauagcccuaauauaaccgaguauauguuuugugcugguuauucugacgggucaaaagacagcuguaagggagauuccggggguccccaugcuacccauuauagaggaacgugguacuugacagggauuguaaguuggggacaaggcugugcuacugugggacauuuuggaguuuacaccaggguaucucaauauaucgaguggcugcagaagcugaugaggagugaaccucggccgggugugcugcugagagcucccuucccauag

SEQ ID NO: 2459 - protein, 2351 aa, Artificial Sequence
  derived and/or modified sequence
MQIELSTCFFLCLLRFCFSATRRYYLGAVELSWDYMQSDLGELPVDARFPPRVPKSFPFNTSVVYKKTLFVEFTDHLFNIAKPRPPWMGLLGPTIQAEVYDTVVITLKNMASHPVSLHAVGVSYWKASEGAEYDDQTSQREKEDDKVFPGGSHTYVWQVLKENGPMASDPLCLTYSYLSHVDLVKDLNSGLIGALLVCREGSLAKEKTQTLHKFILLFAVFDEGKSWHSETKNSLMQDRDAASARAWPKMHTVNGYVNRSLPGLIGCHRKSVYWHVIGMGTTPEVHSIFLEGHTFLVRNHRQASLEISPITFLTAQTLLMDLGQFLLFCHISSHQHDGMEAYVKVDSCPEEPQLRMKNNEEAEDYDDDLTDSEMDVVRFDDDNSPSFIQIRSVAKKHPKTWVHYIAAEEEDWDYAPLVLAPDDRSYKSQYLNNGPQRIGRKYKKVRFMAYTDETFKTREAIQHESGILGPLLYGEVGDTLLIIFKNQASRPYNIYPHGITDVRPLYSRRLPKGVKHLKDFPILPGEIFKYKWTVTVEDGPTKSDPRCLTRYYSSFVNMERDLASGLIGPLLICYKESVDQRGNQIMSDKRNVILFSVFDENRSWYLTENIQRFLPNPAGVQLEDPEFQASNIMHSINGYVFDSLQLSVCLHEVAYWYILSIGAQTDFLSVFFSGYTFKHKMVYEDTLTLFPFSGETVFMSMENPGLWILGCHNSDFRNRGMTALLKVSSCDKNTGDYYEDSYEDISAYLLSKNNAIEPRSFSQNSRHPSTRQKQFNATTIPENDIEKTDPWFAHRTPMPKIQNVSSSDLLMLLRQSPTPHGLSLSDLQEAKYETFSDDPSPGAIDSNNSLSEMTHFRPQLHHSGDMVFTPESGLQLRLNEKLGTTAATELKKLDFKVSSTSNNLISTIPSDNLAAGTDNTSSLGPPSMPVHYDSQLDTTLFGKKSSPLTESGGPLSLSEENNDSKLLESGLMNSQESSWGKNVSSTESGRLFKGKRAHGPALLTKDNALFKVSISLLKTNKTSNNSATNRKTHIDGPSLLIENSPSVWQNILESDTEFKKVTPLIHDRMLMDKNATALRLNHMSNKTTSSKNMEMVQQKKEGPIPPDAQNPDMSFFKMLFLPESARWIQRTHGKNSLNSGQGPSPKQLVSLGPEKSVEGQNFLSEKNKVVVGKGEFTKDVGLKEMVFPSSRNLFLTNLDNLHENNTHNQEKKIQEEIEKKETLIQENVVLPQIHTVTGTKNFMKNLFLLSTRQNVEGSYDGAYAPVLQDFRSLNDSTNRTKKHTAHFSKKGEEENLEGLGNQTKQIVEKYACTTRISPNTSQQNFVTQRSKRALKQFRLPLEETELEKRIIVDDTSTQWSKNMKHLTPSTLTQIDYNEKEKGAITQSPLSDCLTRSHSIPQANRSPLPIAKVSSFPSIRPIYLTRVLFQDNSSHLPAASYRKKDSGVQESSHFLQGAKKNNLSLAILTLEMTGDQREVGSLGTSATNSVTYKKVENTVLPKPDLPKTSGKVELLPKVHIYQKDLFPTETSNGSPGHLDLVEGSLLQGTEGAIKWNEANRPGKVPFLRVATESSAKTPSKLLDPLAWDNHYGTQIPKEEWKSQEKSPEKTAFKKKDTILSLNACESNHAIAAINEGQNKPEIEVTWAKQGRTERLCSQNPPVLKRHQREITRTTLQSDQEEIDYDDTISVEMKKEDFDIYDEDENQSPRSFQKKTRHYFIAAVERLWDYGMSSSPHVLRNRAQSGSVPQFKKVVFQEFTDGSFTQPLYRGELNEHLGLLGPYIRAEVEDNIMVTFRNQASRPYSFYSSLISYEEDQRQGAEPRKNFVKPNETKTYFWKVQHHMAPTKDEFDCKAWAYFSDVDLEKDVHSGLIGPLLVCHTNTLNPAHGRQVTVQEFALFFTIFDETKSWYFTENMERNCRAPCNIQMEDPTFKENYRFHAINGYIMDTLPGLVMAQDQRIRWYLLSMGSNENIHSIHFSGHVFTVRKKEEYKMALYNLYPGVFETVEMLPSKAGIWRVECLIGEHLHAGMSTLFLVYSNKCQTPLGMASGHIRDFQITASGQYGQWAPKLARLHYSGSINAWSTKEPFSWIKVDLLAPMIIHGIKTQGARQKFSSLYISQFIIMYSLDGKKWQTYRGNSTGTLMVFFGNVDSSGIKHNIFNPPIIARYIRLHPTHYSIRSTLRMELMGCDLNSCSMPLGMESKAISDAQITASSYFTNMFATWSPSKARLHLQGRSNAWRPQVNNPKEWLQVDFQKTMKVTGVTTQGVKSLLTSMYVKEFLISSSQDGHQWTLFFQNGKVKVFQGNQDSFTPVVNSLDPPLLTRYLRIHPQSWVHQIALRMEVLGCEAQDLY

SEQ ID NO: 2460 - protein, 1684 aa, Artificial Sequence
  derived and/or modified sequence
MQIELSTCFFLCLLRFCFSATRRYYLGAVELSWDYMQSDLGELPVDARFPPRVPKSFPFNTSVVYKKTLFVEFTDHLFNIAKPRPPWMGLLGPTIQAEVYDTVVITLKNMASHPVSLHAVGVSYWKASEGAEYDDQTSQREKEDDKVFPGGSHTYVWQVLKENGPMASDPLCLTYSYLSHVDLVKDLNSGLIGALLVCREGSLAKEKTQTLHKFILLFAVFDEGKSWHSETKNSLMQDRDAASARAWPKMHTVNGYVNRSLPGLIGCHRKSVYWHVIGMGTTPEVHSIFLEGHTFLVRNHRQASLEISPITFLTAQTLLMDLGQFLLFCHISSHQHDGMEAYVKVDSCPEEPQLRMKNNEEAEDYDDDLTDSEMDVVRFDDDNSPSFIQIRSVAKKHPKTWVHYIAAEEEDWDYAPLVLAPDDRSYKSQYLNNGPQRIGRKYKKVRFMAYTDETFKTREAIQHESGILGPLLYGEVGDTLLIIFKNQASRPYNIYPHGITDVRPLYSRRLPKGVKHLKDFPILPGEIFKYKWTVTVEDGPTKSDPRCLTRYYSSFVNMERDLASGLIGPLLICYKESVDQRGNQIMSDKRNVILFSVFDENRSWYLTENIQRFLPNPAGVQLEDPEFQASNIMHSINGYVFDSLQLSVCLHEVAYWYILSIGAQTDFLSVFFSGYTFKHKMVYEDTLTLFPFSGETVFMSMENPGLWILGCHNSDFRNRGMTALLKVSSCDKNTGDYYEDSYEDISAYLLSKNNAIEPRSFSQNPPVLKRHQREITRTTLQSDQEEIDYDDTISVEMKKEDFDIYDEDENQSPRSFQKKTRHYFIAAVERLWDYGMSSSPHVLRNRAQSGSVPQFKKVVFQEFTDGSFTQPLYRGELNEHLGLLGPYIRAEVEDNIMVTFRNQASRPYSFYSSLISYEEDQRQGAEPRKNFVKPNETKTYFWKVQHHMAPTKDEFDCKAWAYFSDVDLEKDVHSGLIGPLLVCHTNTLNPAHGRQVTVQEFALFFTIFDETKSWYFTENMERNCRAPCNIQMEDPTFKENYRFHAINGYIMDTLPGLVMAQDQRIRWYLLSMGSNENIHSIHFSGHVFTVRKKEEYKMALYNLYPGVFETVEMLPSKAGIWRVECLIGEHLHAGMSTLFLVYSNKCQTPLGMASGHIRDFQITASGQYGQWAPKLARLHYSGSINAWSTKEPFSWIKVDLLAPMIIHGIKTQGARQKFSSLYISQFIIMYSLDGKKWQTYRGNSTGTLMVFFGNVDSSGIKHNIFNPPIIARYIRLHPTHYSIRSTLRMELMGCDLNSCSMPLGMESKAISDAQITASSYFTNMFATWSPSKARLHLQGRSNAWRPQVNNPKEWLQVDFQKTMKVTGVTTQGVKSLLTSMYVKEFLISSSQDGHQWTLFFQNGKVKVFQGNQDSFTPVVNSLDPPLLTRYLRIHPQSWVHQIALRMEVLGCEAQDLYDKTHTCPPCPAPELLGGPSVFLFPPKPKDTLMISRTPEVTCVVVDVSHEDPEVKFNWYVDGVEVHNAKTKPREEQYNSTYRVVSVLTVLHQDWLNGKEYKCKVSNKALPAPIEKTISKAKGQPREPQVYTLPPSRDELTKNQVSLTCLVKGFYPSDIAVEWESNGQPENNYKTTPPVLDSDGSFFLYSKLTVDKSRWQQGNVFSCSVMHEALHNHYTQKSLSLSPGK

SEQ ID NO: 2461 - DNA, 7053 bp, Artificial Sequence
  derived and/or modified sequence
atgcagatcgagctgagcacctgcttcttcctgtgcctgctgcgcttctgcttcagcgccacccgccgctactacctgggcgccgtggagctgagctgggactacatgcagagcgacctgggcgagctgcccgtggacgcccgcttccccccccgcgtgcccaagagcttccccttcaacaccagcgtggtgtacaagaagaccctgttcgtggagttcaccgaccacctgttcaacatcgccaagccccgccccccctggatgggcctgctgggccccaccatccaggccgaggtgtacgacaccgtggtgatcaccctgaagaacatggccagccaccccgtgagcctgcacgccgtgggcgtgagctactggaaggccagcgagggcgccgagtacgacgaccagaccagccagcgcgagaaggaggacgacaaggtgttccccggcggcagccacacctacgtgtggcaggtgctgaaggagaacggccccatggccagcgaccccctgtgcctgacctacagctacctgagccacgtggacctggtgaaggacctgaacagcggcctgatcggcgccctgctggtgtgccgcgagggcagcctggccaaggagaagacccagaccctgcacaagttcatcctgctgttcgccgtgttcgacgagggcaagagctggcacagcgagaccaagaacagcctgatgcaggaccgcgacgccgccagcgcccgcgcctggcccaagatgcacaccgtgaacggctacgtgaaccgcagcctgcccggcctgatcggctgccaccgcaagagcgtgtactggcacgtgatcggcatgggcaccacccccgaggtgcacagcatcttcctggagggccacaccttcctggtgcgcaaccaccgccaggccagcctggagatcagccccatcaccttcctgaccgcccagaccctgctgatggacctgggccagttcctgctgttctgccacatcagcagccaccagcacgacggcatggaggcctacgtgaaggtggacagctgccccgaggagccccagctgcgcatgaagaacaacgaggaggccgaggactacgacgacgacctgaccgacagcgagatggacgtggtgcgcttcgacgacgacaacagccccagcttcatccagatccgcagcgtggccaagaagcaccccaagacctgggtgcactacatcgccgccgaggaggaggactgggactacgcccccctggtgctggcccccgacgaccgcagctacaagagccagtacctgaacaacggcccccagcgcatcggccgcaagtacaagaaggtgcgcttcatggcctacaccgacgagaccttcaagacccgcgaggccatccagcacgagagcggcatcctgggccccctgctgtacggcgaggtgggcgacaccctgctgatcatcttcaagaaccaggccagccgcccctacaacatctacccccacggcatcaccgacgtgcgccccctgtacagccgccgcctgcccaagggcgtgaagcacctgaaggacttccccatcctgcccggcgagatcttcaagtacaagtggaccgtgaccgtggaggacggccccaccaagagcgacccccgctgcctgacccgctactacagcagcttcgtgaacatggagcgcgacctggccagcggcctgatcggccccctgctgatctgctacaaggagagcgtggaccagcgcggcaaccagatcatgagcgacaagcgcaacgtgatcctgttcagcgtgttcgacgagaaccgcagctggtacctgaccgagaacatccagcgcttcctgcccaaccccgccggcgtgcagctggaggaccccgagttccaggccagcaacatcatgcacagcatcaacggctacgtgttcgacagcctgcagctgagcgtgtgcctgcacgaggtggcctactggtacatcctgagcatcggcgcccagaccgacttcctgagcgtgttcttcagcggctacaccttcaagcacaagatggtgtacgaggacaccctgaccctgttccccttcagcggcgagaccgtgttcatgagcatggagaaccccggcctgtggatcctgggctgccacaacagcgacttccgcaaccgcggcatgaccgccctgctgaaggtgagcagctgcgacaagaacaccggcgactactacgaggacagctacgaggacatcagcgcctacctgctgagcaagaacaacgccatcgagccccgcagcttcagccagaacagccgccaccccagcacccgccagaagcagttcaacgccaccaccatccccgagaacgacatcgagaagaccgacccctggttcgcccaccgcacccccatgcccaagatccagaacgtgagcagcagcgacctgctgatgctgctgcgccagagccccaccccccacggcctgagcctgagcgacctgcaggaggccaagtacgagaccttcagcgacgaccccagccccggcgccatcgacagcaacaacagcctgagcgagatgacccacttccgcccccagctgcaccacagcggcgacatggtgttcacccccgagagcggcctgcagctgcgcctgaacgagaagctgggcaccaccgccgccaccgagctgaagaagctggacttcaaggtgagcagcaccagcaacaacctgatcagcaccatccccagcgacaacctggccgccggcaccgacaacaccagcagcctgggcccccccagcatgcccgtgcactacgacagccagctggacaccaccctgttcggcaagaagagcagccccctgaccgagagcggcggccccctgagcctgagcgaggagaacaacgacagcaagctgctggagagcggcctgatgaacagccaggagagcagctggggcaagaacgtgagcagcaccgagagcggccgcctgttcaagggcaagcgcgcccacggccccgccctgctgaccaaggacaacgccctgttcaaggtgagcatcagcctgctgaagaccaacaagaccagcaacaacagcgccaccaaccgcaagacccacatcgacggccccagcctgctgatcgagaacagccccagcgtgtggcagaacatcctggagagcgacaccgagttcaagaaggtgacccccctgatccacgaccgcatgctgatggacaagaacgccaccgccctgcgcctgaaccacatgagcaacaagaccaccagcagcaagaacatggagatggtgcagcagaagaaggagggccccatcccccccgacgcccagaaccccgacatgagcttcttcaagatgctgttcctgcccgagagcgcccgctggatccagcgcacccacggcaagaacagcctgaacagcggccagggccccagccccaagcagctggtgagcctgggccccgagaagagcgtggagggccagaacttcctgagcgagaagaacaaggtggtggtgggcaagggcgagttcaccaaggacgtgggcctgaaggagatggtgttccccagcagccgcaacctgttcctgaccaacctggacaacctgcacgagaacaacacccacaaccaggagaagaagatccaggaggagatcgagaagaaggagaccctgatccaggagaacgtggtgctgccccagatccacaccgtgaccggcaccaagaacttcatgaagaacctgttcctgctgagcacccgccagaacgtggagggcagctacgacggcgcctacgcccccgtgctgcaggacttccgcagcctgaacgacagcaccaaccgcaccaagaagcacaccgcccacttcagcaagaagggcgaggaggagaacctggagggcctgggcaaccagaccaagcagatcgtggagaagtacgcctgcaccacccgcatcagccccaacaccagccagcagaacttcgtgacccagcgcagcaagcgcgccctgaagcagttccgcctgcccctggaggagaccgagctggagaagcgcatcatcgtggacgacaccagcacccagtggagcaagaacatgaagcacctgacccccagcaccctgacccagatcgactacaacgagaaggagaagggcgccatcacccagagccccctgagcgactgcctgacccgcagccacagcatcccccaggccaaccgcagccccctgcccatcgccaaggtgagcagcttccccagcatccgccccatctacctgacccgcgtgctgttccaggacaacagcagccacctgcccgccgccagctaccgcaagaaggacagcggcgtgcaggagagcagccacttcctgcagggcgccaagaagaacaacctgagcctggccatcctgaccctggagatgaccggcgaccagcgcgaggtgggcagcctgggcaccagcgccaccaacagcgtgacctacaagaaggtggagaacaccgtgctgcccaagcccgacctgcccaagaccagcggcaaggtggagctgctgcccaaggtgcacatctaccagaaggacctgttccccaccgagaccagcaacggcagccccggccacctggacctggtggagggcagcctgctgcagggcaccgagggcgccatcaagtggaacgaggccaaccgccccggcaaggtgcccttcctgcgcgtggccaccgagagcagcgccaagacccccagcaagctgctggaccccctggcctgggacaaccactacggcacccagatccccaaggaggagtggaagagccaggagaagagccccgagaagaccgccttcaagaagaaggacaccatcctgagcctgaacgcctgcgagagcaaccacgccatcgccgccatcaacgagggccagaacaagcccgagatcgaggtgacctgggccaagcagggccgcaccgagcgcctgtgcagccagaacccccccgtgctgaagcgccaccagcgcgagatcacccgcaccaccctgcagagcgaccaggaggagatcgactacgacgacaccatcagcgtggagatgaagaaggaggacttcgacatctacgacgaggacgagaaccagagcccccgcagcttccagaagaagacccgccactacttcatcgccgccgtggagcgcctgtgggactacggcatgagcagcagcccccacgtgctgcgcaaccgcgcccagagcggcagcgtgccccagttcaagaaggtggtgttccaggagttcaccgacggcagcttcacccagcccctgtaccgcggcgagctgaacgagcacctgggcctgctgggcccctacatccgcgccgaggtggaggacaacatcatggtgaccttccgcaaccaggccagccgcccctacagcttctacagcagcctgatcagctacgaggaggaccagcgccagggcgccgagccccgcaagaacttcgtgaagcccaacgagaccaagacctacttctggaaggtgcagcaccacatggcccccaccaaggacgagttcgactgcaaggcctgggcctacttcagcgacgtggacctggagaaggacgtgcacagcggcctgatcggccccctgctggtgtgccacaccaacaccctgaaccccgcccacggccgccaggtgaccgtgcaggagttcgccctgttcttcaccatcttcgacgagaccaagagctggtacttcaccgagaacatggagcgcaactgccgcgccccctgcaacatccagatggaggaccccaccttcaaggagaactaccgcttccacgccatcaacggctacatcatggacaccctgcccggcctggtgatggcccaggaccagcgcatccgctggtacctgctgagcatgggcagcaacgagaacatccacagcatccacttcagcggccacgtgttcaccgtgcgcaagaaggaggagtacaagatggccctgtacaacctgtaccccggcgtgttcgagaccgtggagatgctgcccagcaaggccggcatctggcgcgtggagtgcctgatcggcgagcacctgcacgccggcatgagcaccctgttcctggtgtacagcaacaagtgccagacccccctgggcatggccagcggccacatccgcgacttccagatcaccgccagcggccagtacggccagtgggcccccaagctggcccgcctgcactacagcggcagcatcaacgcctggagcaccaaggagcccttcagctggatcaaggtggacctgctggcccccatgatcatccacggcatcaagacccagggcgcccgccagaagttcagcagcctgtacatcagccagttcatcatcatgtacagcctggacggcaagaagtggcagacctaccgcggcaacagcaccggcaccctgatggtgttcttcggcaacgtggacagcagcggcatcaagcacaacatcttcaacccccccatcatcgcccgctacatccgcctgcaccccacccactacagcatccgcagcaccctgcgcatggagctgatgggctgcgacctgaacagctgcagcatgcccctgggcatggagagcaaggccatcagcgacgcccagatcaccgccagcagctacttcaccaacatgttcgccacctggagccccagcaaggcccgcctgcacctgcagggccgcagcaacgcctggcgcccccaggtgaacaaccccaaggagtggctgcaggtggacttccagaagaccatgaaggtgaccggcgtgaccacccagggcgtgaagagcctgctgaccagcatgtacgtgaaggagttcctgatcagcagcagccaggacggccaccagtggaccctgttcttccagaacggcaaggtgaaggtgttccagggcaaccaggacagcttcacccccgtggtgaacagcctggacccccccctgctgacccgctacctgcgcatccacccccagagctgggtgcaccagatcgccctgcgcatggaggtgctgggctgcgaggcccaggacctgtac

SEQ ID NO: 2462 - DNA, 7199 bp, Artificial Sequence
  derived and/or modified sequence
gggaaataagagagaaaagaagagtaagaagaaatataagagccaccatgcagatcgagctctcgacatgcttcttcttgtgcctgcttcgcttttgtttttcggcaacgaggcgctactaccttggtgccgtggaactttcatgggactacatgcagtcggatcttggagaacttccagtggacgccaggtttccacctcgggtgcccaagtcatttccctttaacacatcggtggtgtacaagaaaacattgttcgtggaattcacagaccacttgtttaacattgcgaagcccagaccgccgtggatgggtttgctcggcccgacgatccaggcggaagtctacgacacggtagtgatcacgctcaagaacatggcctcgcatcccgtatcacttcacgcagtaggagtctcctattggaaagcgtccgaaggggcagagtacgatgatcaaacatcacagcgcgagaaggaagatgacaaggtgtttccgggtggatcgcatacatatgtgtggcaggtccttaaagagaacggacccatggcatcagatcctctttgcctcacgtactcgtatttgtcgcatgtagacttggtcaaggacttgaattcaggtcttattggagcattacttgtttgtagagaaggttctctggctaaagaaaagacacagacattgcacaagtttatcctgcttttcgcggtgttcgacgagggaaaatcatggcactcggaaacgaaaaactcccttatgcaggatagggacgcagcgtcggccagagcctggcccaaaatgcacactgtcaacggttatgtcaacagaagccttcccggtttgatcggatgccacagaaaatcggtgtactggcacgtgattgggatggggacgacgcccgaagtacactccatctttttggaagggcacacctttttggtacgcaaccatagacaggcatccctcgagatttcgcctattactttcttgacggcgcagacgttgttgatggacttgggtcagtttttgctcttttgccacatctcgtcgcatcagcacgatggaatggaagcgtacgtcaaggtagacagctgtccggaagagccgcaattgaggatgaagaataacgaagaagccgaagattatgatgacgatttgacagactcagaaatggacgtcgtgcgattcgacgatgacaatagcccgagcttcatccagatcagatcagtcgccaaaaagcatccaaagacatgggtacactacatcgccgctgaagaagaggactgggattatgcacctttagttctggctcctgatgatagatcttacaagtcacagtacttgaacaacggtccgcagcggatcggaagaaagtacaaaaaggtccgctttatggcctatacagacgagacattcaagaccagggaagcaattcagcatgagagcggaattctcggacctctgctctatggagaggtcggtgacacgctgttgatcatcttcaaaaaccaggcatcaaggccctacaacatctatccgcacggtattactgacgtccggcctctctactcccgcagactccccaagggagtgaaacatcttaaagattttcccattctgcctggggagatcttcaagtataagtggacagtgacggtcgaggatggtccaaccaaatcagacccgagatgtctgacgcggtattactcgtcattcgtcaatatggagcgggacttggcctcggggttgattggaccactcctcatttgctacaaagaaagcgtcgatcagcgcggtaaccagatcatgtcggataagcgcaacgtcatccttttctcggtctttgatgaaaatcgctcgtggtatctcacggagaacatccagaggtttctgccgaatccagcgggagtacagcttgaggaccccgagttccaggcgtcgaacatcatgcatagcatcaacgggtatgtctttgatagccttcagttgagcgtgtgtcttcatgaggtcgcatactggtacatcttgagcatcggagcgcagacggactttttgtcggtgttctttagcggatacacattcaaacataagatggtgtatgaagatacactgactctctttcccttctcgggagagacagtcttcatgtcgatggagaaccccggtttgtggatcttggggtgtcataactcggatttcagaaatcgcgggatgacagctttgctgaaggtgtccagctgcgacaagaataccggagactattacgaagactcgtatgaggacatcagcgcgtacttgctctcaaagaacaatgcgattgaacctaggtcattctcgcaaaactcacggcatccttcgactcgacagaaacagttcaatgcgaccacgatccccgagaatgatatcgaaaagaccgacccttggtttgcacacagaacccccatgcctaagatccagaacgtatcatccagcgacctgcttatgcttcttaggcaatctcctacacctcatggattatcgctctccgatctccaagaagcgaagtacgagaccttttcggatgacccttcccccggtgcaattgactcaaacaattccttgtccgagatgacacacttccgaccccagcttcaccacagcggagacatggtgtttacccccgaatcgggacttcaactgaggcttaacgagaaactcgggacaacagctgcgaccgagttgaaaaagctcgatttcaaggtatcatcaacatcgaacaacctgatctccacgatcccatccgataacttggcagccggaacggacaatacgtcatcgctcggaccgccatcgatgccggtgcactatgattcgcaattggacactactctgttcggaaagaagtcgtcgcctttgacggagagcggtgggcctctctcactctcagaagagaacaacgattcgaaactgctcgaaagcggacttatgaactcccaagagtcctcatgggggaagaacgtgagctcaacagaatcaggtagactgtttaaaggaaaacgagctcatggtcctgcactcctgactaaagacaatgcgctcttcaaggtgtcgatctcgctcttgaaaaccaacaaaacatccaacaactcggcgaccaaccgaaaaacccacattgatggtccctcgcttctgattgaaaactcgccgtcggtgtggcagaacattcttgagtcggataccgagtttaagaaggtcacaccgttgatccacgaccgcatgctgatggacaaaaacgcgacggctctgaggttgaatcatatgtcgaacaagaccacttcgagcaagaatatggaaatggtgcagcaaaagaaggaaggacctattccgcccgacgcgcagaatcccgatatgtcctttttcaagatgctgtttctgcctgaatcagcaagatggatacaacgtacacatggaaaaaattctcttaactctggccaaggacctagtccaaagcagttggtgtccttgggtcccgaaaagtcagtggaggggcagaactttctctccgaaaagaacaaagtggtcgtggggaagggagaattcacaaaggatgtggggctcaaggagatggtgtttccgtcctcgcgaaaccttttcttgaccaatctggataaccttcatgagaacaacactcacaaccaggagaagaagattcaggaagaaatcgagaagaaagaaacacttattcaggaaaatgtcgtcctgccccagatccataccgtgaccgggacgaagaactttatgaagaatctcttcttgcttagcacaaggcagaacgtcgaggggagctacgatggagcgtatgcgccggtgctgcaggattttcgctcattgaacgattcaaccaatagaaccaagaaacatacggcgcacttctcgaagaaaggggaagaagagaatcttgaggggctcggcaatcagactaaacagattgtggagaaatatgcgtgtaccactcgaatttcccccaatacctcgcaacagaattttgtgactcagaggtcgaagcgggcattgaaacagtttcggttgcctcttgaagagactgaattggagaagaggattatcgtagacgatacaagcacccagtggtcgaaaaacatgaagcacctgacaccctcgacgctgacgcagatcgactataatgagaaggagaagggagccatcacccagtcgcccttgtcagattgtctgacgagatcacattcgatcccgcaagcgaatcgtagtccacttccaattgcaaaagttagctcatttccttctattcgtcctatctacctgactagggtcctcttccaagataattcaagccatctgccagcagcaagctataggaagaaagactcgggggtgcaggagtcaagccactttctgcaaggggcgaagaaaaacaatctttccctcgcgatcctcacattggagatgacaggtgaccaacgcgaagtggggtcgctcggaacatcggctacgaattcagtcacatacaagaaggtagaaaacaccgtcctgccgaagccggatttgcccaaaacttccggtaaagtcgagcttctgcccaaggtccatatctaccagaaagatttgttcccgacggagacatcaaacggctccccgggacatctcgaccttgtagagggatcgctgcttcagggaactgagggtgcgattaagtggaacgaggcgaataggcctgggaaggtgccattcttgcgcgtagccacggaatcgagcgcgaagactccatcgaaactcttggatcctcttgcgtgggacaaccattacgggacacagatccctaaggaagaatggaagtcacaagaaaagtccccggagaaaaccgcattcaaaaagaaagacactatcctttcgcttaacgcgtgtgagtcaaatcacgcgattgcggcgatcaatgaggggcagaacaagcctgaaatcgaagtcacgtgggcaaaacaggggcgcaccgaacggctgtgttcgcaaaatccgcctgtgcttaagagacatcagagagagattaccagaaccacactccagtcagaccaggaagagatcgactacgacgataccatttcagtcgagatgaagaaagaggacttcgatatctacgacgaggatgagaaccagtcacctcggtcattccagaagaagacacggcattacttcattgcagcagtggagcgcttgtgggactatggaatgtcttcaagtcctcatgttctaagaaatagggctcaatcgggatcggttcctcagttcaaaaaggtagtgtttcaggaattcacggacgggagcttcacacagcccctgtataggggtgagttgaacgagcacttgggactcctcggtccgtacattagagcagaagtcgaagacaacatcatggtgacattccggaaccaggcctcgcgaccctatagcttctatagcagcctcatttcgtacgaagaagatcagagacaaggggcggagccccgaaagaactttgtgaagccgaatgaaacaaagacctatttctggaaagtgcagcatcacatggccccaacaaaagacgagttcgattgcaaggcttgggcctacttttccgatgtggatctcgagaaagacgtccactcgggactgatcggaccccttctggtctgtcatacaaatactcttaaccctgcgcatggtcgccaggtgacggtgcaagaattcgctcttttctttaccattttcgacgaaacaaagtcctggtacttcaccgaaaacatggaacgaaattgcagagcgccttgtaacatccaaatggaggatcccacgtttaaagaaaactatcgcttccatgcaatcaatggttacatcatggacacgctccccggacttgtgatggcccaagaccagagaattcgatggtacttgctttcgatgggaagcaatgagaacattcactcgatccatttcagcggacacgtctttaccgtgcgcaagaaagaagagtataagatggcgctctacaatctttacccgggtgtgttcgaaacagtggagatgctgccctcgaaggcgggtatctggcgcgtggaatgtctgatcggcgagcacctgcacgcgggaatgtcgacgttgtttcttgtgtactcgaacaaatgtcagacgcctctcggtatggcgagcgggcatatccgggactttcagattacggcgtcagggcagtacggacagtgggcacctaaactggcacggctccactacagcgggtcaatcaacgcctggtcgacgaaagaacctttcagctggatcaaagtggaccttctggcccctatgatcattcatggaatcaagacccagggagcccggcagaagttctcgtccttgtatatctcacagtttatcatcatgtactcgcttgatgggaagaaatggcaaacgtacaggggaaactcgacggggactctgatggtattcttcgggaacgtcgactcgtcgggaatcaaacacaacatctttaacccacccatcattgcgcgatacattagactccaccccacccattactcaatcaggtcgactttgcgcatggaactgatgggatgtgacctcaattcgtgctcgatgccactggggatggagtcaaaagccatttcggacgcacagatcaccgccagctcatacttcaccaatatgttcgcaacgtggtcgccctcgaaagcgaggctccatctccagggaaggtcgaatgcgtggcgaccgcaagtgaataaccccaaagagtggttgcaggtcgatttccagaaaaccatgaaggtgacaggggtaacgacacagggggtgaaatcactgctcacttcgatgtacgtgaaagagttcttgatcagctcgtcccaagatggacatcagtggacactgttctttcagaacgggaaggtcaaagtgttccaggggaatcaggatagcttcacgcccgtcgtaaactcattggatcccccactcttgacacgctatttgcgaatccacccacaatcgtgggtgcaccagatcgcactccggatggaagtccttggttgtgaagcgcaggatctgtactgatgagctgccttctgcggggcttgccttctggccatgcccttcttctctcccttgcacctgtacctcttggtctttgaataaagcctgagtaggaag

SEQ ID NO: 2463 - DNA, 7056 bp, Artificial Sequence
  derived and/or modified sequence
atgcagatcgagctgagcacctgcttcttcctgtgcctgctgagattctgcttcagcgccaccagaagatactacctgggcgccgtggagctgagctgggactacatgcagagcgacctgggcgagctgcccgtggacgccagattcccccccagagtgcccaagagcttccccttcaacaccagcgtggtgtacaagaagaccctgttcgtggagttcaccgaccacctgttcaacatcgccaagcccagacccccctggatgggcctgctgggccccaccatccaggccgaggtgtacgacaccgtggtgatcaccctgaagaacatggccagccaccccgtgagcctgcacgccgtgggcgtgagctactggaaggccagcgagggcgccgagtacgacgaccagaccagccagagagagaaggaggacgacaaggtgttccccggcggcagccacacctacgtgtggcaggtgctgaaggagaacggccccatggccagcgaccccctgtgcctgacctacagctacctgagccacgtggacctggtgaaggacctgaacagcggcctgatcggcgccctgctggtgtgcagagagggcagcctggccaaggagaagacccagaccctgcacaagttcatcctgctgttcgccgtgttcgacgagggcaagagctggcacagcgagaccaagaacagcctgatgcaggacagagacgccgccagcgccagagcctggcccaagatgcacaccgtgaacggctacgtgaacagaagcctgcccggcctgatcggctgccacagaaagagcgtgtactggcacgtgatcggcatgggcaccacccccgaggtgcacagcatcttcctggagggccacaccttcctggtgagaaaccacagacaggccagcctggagatcagccccatcaccttcctgaccgcccagaccctgctgatggacctgggccagttcctgctgttctgccacatcagcagccaccagcacgacggcatggaggcctacgtgaaggtggacagctgccccgaggagccccagctgagaatgaagaacaacgaggaggccgaggactacgacgacgacctgaccgacagcgagatggacgtggtgagattcgacgacgacaacagccccagcttcatccagatcagaagcgtggccaagaagcaccccaagacctgggtgcactacatcgccgccgaggaggaggactgggactacgcccccctggtgctggcccccgacgacagaagctacaagagccagtacctgaacaacggcccccagagaatcggcagaaagtacaagaaggtgagattcatggcctacaccgacgagaccttcaagaccagagaggccatccagcacgagagcggcatcctgggccccctgctgtacggcgaggtgggcgacaccctgctgatcatcttcaagaaccaggccagcagaccctacaacatctacccccacggcatcaccgacgtgagacccctgtacagcagaagactgcccaagggcgtgaagcacctgaaggacttccccatcctgcccggcgagatcttcaagtacaagtggaccgtgaccgtggaggacggccccaccaagagcgaccccagatgcctgaccagatactacagcagcttcgtgaacatggagagagacctggccagcggcctgatcggccccctgctgatctgctacaaggagagcgtggaccagagaggcaaccagatcatgagcgacaagagaaacgtgatcctgttcagcgtgttcgacgagaacagaagctggtacctgaccgagaacatccagagattcctgcccaaccccgccggcgtgcagctggaggaccccgagttccaggccagcaacatcatgcacagcatcaacggctacgtgttcgacagcctgcagctgagcgtgtgcctgcacgaggtggcctactggtacatcctgagcatcggcgcccagaccgacttcctgagcgtgttcttcagcggctacaccttcaagcacaagatggtgtacgaggacaccctgaccctgttccccttcagcggcgagaccgtgttcatgagcatggagaaccccggcctgtggatcctgggctgccacaacagcgacttcagaaacagaggcatgaccgccctgctgaaggtgagcagctgcgacaagaacaccggcgactactacgaggacagctacgaggacatcagcgcctacctgctgagcaagaacaacgccatcgagcccagaagcttcagccagaacagcagacaccccagcaccagacagaagcagttcaacgccaccaccatccccgagaacgacatcgagaagaccgacccctggttcgcccacagaacccccatgcccaagatccagaacgtgagcagcagcgacctgctgatgctgctgagacagagccccaccccccacggcctgagcctgagcgacctgcaggaggccaagtacgagaccttcagcgacgaccccagccccggcgccatcgacagcaacaacagcctgagcgagatgacccacttcagaccccagctgcaccacagcggcgacatggtgttcacccccgagagcggcctgcagctgagactgaacgagaagctgggcaccaccgccgccaccgagctgaagaagctggacttcaaggtgagcagcaccagcaacaacctgatcagcaccatccccagcgacaacctggccgccggcaccgacaacaccagcagcctgggcccccccagcatgcccgtgcactacgacagccagctggacaccaccctgttcggcaagaagagcagccccctgaccgagagcggcggccccctgagcctgagcgaggagaacaacgacagcaagctgctggagagcggcctgatgaacagccaggagagcagctggggcaagaacgtgagcagcaccgagagcggcagactgttcaagggcaagagagcccacggccccgccctgctgaccaaggacaacgccctgttcaaggtgagcatcagcctgctgaagaccaacaagaccagcaacaacagcgccaccaacagaaagacccacatcgacggccccagcctgctgatcgagaacagccccagcgtgtggcagaacatcctggagagcgacaccgagttcaagaaggtgacccccctgatccacgacagaatgctgatggacaagaacgccaccgccctgagactgaaccacatgagcaacaagaccaccagcagcaagaacatggagatggtgcagcagaagaaggagggccccatcccccccgacgcccagaaccccgacatgagcttcttcaagatgctgttcctgcccgagagcgccagatggatccagagaacccacggcaagaacagcctgaacagcggccagggccccagccccaagcagctggtgagcctgggccccgagaagagcgtggagggccagaacttcctgagcgagaagaacaaggtggtggtgggcaagggcgagttcaccaaggacgtgggcctgaaggagatggtgttccccagcagcagaaacctgttcctgaccaacctggacaacctgcacgagaacaacacccacaaccaggagaagaagatccaggaggagatcgagaagaaggagaccctgatccaggagaacgtggtgctgccccagatccacaccgtgaccggcaccaagaacttcatgaagaacctgttcctgctgagcaccagacagaacgtggagggcagctacgacggcgcctacgcccccgtgctgcaggacttcagaagcctgaacgacagcaccaacagaaccaagaagcacaccgcccacttcagcaagaagggcgaggaggagaacctggagggcctgggcaaccagaccaagcagatcgtggagaagtacgcctgcaccaccagaatcagccccaacaccagccagcagaacttcgtgacccagagaagcaagagagccctgaagcagttcagactgcccctggaggagaccgagctggagaagagaatcatcgtggacgacaccagcacccagtggagcaagaacatgaagcacctgacccccagcaccctgacccagatcgactacaacgagaaggagaagggcgccatcacccagagccccctgagcgactgcctgaccagaagccacagcatcccccaggccaacagaagccccctgcccatcgccaaggtgagcagcttccccagcatcagacccatctacctgaccagagtgctgttccaggacaacagcagccacctgcccgccgccagctacagaaagaaggacagcggcgtgcaggagagcagccacttcctgcagggcgccaagaagaacaacctgagcctggccatcctgaccctggagatgaccggcgaccagagagaggtgggcagcctgggcaccagcgccaccaacagcgtgacctacaagaaggtggagaacaccgtgctgcccaagcccgacctgcccaagaccagcggcaaggtggagctgctgcccaaggtgcacatctaccagaaggacctgttccccaccgagaccagcaacggcagccccggccacctggacctggtggagggcagcctgctgcagggcaccgagggcgccatcaagtggaacgaggccaacagacccggcaaggtgcccttcctgagagtggccaccgagagcagcgccaagacccccagcaagctgctggaccccctggcctgggacaaccactacggcacccagatccccaaggaggagtggaagagccaggagaagagccccgagaagaccgccttcaagaagaaggacaccatcctgagcctgaacgcctgcgagagcaaccacgccatcgccgccatcaacgagggccagaacaagcccgagatcgaggtgacctgggccaagcagggcagaaccgagagactgtgcagccagaacccccccgtgctgaagagacaccagagagagatcaccagaaccaccctgcagagcgaccaggaggagatcgactacgacgacaccatcagcgtggagatgaagaaggaggacttcgacatctacgacgaggacgagaaccagagccccagaagcttccagaagaagaccagacactacttcatcgccgccgtggagagactgtgggactacggcatgagcagcagcccccacgtgctgagaaacagagcccagagcggcagcgtgccccagttcaagaaggtggtgttccaggagttcaccgacggcagcttcacccagcccctgtacagaggcgagctgaacgagcacctgggcctgctgggcccctacatcagagccgaggtggaggacaacatcatggtgaccttcagaaaccaggccagcagaccctacagcttctacagcagcctgatcagctacgaggaggaccagagacagggcgccgagcccagaaagaacttcgtgaagcccaacgagaccaagacctacttctggaaggtgcagcaccacatggcccccaccaaggacgagttcgactgcaaggcctgggcctacttcagcgacgtggacctggagaaggacgtgcacagcggcctgatcggccccctgctggtgtgccacaccaacaccctgaaccccgcccacggcagacaggtgaccgtgcaggagttcgccctgttcttcaccatcttcgacgagaccaagagctggtacttcaccgagaacatggagagaaactgcagagccccctgcaacatccagatggaggaccccaccttcaaggagaactacagattccacgccatcaacggctacatcatggacaccctgcccggcctggtgatggcccaggaccagagaatcagatggtacctgctgagcatgggcagcaacgagaacatccacagcatccacttcagcggccacgtgttcaccgtgagaaagaaggaggagtacaagatggccctgtacaacctgtaccccggcgtgttcgagaccgtggagatgctgcccagcaaggccggcatctggagagtggagtgcctgatcggcgagcacctgcacgccggcatgagcaccctgttcctggtgtacagcaacaagtgccagacccccctgggcatggccagcggccacatcagagacttccagatcaccgccagcggccagtacggccagtgggcccccaagctggccagactgcactacagcggcagcatcaacgcctggagcaccaaggagcccttcagctggatcaaggtggacctgctggcccccatgatcatccacggcatcaagacccagggcgccagacagaagttcagcagcctgtacatcagccagttcatcatcatgtacagcctggacggcaagaagtggcagacctacagaggcaacagcaccggcaccctgatggtgttcttcggcaacgtggacagcagcggcatcaagcacaacatcttcaacccccccatcatcgccagatacatcagactgcaccccacccactacagcatcagaagcaccctgagaatggagctgatgggctgcgacctgaacagctgcagcatgcccctgggcatggagagcaaggccatcagcgacgcccagatcaccgccagcagctacttcaccaacatgttcgccacctggagccccagcaaggccagactgcacctgcagggcagaagcaacgcctggagaccccaggtgaacaaccccaaggagtggctgcaggtggacttccagaagaccatgaaggtgaccggcgtgaccacccagggcgtgaagagcctgctgaccagcatgtacgtgaaggagttcctgatcagcagcagccaggacggccaccagtggaccctgttcttccagaacggcaaggtgaaggtgttccagggcaaccaggacagcttcacccccgtggtgaacagcctggacccccccctgctgaccagatacctgagaatccacccccagagctgggtgcaccagatcgccctgagaatggaggtgctgggctgcgaggcccaggacctgtactag

SEQ ID NO: 2464 - DNA, 7056 bp, Artificial Sequence
  derived and/or modified sequence
atgcagatcgaattgagcacttgttttttcctctgtctcctccgcttctgtttttctgccacgcgccggtattatctcggagccgttgagctttcctgggattacatgcagagcgacttgggcgagctgcctgtggacgcgcggtttccgcccagagtcccaaaatcatttcccttcaatacttccgtagtttacaagaagaccctctttgtcgagtttactgaccacctgttcaacattgccaagccacgtcccccctggatgggtctgctcggccccactatccaagccgaggtttatgacaccgtggtaatcaccctgaagaatatggcaagccatcctgttagcttacatgccgtgggcgtttcatattggaaagcctcagaaggagccgaatacgacgaccaaacctcccagcgcgagaaagaagacgataaggtcttccccggagggagccatacatatgtatggcaggtgttgaaagagaatggccccatggcctcagatcccctctgcctgacatacagctacctgtcccacgtggacctggtgaaagacctgaactccggtctgatcggcgccttactcgtctgtcgcgagggaagtttagcgaaggagaaaacccagacccttcacaaatttattctgctttttgccgtgttcgacgagggtaaatcctggcattccgagacgaagaattctcttatgcaagatagagatgcagctagcgccagggcctggccgaaaatgcacacggttaatggatacgtgaatcgcagtcttccagggctgatcgggtgtcataggaagtctgtatactggcacgtgatcgggatggggacaactcccgaggtgcatagcatcttcctagaaggtcatacattcctggtaaggaatcatcggcaagcatctctcgagatttccccaattaccttcctgacagcacaaaccctcctcatggatcttggacagttccttttattctgccacatcagctcacaccaacacgatgggatggaggcttacgtgaaggtcgactcatgccccgaggagccccaattgcggatgaaaaataacgaagaagccgaggattacgacgatgacctgaccgactccgaaatggatgttgtccgtttcgatgacgacaatagccctagctttattcaaatcagatccgttgcaaagaagcaccctaagacctgggtccactatatcgccgctgaggaggaagactgggattacgcacccctcgtcttggctcccgatgaccgcagctacaagtctcagtacttgaacaacggaccacagcgcataggcaggaagtataagaaagttcggtttatggcatatactgatgaaacattcaagacgcgggaggccatccagcatgagtctggcatccttggcccactgctctacggggaggtcggagacacactgttgattattttcaaaaatcaggcctctcgcccttacaacatttatccgcacggcattacagacgtgagacctctgtatagccgcaggcttcccaagggcgttaaacatttgaaggattttcccatcttgcctggcgagatctttaagtataaatggaccgtaactgtggaggacggcccaaccaagtcagatcccaggtgccttacccgctactacagttcgtttgtgaatatggaacgggacctcgcctccggcttgataggaccgcttcttatatgctataaagaatctgtggaccaacgcggcaatcagatcatgagcgacaaaaggaatgtcatccttttctccgtcttcgatgagaacagaagctggtacctcactgagaacatccagcgattcttgcctaacccagccggagtgcagctagaagatcccgaattccaggcctctaatatcatgcactccattaacggctatgtctttgattcattgcagctttccgtgtgtctccacgaggtcgcatactggtatattctgtctattggcgcccagactgattttcttagtgtctttttcagcgggtacacattcaaacacaagatggtgtatgaggatacactgacgctctttccattcagtggtgagactgtgttcatgtcaatggaaaaccctgggttatggatcttaggatgtcacaacagtgattttcggaataggggaatgaccgccctcctgaaagtaagtagctgcgacaagaatacgggggattattacgaagattcctacgaagatattagtgcatatctgttatctaaaaataatgccatcgaaccacgaagctttagccagaattcaaggcacccatcaaccagacaaaaacagtttaacgccacaactattcctgagaacgacattgagaaaactgatccctggtttgcccatcgcaccccgatgccaaaaatccagaatgtatcgtcttctgacctcttgatgctacttcggcagtcgccgacccctcatggactgtcactgtcagatcttcaggaggcaaagtatgaaaccttttcagacgacccttccccgggagctatcgattctaataattctctgtcagaaatgactcactttcgaccgcaattgcatcattccggagacatggtcttcacgccagaaagtgggttacagctgcgcttgaacgaaaaactgggcaccactgccgctacagaactgaaaaagcttgacttcaaagtgtctagcacctctaacaacctgatatccaccatacctagtgataaccttgccgccggaaccgacaacacatcctcgctcgggccaccgtcgatgccggtgcactacgactcacagttagacacaaccctttttggcaagaagtcatcaccactgaccgagtcaggggggcctctcagcctgtcggaagagaacaacgattccaaacttctcgaaagtgggttaatgaattcccaagaatcctcttggggtaagaacgtctcatcaactgagtccggtagactctttaaagggaagcgagcgcacggaccagccctcctgacaaaagacaatgccctctttaaagtcagcatatccttattgaagaccaataaaacaagtaataacagcgccacaaaccggaaaactcatatagatggtcccagcctgctgattgagaacagccctagcgtgtggcagaatatattagagtcagacacagaattcaagaaagtaacccccctgattcatgacaggatgctgatggacaagaacgccacggccctccggttaaatcacatgtcaaacaaaacaacaagctctaagaacatggagatggtccagcagaagaaggagggcccaattcctccagacgcgcaaaaccccgatatgtctttcttcaaaatgctgtttctgcccgaatccgcacgctggatccagcggacacatggcaaaaattcactgaactccggacagggccccagtcctaagcaactggtgagcttggggcccgagaagtccgtggaaggacagaatttcttgtctgagaaaaataaagttgtagttgggaagggggagttcaccaaagacgtcgggctgaaagagatggttttcccaagttcccgcaatctgtttctgacaaacctggacaacctgcatgagaataatacgcataaccaagagaaaaaaattcaagaagagatagagaaaaaggagacccttatacaggagaatgtggtcttaccgcagatccacacggtgactggcactaaaaacttcatgaagaacctgtttctgctcagtaccagacaaaatgtggaggggagctacgacggagcctatgccccggtcctccaggattttaggtcgctgaacgactccactaatcgaactaaaaagcataccgcccacttttccaagaagggggaagaagaaaaccttgaggggcttggcaatcagaccaaacagatcgtggagaaatatgcttgcactaccagaatttcccccaacaccagccaacagaatttcgtcacacaacgttccaaacgagcactaaagcagttccgcctgccactcgaagagacagaactggaaaaacgcatcatcgtggacgatacttccacgcaatggtccaaaaacatgaagcatctaaccccgagcactcttacacagatagactataacgagaaggaaaagggggccatcactcagtcccccctgtccgattgcctgacaaggtcccacagcatcccacaggctaaccgatccccgctccctatagcaaaagtgtcatcctttccctctatacgccccatctacttaacacgagtgctttttcaggacaacagcagtcacctgcctgccgccagttatagaaaaaaggactcgggcgtgcaagagtcttcgcacttcttacaaggcgcaaagaaaaataatttgtcactggcaattctcacgctggagatgacaggcgatcaaagagaggtgggctccctgggaacctcagctaccaactctgtcacttataaaaaagtggaaaacacagtgttgcccaagccagatcttcctaagacaagcggcaaagtggagctcctcccaaaagtgcatatctaccagaaggacctgtttccaacagagacctctaatggatctcccgggcatttggacttggtcgaaggctctttgcttcagggtaccgaaggagccatcaagtggaatgaggccaaccgccccggcaaagtgccgttccttagagtggcaaccgagtcgtcagccaaaactccgtctaaactcctggacccactggcttgggacaaccactacggcacgcagatccccaaggaggagtggaagagccaagagaagtcacctgaaaaaacagcctttaagaaaaaggatacgattctgtccctgaatgcttgcgaatcaaatcatgccatcgcagcaataaacgagggccagaacaagcccgagattgaggtcacatgggccaagcagggtaggacagagaggctttgctctcagaacccgcccgtgctcaagcggcatcagcgcgaaattaccaggacaaccctacagtccgaccaggaggaaatcgactatgatgatacgatctcagtagaaatgaaaaaggaagacttcgatatctacgacgaggatgagaaccagagtcccaggtcatttcagaagaaaacgaggcattactttatcgcagccgtggagagactctgggactacgggatgagttcttcaccccacgtgctgagaaaccgggcacagtccggttctgtgccccagttcaaaaaggtggtattccaagagttcacagacgggtccttcacgcagccattataccgcggggagctaaatgaacacctcggcctgctgggtccctacatccgcgctgaagtagaggacaacatcatggtgacctttcggaatcaggcttctcgaccctactccttctactcatcacttatctcttatgaagaagaccagagacagggagctgaacctcgtaagaactttgtgaagcccaacgaaactaagacttacttctggaaggtgcagcatcatatggccccaaccaaggacgaatttgactgtaaggcttgggcatacttcagtgatgttgacctggagaaggatgttcactctggtctcataggaccgctcctggtgtgccataccaatacccttaacccagcccacgggaggcaagttaccgtgcaggaatttgcactatttttcacaatattcgacgagacgaaatcttggtacttcacagagaacatggaaaggaactgccgggccccgtgcaacatccaaatggaagacccgacctttaaagagaattacagatttcacgcgatcaacgggtatattatggacaccttgcccggcttggtgatggcccaggaccaacgcattcgctggtacctgctgtcaatggggtctaacgagaacatccactccattcatttcagtggccatgtgtttacagtgaggaaaaaggaggagtataaaatggctctgtacaacctttaccccggggtttttgagactgtagagatgctaccctcaaaggcagggatttggagggtagagtgtttgattggggagcaccttcacgcaggcatgtccacattattccttgtgtactcaaataagtgccagacccccctcggcatggcctctggacacatcagagacttccagattaccgccagtggccagtatggacagtgggctccaaagctcgcccggctgcattactccggctcaataaatgcttggtccactaaagagccattctcctggatcaaggtggaccttctggcccctatgattattcacggcattaaaacccagggcgcccgccagaaatttagctcattatatatctcccaattcatcattatgtattccctagatggtaaaaaatggcagacatatcgcgggaattccaccggcactctgatggtgtttttcggcaacgtcgattcatcaggcatcaagcataacatctttaatcctcctatcattgcccgttatatccgcctgcaccccacacattattcaattcggagcaccctgaggatggaactgatggggtgcgatttgaatagctgctctatgcctctaggcatggagagcaaggctatcagcgatgctcagatcacagcaagtagttacttcacaaatatgtttgcaacatggtcaccaagtaaagccagactacacctgcaggggaggtcaaatgcatggagaccacaggtcaacaacccaaaggagtggttgcaggtggactttcagaagactatgaaggtcactggcgtgacgacccaaggcgtcaagtccctcctgacctccatgtatgtgaaggagtttttgatttcaagttcacaagacggacatcaatggaccctcttttttcagaatggcaaggtgaaagtattccaaggcaaccaggattcttttacccccgttgtgaactcccttgaccccccactgctgaccaggtacctaagaatccatccccagagttgggtgcatcagattgcactgcgcatggaagtgttagggtgcgaggcccaggatctatattag

SEQ ID NO: 2465 - DNA, 9059 bp, Artificial Sequence
  derived and/or modified sequence
gataaaaaggaagcaatcctatcggttactgcttagtgctgagcacatccagtgggtaaagttccttaaaatgctctgcaaagaaattgggacttttcattaaatcagaaattttacttttttcccctcctgggagctaaagatattttagagaagaattaaccttttgcttctccagttgaacatttgtagcaataagtcatgcaaatagagctctccacctgcttctttctgtgccttttgcgattctgctttagtgccaccagaagatactacctgggtgcagtggaactgtcatgggactatatgcaaagtgatctcggtgagctgcctgtggacgcaagatttcctcctagagtgccaaaatcttttccattcaacacctcagtcgtgtacaaaaagactctgtttgtagaattcacggatcaccttttcaacatcgctaagccaaggccaccctggatgggtctgctaggtcctaccatccaggctgaggtttatgatacagtggtcattacacttaagaacatggcttcccatcctgtcagtcttcatgctgttggtgtatcctactggaaagcttctgagggagctgaatatgatgatcagaccagtcaaagggagaaagaagatgataaagtcttccctggtggaagccatacatatgtctggcaggtcctgaaagagaatggtccaatggcctctgacccactgtgccttacctactcatatctttctcatgtggacctggtaaaagacttgaattcaggcctcattggagccctactagtatgtagagaagggagtctggccaaggaaaagacacagaccttgcacaaatttatactactttttgctgtatttgatgaagggaaaagttggcactcagaaacaaagaactccttgatgcaggatagggatgctgcatctgctcgggcctggcctaaaatgcacacagtcaatggttatgtaaacaggtctctgccaggtctgattggatgccacaggaaatcagtctattggcatgtgattggaatgggcaccactcctgaagtgcactcaatattcctcgaaggtcacacatttcttgtgaggaaccatcgccaggcgtccttggaaatctcgccaataactttccttactgctcaaacactcttgatggaccttggacagtttctactgttttgtcatatctcttcccaccaacatgatggcatggaagcttatgtcaaagtagacagctgtccagaggaaccccaactacgaatgaaaaataatgaagaagcggaagactatgatgatgatcttactgattctgaaatggatgtggtcaggtttgatgatgacaactctccttcctttatccaaattcgctcagttgccaagaagcatcctaaaacttgggtacattacattgctgctgaagaggaggactgggactatgctcccttagtcctcgcccccgatgacagaagttataaaagtcaatatttgaacaatggccctcagcggattggtaggaagtacaaaaaagtccgatttatggcatacacagatgaaacctttaagactcgtgaagctattcagcatgaatcaggaatcttgggacctttactttatggggaagttggagacacactgttgattatatttaagaatcaagcaagcagaccatataacatctaccctcacggaatcactgatgtccgtcctttgtattcaaggagattaccaaaaggtgtaaaacatttgaaggattttccaattctgccaggagaaatattcaaatataaatggacagtgactgtagaagatgggccaactaaatcagatcctcggtgcctgacccgctattactctagtttcgttaatatggagagagatctagcttcaggactcattggccctctcctcatctgctacaaagaatctgtagatcaaagaggaaaccagataatgtcagacaagaggaatgtcatcctgttttctgtatttgatgagaaccgaagctggtacctcacagagaatatacaacgctttctccccaatccagctggagtgcagcttgaggatccagagttccaagcctccaacatcatgcacagcatcaatggctatgtttttgatagtttgcagttgtcagtttgtttgcatgaggtggcatactggtacattctaagcattggagcacagactgacttcctttctgtcttcttctctggatataccttcaaacacaaaatggtctatgaagacacactcaccctattcccattctcaggagaaactgtcttcatgtcgatggaaaacccaggtctatggattctggggtgccacaactcagactttcggaacagaggcatgaccgccttactgaaggtttctagttgtgacaagaacactggtgattattacgaggacagttatgaagatatttcagcatacttgctgagtaaaaacaatgccattgaaccaagaagcttctcccagaattcaagacaccctagcactaggcaaaagcaatttaatgccaccacaattccagaaaatgacatagagaagactgacccttggtttgcacacagaacacctatgcctaaaatacaaaatgtctcctctagtgatttgttgatgctcttgcgacagagtcctactccacatgggctatccttatctgatctccaagaagccaaatatgagactttttctgatgatccatcacctggagcaatagacagtaataacagcctgtctgaaatgacacacttcaggccacagctccatcacagtggggacatggtatttacccctgagtcaggcctccaattaagattaaatgagaaactggggacaactgcagcaacagagttgaagaaacttgatttcaaagtttctagtacatcaaataatctgatttcaacaattccatcagacaatttggcagcaggtactgataatacaagttccttaggacccccaagtatgccagttcattatgatagtcaattagataccactctatttggcaaaaagtcatctccccttactgagtctggtggacctctgagcttgagtgaagaaaataatgattcaaagttgttagaatcaggtttaatgaatagccaagaaagttcatggggaaaaaatgtatcgtcaacagagagtggtaggttatttaaagggaaaagagctcatggacctgctttgttgactaaagataatgccttattcaaagttagcatctctttgttaaagacaaacaaaacttccaataattcagcaactaatagaaagactcacattgatggcccatcattattaattgagaatagtccatcagtctggcaaaatatattagaaagtgacactgagtttaaaaaagtgacacctttgattcatgacagaatgcttatggacaaaaatgctacagctttgaggctaaatcatatgtcaaataaaactacttcatcaaaaaacatggaaatggtccaacagaaaaaagagggccccattccaccagatgcacaaaatccagatatgtcgttctttaagatgctattcttgccagaatcagcaaggtggatacaaaggactcatggaaagaactctctgaactctgggcaaggccccagtccaaagcaattagtatccttaggaccagaaaaatctgtggaaggtcagaatttcttgtctgagaaaaacaaagtggtagtaggaaagggtgaatttacaaaggacgtaggactcaaagagatggtttttccaagcagcagaaacctatttcttactaacttggataatttacatgaaaataatacacacaatcaagaaaaaaaaattcaggaagaaatagaaaagaaggaaacattaatccaagagaatgtagttttgcctcagatacatacagtgactggcactaagaatttcatgaagaaccttttcttactgagcactaggcaaaatgtagaaggttcatatgacggggcatatgctccagtacttcaagattttaggtcattaaatgattcaacaaatagaacaaagaaacacacagctcatttctcaaaaaaaggggaggaagaaaacttggaaggcttgggaaatcaaaccaagcaaattgtagagaaatatgcatgcaccacaaggatatctcctaatacaagccagcagaattttgtcacgcaacgtagtaagagagctttgaaacaattcagactcccactagaagaaacagaacttgaaaaaaggataattgtggatgacacctcaacccagtggtccaaaaacatgaaacatttgaccccgagcaccctcacacagatagactacaatgagaaggagaaaggggccattactcagtctcccttatcagattgccttacgaggagtcatagcatccctcaagcaaatagatctccattacccattgcaaaggtatcatcatttccatctattagacctatatatctgaccagggtcctattccaagacaactcttctcatcttccagcagcatcttatagaaagaaagattctggggtccaagaaagcagtcatttcttacaaggagccaaaaaaaataacctttctttagccattctaaccttggagatgactggtgatcaaagagaggttggctccctggggacaagtgccacaaattcagtcacatacaagaaagttgagaacactgttctcccgaaaccagacttgcccaaaacatctggcaaagttgaattgcttccaaaagttcacatttatcagaaggacctattccctacggaaactagcaatgggtctcctggccatctggatctcgtggaagggagccttcttcagggaacagagggagcgattaagtggaatgaagcaaacagacctggaaaagttccctttctgagagtagcaacagaaagctctgcaaagactccctccaagctattggatcctcttgcttgggataaccactatggtactcagataccaaaagaagagtggaaatcccaagagaagtcaccagaaaaaacagcttttaagaaaaaggataccattttgtccctgaacgcttgtgaaagcaatcatgcaatagcagcaataaatgagggacaaaataagcccgaaatagaagtcacctgggcaaagcaaggtaggactgaaaggctgtgctctcaaaacccaccagtcttgaaacgccatcaacgggaaataactcgtactactcttcagtcagatcaagaggaaattgactatgatgataccatatcagttgaaatgaagaaggaagattttgacatttatgatgaggatgaaaatcagagcccccgcagctttcaaaagaaaacacgacactattttattgctgcagtggagaggctctgggattatgggatgagtagctccccacatgttctaagaaacagggctcagagtggcagtgtccctcagttcaagaaagttgttttccaggaatttactgatggctcctttactcagcccttataccgtggagaactaaatgaacatttgggactcctggggccatatataagagcagaagttgaagataatatcatggtaactttcagaaatcaggcctctcgtccctattccttctattctagccttatttcttatgaggaagatcagaggcaaggagcagaacctagaaaaaactttgtcaagcctaatgaaaccaaaacttacttttggaaagtgcaacatcatatggcacccactaaagatgagtttgactgcaaagcctgggcttatttctctgatgttgacctggaaaaagatgtgcactcaggcctgattggaccccttctggtctgccacactaacacactgaaccctgctcatgggagacaagtgacagtacaggaatttgctctgtttttcaccatctttgatgagaccaaaagctggtacttcactgaaaatatggaaagaaactgcagggctccctgcaatatccagatggaagatcccacttttaaagagaattatcgcttccatgcaatcaatggctacataatggatacactacctggcttagtaatggctcaggatcaaaggattcgatggtatctgctcagcatgggcagcaatgaaaacatccattctattcatttcagtggacatgtgttcactgtacgaaaaaaagaggagtataaaatggcactgtacaatctctatccaggtgtttttgagacagtggaaatgttaccatccaaagctggaatttggcgggtggaatgccttattggcgagcatctacatgctgggatgagcacactttttctggtgtacagcaataagtgtcagactcccctgggaatggcttctggacacattagagattttcagattacagcttcaggacaatatggacagtgggccccaaagctggccagacttcattattccggatcaatcaatgcctggagcaccaaggagcccttttcttggatcaaggtggatctgttggcaccaatgattattcacggcatcaagacccagggtgcccgtcagaagttctccagcctctacatctctcagtttatcatcatgtatagtcttgatgggaagaagtggcagacttatcgaggaaattccactggaaccttaatggtcttctttggcaatgtggattcatctgggataaaacacaatatttttaaccctccaattattgctcgatacatccgtttgcacccaactcattatagcattcgcagcactcttcgcatggagttgatgggctgtgatttaaatagttgcagcatgccattgggaatggagagtaaagcaatatcagatgcacagattactgcttcatcctactttaccaatatgtttgccacctggtctccttcaaaagctcgacttcacctccaagggaggagtaatgcctggagacctcaggtgaataatccaaaagagtggctgcaagtggacttccagaagacaatgaaagtcacaggagtaactactcagggagtaaaatctctgcttaccagcatgtatgtgaaggagttcctcatctccagcagtcaagatggccatcagtggactctcttttttcagaatggcaaagtaaaggtttttcagggaaatcaagactccttcacacctgtggtgaactctctagacccaccgttactgactcgctaccttcgaattcacccccagagttgggtgcaccagattgccctgaggatggaggttctgggctgcgaggcacaggacctctactgagggtggccactgcagcacctgccactgccgtcacctctccctcctcagctccagggcagtgtccctccctggcttgccttctacctttgtgctaaatcctagcagacactgccttgaagcctcctgaattaactatcatcagtcctgcatttctttggtggggggccaggagggtgcatccaatttaacttaactcttacctattttctgcagctgctcccagattactccttccttccaatataactaggcaaaaagaagtgaggagaaacctgcatgaaagcattcttccctgaaaagttaggcctctcagagtcaccacttcctctgttgtagaaaaactatgtgatgaaactttgaaaaagatatttatgatgttaacatttcaggttaagcctcatacgtttaaaataaaactctcagttgtttattatcctgatcaagcatggaacaaagcatgtttcaggatcagatcaatacaatcttggagtcaaaaggcaaatcatttggacaatctgcaaaatggagagaatacaataactactacagtaaagtctgtttctgcttccttacacatagatataattatgttatttagtcattatgaggggcacattcttatctccaaaactagcattcttaaactgagaattatagatggggttcaagaatccctaagtcccctgaaattatataaggcattctgtataaatgcaaatgtgcatttttctgacgagtgtccatagatataaagccatttggtcttaattctgaccaataaaaaaataagtcaggaggatgcaattgttgaaagctttgaaataaaataacaatgtcttcttgaaatttgtgatggccaagaaagaaaatgatgatgacattaggcttctaaaggacatacatttaatatttctgtggaaatatgaggaaaatccatggttatctgagataggagatacaaactttgtaattctaataatgcactcagtttactctctccctctactaatttcctgctgaaaataacacaacaaaaatgtaacaggggaaattatataccgtgactgaaaactagagtcctacttacatagttgaaatatcaaggaggtcagaagaaaattggactggtgaaaacagaaaaaacactccagtctgccatatcaccacacaataggatcccccttcttgccctccacccccataagattgtgaagggtttactgctccttccatctgcctgaccccttcactatgactacacagaatctcctgatagtaaagggggctggagacaaggataagttatagagcagttggaggaagcatccaaagattgcaacccagggcaaatggaaaacaggagatcctaatatgaaagaaaaatggatcccaatctgagaaaaggcaaaagaatggctacttttttctatgctggagtattttctaataatcctgcttgacccttatctgacctctttggaaactataacatagctgtcacagtatagtcacaatccacaaatgatgcaggtgcaaatggtttatagccctgtgaagttcttaaagtttagaggctaacttacagaaatgaataagttgttttgttttatagcccggtagaggagttaaccccaaaggtgatatggttttatttcctgttatgtttaacttgataatcttattttggcattcttttcccattgactatatacatctctatttctcaaatgttcatggaactagctcttttattttcctgctggtttcttcagtaatgagttaaataaaacattgacacatac

SEQ ID NO: 2466 - DNA, 7056 bp, Artificial Sequence
  derived and/or modified sequence
atgcagatcgagctgagcacctgcttcttcctgtgcctgctgcgcttctgcttcagcgccacccggcgctactacctgggcgctgtggagctgtcctgggactacatgcagagcgacctgggggagctgcctgtggatgcccgcttccccccccgggtgcccaagagcttccccttcaacacctctgtggtgtacaagaagaccctgtttgtggagttcacagaccacctgttcaacatcgccaagcccaggcctccctggatgggcctgctgggccccaccatccaggccgaggtgtatgacacagtggtgatcaccctgaagaacatggccagccaccctgtgtccctgcatgctgtgggcgtgtcctactggaaggccagcgagggcgcagaatatgatgaccagaccagccagcgggagaaggaggatgacaaggtgtttcctgggggcagccacacctacgtgtggcaggtgctgaaggaaaatggccccatggccagtgaccccctgtgcctgacctacagctacctgagccacgtggacctggtgaaggacctgaacagcggcctcatcggggccctgctggtgtgccgggagggcagcctggccaaggagaagacccagaccctgcacaagttcatcctgctgtttgctgtgtttgatgagggcaagtcctggcacagcgagaccaagaacagcctgatgcaggacagagatgctgccagcgcccgggcctggcccaagatgcacacagtgaatggctacgtgaacagaagcctgcccggcctgattggctgccacaggaagtctgtgtactggcacgtgattggcatgggcaccaccccagaggtgcacagcatcttcctggagggccacaccttcctggtgaggaaccaccggcaggccagcctggagatcagccccatcaccttcctgacagcccagaccctgctgatggacctgggccagttcctgctcttctgccacatcagcagccaccagcatgatggcatggaggcctacgtgaaggtggacagctgcccagaggagccccagctgaggatgaagaacaatgaggaggctgaagattatgatgatgacctgacagacagcgagatggatgtggtgcgctttgatgatgacaacagccccagcttcatccagatccgctctgtggccaagaagcaccccaagacctgggtgcactacatcgctgctgaggaggaggactgggactatgcccccctggtgctggccccagatgacaggagctacaagagccagtacctgaacaacggcccccagagaattggaaggaagtacaagaaggtgcgcttcatggcctacacagatgagaccttcaagacccgggaggccatccagcatgaaagtggcatcctgggccccctgctgtatggagaggtgggggacaccctgctgatcatcttcaagaaccaggccagccggccctacaacatctacccccacggcatcacagatgtgcggcccctgtacagccggcggctgcccaagggcgtgaagcacctgaaggacttccccatcctgcccggggagatcttcaagtacaagtggacagtgacagtggaggatggccccaccaagagtgacccccgctgcctgacccgctactacagcagctttgtgaacatggagcgggacctggccagcggcctgattggccccctgctgatctgctacaaggagagcgtggaccagaggggcaaccagatcatgtctgacaagagaaatgtcatcctcttctctgtgtttgatgagaacagatcctggtacctgacagagaacatccagcgcttcctgcccaacccagctggggtgcagctggaggaccctgagttccaggccagcaacatcatgcacagcatcaatggctacgtgtttgacagcctgcagctgtctgtgtgcctgcacgaggtggcctactggtacatcctgagcattggagcccagacagacttcctgtctgtgttcttcagcggctacaccttcaagcacaagatggtgtatgaggacaccctgaccctcttccccttctctggagagaccgtcttcatgtccatggagaaccctggcctgtggatcctgggctgccacaacagcgacttcaggaacagaggcatgacagccctgctgaaggtgagcagctgtgacaagaacacaggagactactatgaagattcctatgaggacatcagcgcctacctgctgagcaagaacaatgccatcgagcccaggagcttcagccagaacagccgccaccccagcacccggcagaagcagttcaatgccaccaccatcccagaaaatgacatcgagaagacagacccctggtttgcccacaggacccccatgcccaagatccagaatgtgagcagcagtgacctgctgatgctgctgcggcagagccccaccccccacggcctgagcctgagtgacctgcaggaggccaagtatgagaccttcagtgatgaccccagccctggggccatcgacagcaacaacagcctgtctgagatgacccacttccggccccagctgcaccacagcggggacatggtgttcaccccagagagcggcctgcagctgcggctgaatgagaagctgggcaccacagctgccacagagctgaagaagctggacttcaaggtgagcagcaccagcaacaacctgatcagcaccatccccagcgacaacctggccgccggcacagacaacaccagcagcctgggccccccatccatgcctgtgcactatgacagccagctggacaccaccctgtttgggaagaagagcagccccctgacagaaagtggcggccccctgagcctgtctgaggagaacaatgacagcaagctgctggagagcggcctgatgaacagccaggagagctcctggggcaagaatgtgagcagcacagagagcggccgcctcttcaagggcaagagggcccacggccctgccctgctgaccaaggacaatgccctcttcaaggtgtccatcagcctgctgaagaccaacaagaccagcaacaacagcgccaccaacaggaagacccacattgatggccccagcctgctgattgagaacagccccagcgtgtggcagaacatcctggagagtgacacagagttcaagaaggtgacccccctcatccatgacaggatgctgatggacaagaatgccacagccctgcggctgaaccacatgagcaacaagaccaccagcagcaagaacatggagatggtgcagcagaagaaggagggccccatccccccagatgcccagaacccagacatgtccttcttcaagatgctgttcctgcctgagagcgcccgctggatccagaggacccacggcaagaacagcctgaacagcggccagggccccagccccaagcagctggtgtccctgggccctgagaagtctgtggagggccagaacttcctgtctgagaagaacaaggtggtggtgggcaaaggagagttcaccaaggatgtgggcctgaaggagatggtgttccccagcagcaggaacctcttcctgaccaacctggacaacctgcacgagaacaacacccacaaccaggagaagaagatccaggaggagattgagaagaaggagaccctcatccaggagaatgtggtgctgccccagatccacacagtgacaggcaccaagaacttcatgaagaacctcttcctgctgagcacccggcagaatgtggagggcagctatgatggagcctatgcccctgtgctgcaggacttccgcagcctgaatgacagcaccaacagaaccaagaagcacacagcccacttcagcaagaagggggaggaggagaacctggagggcctgggcaaccagaccaagcagatcgtggagaagtatgcctgcaccacccgcatcagccccaacaccagccagcagaactttgtgacccagaggagcaagagggccctgaagcagttccggctgcccctggaggagacagagctggagaagaggatcatcgtggatgacaccagcacccagtggagcaagaacatgaagcacctgacccccagcaccctgacccagattgactacaatgagaaggagaagggggccatcacccagagccccctgagtgactgcctgaccaggagccacagcatcccccaggccaacagaagccccctgcccatcgccaaggtgagcagcttccccagcatccggcccatctacctgaccagggtgctcttccaggacaacagcagccacctgcctgctgccagctacaggaagaaggacagcggcgtgcaggagagcagccacttcctgcagggcgccaagaagaacaacctgagcctggccatcctgaccctggagatgaccggggaccagcgggaggtgggcagcctgggcaccagcgccaccaacagcgtgacctacaagaaggtggagaacacagtgctgcccaagccagacctgcccaagaccagcggcaaggtggagctgctgcccaaggtgcacatctaccagaaggacctcttccccacagagaccagcaatggcagccctggccacctggacctggtggagggcagcctgctgcagggcacagagggcgccatcaagtggaatgaggccaacagacctgggaaggtgcccttcctgcgggtggccacagagagcagcgccaagacccccagcaagctgctggaccccctggcctgggacaaccactacggcacccagatccccaaggaggagtggaagagccaggagaagagccctgagaagacagccttcaagaagaaggacaccatcctgagcctgaatgcctgtgagagcaaccacgccatcgccgccatcaatgaaggccagaacaagccagaaattgaggtgacctgggccaagcagggccgcacagagcggctgtgcagccagaacccccctgtgctgaagaggcaccagcgggagatcaccaggaccaccctgcagagcgaccaggaggagattgattatgatgacaccatctctgtggagatgaagaaggaggactttgacatctatgatgaagatgagaaccagagccccaggagcttccagaagaagaccaggcactacttcatcgctgctgtggagcggctgtgggactatggcatgagcagcagcccccacgtgctgaggaacagagcccagagcggctctgtgccccagttcaagaaggtggtgttccaggagttcacagatggcagcttcacccagcccctgtacagaggagagctgaatgagcacctgggcctgctgggcccctacatccgggcagaggtggaggacaacatcatggtgaccttcaggaaccaggccagccggccctacagcttctacagcagcctcatctcctatgaggaggaccagaggcagggcgctgagcccaggaagaactttgtgaagcccaatgagaccaagacctacttctggaaggtgcagcaccacatggcccccaccaaggatgaatttgactgcaaggcctgggcctacttcagtgatgtggacctggagaaggatgtgcacagcggcctgattggccccctgctggtgtgccacaccaacaccctgaacccagcccacggccggcaggtgacagtgcaggagtttgccctcttcttcaccatctttgatgagaccaagtcctggtacttcacagagaacatggagaggaactgccgggccccctgcaacatccagatggaggaccccaccttcaaggagaactaccgcttccacgccatcaatggctacatcatggacaccctgcccggcctggtgatggcccaggaccagaggatccgctggtacctgctgtccatgggcagcaatgaaaacatccacagcatccacttcagcggccacgtgttcaccgtgaggaagaaggaggagtacaagatggccctgtacaacctgtacccaggagtgtttgagaccgtggagatgctgcccagcaaggccggcatctggagggtggagtgcctgattggagagcacctgcatgctggcatgagcaccctcttcctggtgtacagcaacaagtgccagacccccctgggcatggccagcggccacatccgggacttccagatcacagccagcggccagtatggccagtgggcccccaagctggcccggctgcactacagcggcagcatcaatgcctggagcaccaaggagcccttctcctggatcaaggtggacctgctggcccccatgatcatccacggcatcaagacccagggcgcccggcagaagttcagcagcctgtacatcagccagttcatcatcatgtacagcctggatggcaagaagtggcagacctaccggggcaacagcacaggcaccctgatggtgttctttggaaatgtggacagcagcggcatcaagcacaacatcttcaacccccccatcatcgcccgctacatccggctgcaccccacccactacagcatccgcagcaccctgaggatggagctgatgggctgtgacctgaacagctgcagcatgcccctgggcatggagagcaaggccatcagtgatgcccagatcacagccagcagctacttcaccaacatgtttgccacctggagccccagcaaggcccggctgcacctgcagggccgcagcaatgcctggaggccccaggtgaacaaccccaaggagtggctgcaggtggacttccagaagaccatgaaggtgactggagtgaccacccagggcgtgaagagcctgctgacctccatgtatgtgaaggagttcctgatcagcagcagccaggacggccaccagtggaccctcttcttccagaatggcaaggtgaaggtgttccagggcaaccaggacagcttcacccctgtggtgaacagcctggacccccccctgctgacccgctacctgcgcatccacccccagagctgggtgcaccagatcgccctgaggatggaggtgctgggctgtgaggcccaggacctgtactag

SEQ ID NO: 2467 - DNA, 7056 bp, Artificial Sequence
  derived and/or modified sequence
atgcagatcgagctgagcacctgcttcttcctgtgcctgctgcggttttgttttagcgccacaaggaggtactacctgggcgctgttgagctttcatgggattacatgcagagcgatctcggcgagctgcccgtggatgcacgcttcccacctcgggtaccaaaatctttcccattcaatactagcgtagtgtataagaagactctctttgttgagtttactgatcatctgtttaatatcgccaagccacggcctccctggatggggctcctgggacccactatccaggcagaagtttatgatacagtcgtcatcactttgaagaatatggcatcccatccagtgagcctgcatgccgtgggcgtgtcgtattggaaggcctctgaaggcgcagagtatgacgatcagacttcgcagcgtgagaaggaggatgataaagtcttcccaggaggtagccatacctatgtttggcaagtgcttaaggaaaacggccccatggccagcgaccccttgtgcctgacttacagttacttgagccacgtggacctggttaaagatctgaacagcgggctgatcggggccctcttggtctgtcgggagggcagcctggctaaggaaaaaactcagacactgcataaattcatccttctattcgccgtgttcgatgagggaaagtcatggcacagcgaaacgaagaatagtctcatgcaggatcgtgatgccgcctctgcccgcgcttggccaaagatgcataccgtgaacggatacgttaaccgcagcctgcccggactgatcgggtgccacaggaagtcagtgtactggcacgtgatagggatgggcacaacacccgaagtccacagtatattcctcgaaggccatactttcctggtacggaaccaccggcaagcatctctggagatcagccccataacgttcctcaccgcacaaacgcttctgatggacctgggacagttccttctgttctgtcacatttctagccatcagcatgatggaatggaagcatacgtgaaggtcgactcctgtcccgaagagccccagctccgaatgaaaaataatgaagaggccgaggactacgatgacgacttgacggactctgaaatggatgtggttcggtttgacgacgacaacagtccatccttcattcagatccggtctgtggctaagaaacaccccaagacatgggtgcactatatcgccgccgaggaggaggattgggattacgcccctctggttctggctcctgacgatcgatcctacaaatcccagtacctgaacaacggcccccagcgcattggcagaaagtacaaaaaggttcgattcatggcatacacggatgagacattcaagactagagaagccattcagcacgaatccggaatcctgggaccattgttgtacggagaggtgggtgatactctgttgatcatttttaaaaatcaagccagtcgtccttacaacatttatccccatggcataaccgacgttaggcccctgtactcaaggcgcctccccaagggggtgaaacacctgaaggacttccccattcttcccggcgaaatattcaagtacaagtggacagtgaccgtggaagatggcccgacaaaaagcgacccgcggtgcctgacccgatattattcttctttcgtgaacatggagcgcgatttagccagtggcctcattggccctttactgatttgttataaagaatctgtggatcagaggggaaaccagatcatgagcgacaagcgaaatgtgatcctgttctccgttttcgatgagaataggagttggtacctgacagagaacattcaacgtttcctgccgaatcccgccggcgtgcagctcgaggatcccgaattccaagctagcaatattatgcacagcatcaatggctatgtgtttgactccctccagctctccgtatgtctgcacgaggtggcatactggtacattctgagtatcggtgctcagacagacttcctgtctgtctttttttcaggctatacttttaagcacaaaatggtgtatgaagacactttgacactcttcccctttagcggagaaaccgtgttcatgtcaatggagaaccctgggctgtggatcctgggttgtcataactcagactttaggaatcgtggaatgaccgcgcttctcaaggtgagctcctgcgataaaaatacgggcgattactacgaggattcatacgaagatattagcgcctacctgctgagtaagaacaacgccatcgagcctcgcagctttagccagaacagccggcatccctcaactaggcagaagcagttcaatgcgaccaccatcccagaaaacgatatcgaaaaaactgacccctggtttgcccatagaacacccatgcccaaaatccagaatgtcagctctagcgacctgctgatgctgctccgacagtcccccacccctcacggtctctcgctgtcagatctgcaagaggccaaatacgaaacattttctgatgatcctagccccggcgccattgattctaacaattccctctccgagatgacacacttcaggccccagctgcaccattccggtgatatggttttcacacctgaaagcggactccagttacggctgaatgaaaaactgggaaccacggctgccacagaacttaagaaattggacttcaaggtttcttccacgtcgaacaacttaatttccaccatcccctcagacaacctcgcggccggcacagacaacacaagctctctgggccctccctcaatgcccgtccattacgacagccagttggacaccacactcttcggaaaaaaaagttcgcctctcacagagagcggcgggcccctgagtctgagcgaggaaaacaatgattctaaactgcttgagtcaggcttgatgaattctcaagaatcaagttgggggaaaaacgttagctctactgagagtggacgactgttcaaagggaagagggctcacggacccgccctgttaacaaaagataatgccctgttcaaagtgtccattagcctgctcaagaccaacaaaacctcaaataactctgcgaccaacaggaaaactcacattgacggcccatcgctgctcatcgaaaattctccatctgtatggcagaatatacttgagagcgacactgaattcaaaaaggttacaccacttatccacgaccgcatgctgatggataagaatgccactgctttgcggctgaatcacatgagtaataagaccactagctctaagaatatggaaatggtacaacagaaaaaggaaggtccaattcctccggatgcacagaaccctgatatgagttttttcaagatgctgttcctccccgaaagcgccagatggatccagaggacacacgggaagaattcgctaaactctggccagggacctagtcccaagcagctggttagccttgggcctgaaaagtcggtggaaggccagaattttttgtcggagaagaataaagttgtggtaggaaaaggcgaatttaccaaagacgtgggcttgaaggagatggtttttcccagctctcgaaacctgtttctcaccaatttagacaacctccacgaaaacaacacccacaaccaggagaagaaaatacaagaagagattgagaagaaagaaacgctcatccaggagaacgtagtcctgccccagatacacactgtgacggggacaaagaatttcatgaaaaaccttttcttgcttagcacccggcagaatgttgaaggcagctacgatggagcatatgcccccgtcctgcaggattttcggagtctcaacgacagcaccaacagaactaaaaaacacaccgcacatttctctaagaaaggggaagaggaaaacctcgaggggcttggaaaccaaactaagcagattgtggaaaagtatgcatgtaccacaagaatatctccaaatacctctcagcagaacttcgtaactcagaggtctaagcgcgccctgaaacagtttcgcttaccactcgaagagaccgagctcgagaagcgcattatcgtggacgatacctccacccagtggagcaaaaatatgaagcacctgactccgtcaaccctgacacagattgactacaatgaaaaggagaaaggggctataacccagagtcctctctccgattgtctcactaggtcacacagtatccctcaggctaacagatcaccactgcctatcgcaaaagtgagctcttttccctcaatcaggcctatttatctcacccgagtgttgtttcaggacaatagtagtcatctgcctgcggcctcgtatcgcaagaaggacagcggagttcaagagtcctctcattttctacagggtgccaaaaagaacaacctttcactggccatcctcacactcgagatgaccggagatcagcgtgaagtgggcagcctcggcacctctgccacaaatagcgtgacatacaagaaggtcgaaaacacagtcctaccaaaaccggatctgcccaagacctctggtaaggtagagctgcttcctaaggtacacatataccaaaaggacctgtttcctaccgaaacttccaatggatcccccgggcatctggacctggtggagggttccctgctccaagggacggaaggggccatcaaatggaacgaagccaatcgcccggggaaagttccttttctgagagtcgcgactgagtcctcagctaagactccttcaaagctcctggatcccttggcctgggacaaccattacggaactcagattccaaaagaagagtggaagagtcaggaaaagtctccggaaaagacagcttttaagaagaaagacacaattctgtctctcaatgcctgtgagtccaaccacgccatcgcagccattaacgagggccagaataaacccgagattgaggttacctgggccaagcaggggcgcaccgagagactgtgcagtcagaatccaccagtcctgaaacgtcaccagagagagatcacccggactactctccagagtgaccaggaagaaatcgactacgacgatacaatcagcgtggaaatgaaaaaagaagacttcgacatatatgacgaagatgagaaccagagcccgcgctctttccagaagaaaactagacattattttattgcagctgtagagcgcctatgggattatggcatgtcttcctctccgcatgttctcaggaatcgagcccagagcggcagtgtacctcagttcaagaaggttgtttttcaggagttcaccgatggttcctttacacagcctctgtaccggggcgagcttaatgagcacttaggattgctgggaccttatatccgggcagaggtggaagataacattatggtcactttcaggaaccaggcatctcggccatacagtttctacagcagtctaatctcctacgaggaagatcagcggcagggagccgaaccaaggaagaatttcgtgaagcccaatgaaacaaagacctatttctggaaagtgcagcatcacatggccccgacaaaggatgagtttgattgcaaggcatgggcgtacttttccgacgtggatctggagaaagatgtgcactctgggcttataggcccactgctggtctgccacacaaacacattgaatccggcccacggtagacaggttactgttcaggagttcgccctgttcttcaccattttcgacgaaacaaaaagctggtacttcactgagaatatggagagaaattgccgcgcaccttgtaacattcagatggaggaccccaccttcaaggaaaattaccgctttcacgcaatcaatggctatatcatggataccctcccaggccttgtaatggcacaggatcagcgtatcaggtggtatctgctgtccatgggaagtaacgagaacattcactctattcacttctccggacacgtgttcaccgtcaggaagaaagaagagtataaaatggccctgtataatctatatcccggtgtgtttgagaccgtcgagatgctgccctcaaaggcaggaatttggagagttgaatgcctcattggcgaacatctacacgctggcatgagcacactgttcctcgtgtactccaataaatgccagacaccgttgggtatggcctcaggtcatattcgggactttcagataactgcttcaggccagtatggacagtgggctccgaagctggcacgcctgcattactctggcagtataaatgcatggtcaacaaaagagccctttagttggatcaaggtcgacctgctagctcccatgatcatccatggcatcaagacacagggtgctcggcagaaattctcttcgctttacatatcacagttcatcattatgtacagtcttgatggcaaaaaatggcagacttacagaggcaacagtactggtacactgatggtgtttttcgggaacgtcgattcatctgggatcaaacataacatcttcaatccccctatcatagctcggtacattcggttgcatcctacccactattcgattcgaagcactctaagaatggaactgatggggtgtgacctcaatagctgctcaatgcccctgggcatggagtccaaggccatttccgacgctcagataacggcgtcctcctacttcactaatatgttcgctacctggtctccaagcaaggcccgactgcatctacaaggacgctctaacgcctggcggccgcaggtgaataaccccaaggagtggctccaggtcgacttccaaaaaaccatgaaggttactggggtgactacgcagggggtcaaaagcctgcttactagtatgtacgttaaggagttcctgatttcttcgagtcaggatggacaccaatggactctgttctttcagaacgggaaagtgaaggtttttcaggggaatcaggactcctttactcccgtcgtgaattccttagacccgcccttgctcacaaggtacttaaggattcacccacagtcatgggtacaccagatcgccctgcggatggaagtcctgggctgtgaggctcaggacctgtattag

SEQ ID NO: 2468 - DNA, 7056 bp, Artificial Sequence
  derived and/or modified sequence
atgcagattgaactgtccacatgcttctttctctgtctattacgattttgcttttccgccaccaggagatactaccttggtgctgtcgaactgagctgggattacatgcagtcagacctgggggagttgcctgtggacgccaggtttccccctagagtcccaaaaagcttcccatttaacacttcagtcgtgtacaagaagacgctctttgtggaatttaccgatcatctgttcaacattgccaagcccagacctccgtggatgggcctgctggggccaacaattcaggccgaagtatatgatactgtagtgataaccctcaagaatatggcaagtcatccggtgtccttacatgctgtgggggtttcctattggaaggcttcagagggggctgagtacgacgaccaaacctcccagcgggaaaaggaggacgacaaagtatttccgggaggatcccacacctacgtatggcaggtcctgaaggagaacggtcctatggctagtgaccctttatgcttaacatactcgtatttaagccatgtggacctcgtgaaggacctgaatagcggccttatcggagccctgctggtgtgccgagagggatcactggctaaagagaaaacacagaccctccacaagtttatcctactgtttgcagtcttcgacgaagggaagagctggcattccgaaaccaagaattcactgatgcaggaccgggacgcagcatctgcaagggcttggcctaaaatgcacactgtcaatgggtatgtcaatcgttctttaccgggactgatagggtgccaccgcaagtctgtgtattggcacgtaattggaatgggcactactccagaggtccattccatctttttggaaggccacacctttctggtccgcaaccataggcaggcttcacttgagatatcccctatcaccttcttgaccgcacagactctcctcatggacctgggacagttcttgctgttttgtcatatctcttctcaccagcacgatggaatggaagcctatgtcaaggtggactcttgccccgaggaaccacaactgagaatgaagaataatgaggaagcagaagactatgacgacgacctcaccgattccgagatggacgttgtgcgctttgacgatgataactcaccttcctttatacagattaggtcggtggccaaaaagcacccgaaaacttgggtccattacattgcagccgaagaagaggactgggattacgcacccctcgttctggctcccgacgatcgcagctacaaatctcagtacctgaacaatggaccgcagcgcataggccgaaagtacaagaaagtccgattcatggcctacactgacgagacctttaaaacacgcgaggccattcaacacgagagcggaatcttagggccactgctgtatggtgaggtgggcgataccctgctcataatttttaagaaccaagcatctcgaccgtacaacatttatcctcatggcataaccgacgtcaggccactctattctcgaagactgccgaaaggcgtgaagcacctgaaggactttcccatccttcctggggagatctttaagtacaagtggacggtgacagtagaggatgggcctacgaagtccgatcctagatgtctgacaagatattacagcagttttgtaaatatggagcgtgacctggcgtccggccttattgggcctctcctgatttgctacaaggagtcagttgatcagagaggtaaccagatcatgtctgacaagcgcaacgtaatcctgttttctgtgttcgatgagaacagaagctggtatctgacagagaacattcagcggttcctgcctaatcctgcaggagtgcagttagaggaccctgagtttcaggctagcaacattatgcactctattaacggttacgtgtttgactccttgcaattatccgtctgcctgcacgaagtggcatattggtacattctttctattggggctcagacagacttcttgtctgttttcttctctggatataccttcaagcacaagatggtgtacgaagataccctcactctcttccccttttctggggaaaccgtctttatgagtatggaaaaccctggactgtggatcctgggatgtcataactccgacttcaggaatagaggaatgactgccctgctaaaggtgtccagttgtgacaagaacacaggagattactacgaggactcttatgaggacatcagcgcctacctcctgagtaagaacaacgccatcgagccgcgatcattcagccagaatagccgacacccatccacccgacagaagcagtttaatgccacaaccattccagaaaacgacatcgaaaagactgatccttggttcgcgcacaggacacccatgcccaaaattcagaacgtgtcaagctctgacctcctgatgttgctccgccagtcccccaccccacacggactgagcctgtctgacttgcaagaggccaagtatgagacgttctcggatgatcctagccctggggcaatcgattcgaacaactctttaagcgagatgacgcattttaggccacaattgcatcacagcggtgacatggtattcacacccgagtccggactgcaacttcgacttaatgagaagttggggacaactgcggcaaccgaactcaagaagctagacttcaaggtctcctccacctccaataacctgataagtaccattccgagtgataatcttgctgccggtacagacaacacttcctccctcggccctcctagcatgcctgttcactatgattcgcagctggacaccacgctgttcggcaagaagtcttcccctttgacggaaagtggtggtcctcttagcctgtcagaagagaataatgattccaagctgctcgagtctggactcatgaattcccaggaaagcagttggggcaaaaatgtgagctcaacagagtctggtagactgttcaaaggcaaaagggcccacggtcctgccctattgaccaaagacaacgccctttttaaagtgagcataagtctcctcaagaccaacaagacaagcaataacagtgccacgaatcggaagacccacatcgatggcccttccctgcttatcgagaacagtccatcagtatggcagaacatcctggagtctgacacagagtttaaaaaggtcactccgctaattcacgatcgtatgctgatggataaaaacgctactgccttgcggctaaaccatatgagcaacaagacgacgtcatctaagaacatggaaatggttcagcaaaaaaaggaagggcctatcccccctgatgcacagaatccagacatgtcctttttcaagatgttgttccttccagagtccgccagatggatccagcggacacacggcaaaaattccctgaatagtggccagggacccagccctaaacagctggtcagtctggggcctgaaaagtccgtggaaggacaaaactttctcagtgagaaaaataaggtggttgtgggcaaaggtgagttcaccaaggacgtcggcctgaaagagatggtgtttcctagttctcggaatctgtttctgacgaatctggataatctgcatgaaaacaacacccacaatcaggagaagaagatccaggaagaaattgagaaaaaggagaccctcattcaggagaacgtggtgcttcctcagattcacacagtcactggaacgaaaaacttcatgaaaaacttattccttctttccacgaggcagaatgttgaaggctcttatgatggggcttatgcccctgtactccaggacttccgctccctgaatgattcgacgaacagaaccaaaaaacacactgcccacttctccaaaaagggtgaggaagagaacctggaaggattgggaaatcagaccaagcaaatcgtggaaaagtacgcttgtaccacacggatctcaccaaacacctctcagcagaattttgtgacccagaggagcaagcgtgcattgaaacagttccgactccctctggaagagactgagcttgaaaaacggattatcgttgatgatacatcgacccaatggtcaaaaaacatgaagcacctcacaccttccactcttacacagatcgactacaacgagaaggaaaagggcgcaataacccaatcccctctgagtgattgcctgacacgcagtcattcaattccacaagccaaccgaagccctttgccaatcgccaaggtgagttccttcccttccatcaggcctatctatttgactagagtcctctttcaggacaactctagccatctgccagctgcttcatataggaagaaggactctggggtacaggaatctagccacttcctgcagggtgctaagaagaataacctgtctttggctattctaaccctggaaatgaccggagatcagcgggaggtaggaagccttggcacttctgctaccaattctgtgacctataagaaggtggagaatacagttctcccaaaacccgacttgcctaaaacttccggtaaggtggagttactgccaaaagtccatatctaccagaaggatctgtttcccaccgagactagcaatggatctcccggtcatttagatttggtagaaggcagcctactacagggaaccgagggagccattaagtggaacgaagccaataggcccggaaaagtgcccttcttaagagtggctactgagtcatccgctaagacgccctctaagctcctcgatccacttgcttgggacaaccactatggtacacagatccccaaagaagaatggaagtcccaagagaagtccccggagaagactgccttcaaaaagaaggataccatcctttcattgaatgcctgtgagagcaatcatgccatagcagccatcaacgaaggacaaaacaagcctgagatcgaagtaacatgggctaagcagggtcggacagaacgcctttgctcccagaacccgccagtgttgaaacggcaccaaagagaaatcacacgcactaccctgcagtccgaccaggaagagatcgattacgacgacacaatcagcgtcgaaatgaaaaaagaagatttcgatatatatgacgaggacgaaaaccagagccctagaagcttccaaaagaaaacccggcactactttatcgccgcagttgagcgcctgtgggattatggaatgagctcaagtccacatgtactgaggaatcgcgctcaatccggttcagtcccacagtttaagaaggttgtgttccaggagtttacggatggatcttttacgcagccgctctacagaggagaactgaacgagcacctgggcctcctgggaccctatattcgcgctgaggtcgaagataacataatggtaacatttcgaaatcaagcaagcaggccatactctttttactcgagcctgatctcatacgaagaagatcagcgtcaaggtgctgaaccccgtaaaaacttcgtaaagcctaacgagacgaagacttacttttggaaggtgcagcaccacatggcccctacgaaggacgaatttgattgcaaggcctgggcctatttctctgatgtcgatcttgagaaggacgttcattctggtttgattggccctttgctcgtgtgtcatacgaacaccctgaatcccgcacatggcaggcaagtcactgttcaagagtttgcgcttttcttcacgatatttgatgagaccaaaagttggtattttaccgagaatatggagcggaactgccgtgccccatgtaacatccaaatggaagaccccacgtttaaggagaactaccgtttccatgctataaatggctacataatggatacactccccggacttgtgatggctcaggaccagagaatcagatggtacctgctctccatggggtctaacgaaaacatacactctatccactttagcggacatgttttcacagtccggaagaaagaggaatacaaaatggctctttacaacttgtatccaggtgtttttgaaaccgtggaaatgctgcctagcaaggccggtatatggcgagtcgaatgccttattggcgagcaccttcatgctggcatgtcgacactgttcttggtgtacagcaacaaatgtcagacacccctgggtatggcgagtggtcatatcagagacttccagattaccgcatctgggcagtacgggcagtgggcccctaaattggctcggctacattactcagggtctattaacgcctggtcgacaaaagaacctttttcctggattaaagtcgacctccttgcacccatgattatccacgggatcaaaacccagggtgcaagacagaagttctcatcactgtacatcagccagtttattatcatgtattccttggacggaaaaaagtggcaaacctaccgtggcaatagcacaggaaccctaatggttttctttggcaacgttgacagtagcggtatcaaacacaatatttttaatccgccaatcatcgcccgatacattaggctccacccaactcactattccatcagatccacgttgcgaatggagctgatgggttgtgaccttaactcttgttctatgccactgggtatggagtcaaaggccataagcgacgcccaaataacagcatcttcatatttcaccaatatgtttgccacatggagtccctccaaagcccgtctccacctgcagggaaggtcgaacgcatggcgacctcaggtgaacaatccaaaggagtggctccaggtggacttccaaaagaccatgaaggttaccggagtcaccacccagggggtgaagtctctcttgacttctatgtacgttaaggagtttttgatttcctcatcacaggacgggcatcagtggacccttttcttccagaacggtaaagtgaaagtgttccagggaaatcaagattcctttacacccgttgtgaattcccttgacccccctctcttgacacgatacctcaggattcacccccagagttgggtgcatcagatcgcactccgaatggaggtgcttggttgtgaggcccaggacttgtattac

SEQ ID NO: 2469 - DNA, 7056 bp, Artificial Sequence
  derived and/or modified sequence
atgcagatcgaactatctacatgcttcttcctctgcctgctgcgcttttgtttctcggctacaagacggtactatctgggtgcggttgagttgagctgggattatatgcagtctgaccttggagagctccccgtggatgcacggttcccgccccgcgtacctaaatcctttccattcaatacatccgtcgtttacaaaaaaacgctcttcgttgagttcactgaccatctgttcaatatcgcaaagccaaggcctccgtggatgggcctcttaggaccaaccattcaagccgaagtgtatgacacagtcgtgatcaccttgaaaaatatggccagtcatcctgtcagcctgcatgccgtgggcgtctcttattggaaggcgtcagaaggagctgaatacgatgatcagacgtcccaaagggagaaagaagatgataaagtctttcctggaggttctcatacctacgtgtggcaggtcctcaaagaaaatggcccgatggcctctgaccccttatgcctgacctactcttatctctcgcacgtggacctggtcaaagatctaaactctggccttatcggtgctctgctcgtttgtcgtgaaggctcgctggccaaggaaaagacccagacccttcataaatttatcttgctgtttgccgtgttcgacgagggcaagtcttggcactcagagactaaaaattcgctcatgcaggacagggacgctgctagcgccagggcttggcccaaaatgcacacagtgaacggatacgtgaatcgctcattgccaggactaattggttgccaccgtaaaagcgtatattggcacgttattggtatgggcacaacacccgaggtccacagcatttttctcgagggacatacctttctcgtccgaaaccacagacaggcatccctggagataagcccaattacttttctcaccgcccagacactgctcatggacttgggacagtttttgctcttctgccacatcagttcccaccagcatgatgggatggaggcctacgtcaaagtagactcttgtccggaggaaccacagctgcggatgaagaacaatgaggaagcggaagattatgatgacgacctgaccgacagcgaaatggacgtcgtccgcttcgacgatgataactccccaagctttattcagattagatcagttgcgaagaaacatccaaaaacctgggtccattacatcgccgctgaggaagaggattgggactatgctcccttagtgctggcacctgacgaccggagctacaaatcacagtatttgaataatggaccacagaggatcggccgaaagtacaaaaaggtgagatttatggcatataccgatgagacgttcaagacaagggaagctatccagcatgaatcggggatcttggggcccctgttatacggggaggtgggcgacactctactgatcatctttaaaaaccaggcctcaaggccatacaatatctacccacatggcatcactgacgtccgacccctttattcccggcggttaccaaagggagtaaagcacttgaaagactttccaatcctgccgggtgagattttcaagtacaaatggaccgtcaccgtagaggatggccccacgaagagtgacccacgatgtttgaccaggtattactcatcttttgtcaatatggagcgggaccttgcatctgggcttataggacccctgttaatctgttacaaggaatccgtggaccagcgaggtaaccagatcatgtcagacaagcgcaatgtcatattattcagtgtctttgatgaaaataggagctggtatctcactgagaacattcagaggtttctacctaatccggcgggggtgcagctggaggacccagagttccaggctagtaacatcatgcacagtatcaacggatatgtgtttgatagtctgcaactgtcagtttgtctccatgaagtagcctactggtacatcctgtcaattggtgcgcagaccgatttcctttcagtcttttttagcgggtacacgtttaagcataaaatggtgtatgaggacaccctaaccctgttccccttttcgggcgaaacggtcttcatgtcaatggaaaatcctggactgtggatccttggttgtcataactcggattttaggaatagggggatgacggcactgctgaaggttagctcctgcgataagaatacgggagattactacgaggattcgtacgaggacatcagtgcttatctgttgagtaagaacaatgccatcgaaccaagatctttcagccaaaacagccggcacccaagcacacgccagaagcaattcaacgccaccaccattcccgagaacgacatcgaaaaaaccgatccctggtttgcccacagaactcccatgcctaaaattcagaatgttagcagctcagacttactgatgctcctgagacagtctcccacgccgcacggtctttccctgtcagacctgcaggaagctaaatacgagaccttttctgatgatccctcccccggtgcaatcgactctaataatagcctgagtgagatgacccattttcgcccgcaactgcatcactcaggcgacatggttttcacacccgaaagcggactgcagctcagactcaacgagaaactcggcaccaccgcagcaacggaactgaaaaaactggactttaaagtcagtagcacgtccaataatctgatcagtacgataccctccgataatcttgcggcaggcaccgataatacatccagtctaggccccccgtccatgcccgtccactacgacagccagctggacactaccttgttcggcaagaagagtagcccacttaccgaatcgggggggcctcttagtttatccgaggaaaataatgactctaaactcctagagtctggcttaatgaacagccaagaaagtagttgggggaaaaatgtaagtagcacagagtctggccgcctgtttaaaggaaaacgggctcacggccctgcccttcttacaaaagacaatgctctttttaaggtgtcgatcagcttgctgaagaccaataagactagcaacaacagcgcaaccaaccggaaaactcacatcgacggccccagtctgttaattgagaacagtccctctgtttggcagaatatactggaatccgataccgaatttaaaaaagtaacacctctcattcacgaccgaatgttgatggacaagaatgccactgctctgcggcttaaccacatgagtaacaagacaaccagcagtaagaacatggaaatggtgcagcagaaaaaggaaggccctattccaccagatgcccagaatcctgatatgtctttttttaaaatgctgtttctgcccgaatcggcacggtggatccagcggactcacggaaagaacagtcttaactctggacaaggaccaagcccaaaacagttagtctccctgggccctgagaagtcagtcgaaggccaaaacttcttatctgaaaagaacaaagtcgtggtgggtaaaggagaattcaccaaggacgttggattgaaagaaatggttttcccctcctctcgcaacctcttcctcaccaacctcgacaacctgcacgagaacaatacgcacaaccaagagaaaaaaattcaagaggagatcgagaaaaaagagaccctgattcaggagaacgtcgtgctcccccagatacataccgtaactgggacaaaaaatttcatgaagaacttatttctactgagcacacggcagaatgtcgaaggtagctacgatggcgcctatgctcccgttttacaggatttccggtcgctgaatgactcgaccaatagaaccaagaaacacaccgcccatttttctaaaaaaggggaggaggaaaatctggagggacttggcaaccagactaaacagatcgtggaaaaatacgcctgtaccacccggatatctccaaatacctcccagcagaattttgtgacccagaggtccaaaagagccctcaagcaattcagactcccgctcgaagaaacggaactggagaagcggatcattgtcgacgatacttctactcagtggagcaaaaacatgaagcacctgactcctagcactctgacccagatagattataatgagaaggagaaaggcgcgatcacccaatctcctcttagcgactgcctcacccgctctcactcaatccctcaggccaacaggagtcccctgcccattgccaaggtaagtagctttccaagcattcggcccatctatctgactcgcgtgctatttcaggataattcctctcacctgcccgcagcctcctacaggaaaaaagactcaggagtgcaagagtccagccacttcctgcagggcgccaagaaaaataacctgtcactggccatcctcaccctcgaaatgactggtgaccaaagagaggtcggttccctcggtacatccgccaccaactctgttacatacaagaaggttgaaaatactgtgctccccaaaccggatctgcctaaaacttcaggcaaagtggaactgttgccaaaggtgcacatttaccagaaagacctgtttcctactgagacaagcaatggcagcccgggccacctcgacctcgtagaagggagtttgcttcaggggactgagggtgccatcaagtggaacgaggcaaacaggcctgggaaagtccctttcctgcgggtcgccaccgaatcctcagcaaaaactccgtccaaactcctcgatccactagcatgggacaaccactacgggacacagataccaaaggaagagtggaagagtcaggaaaagagccctgaaaaaactgcgttcaagaagaaggatacgattctgagtctgaacgcctgcgagtctaaccatgctattgcagccatcaacgaggggcaaaacaagccagaaattgaggtgacgtgggcaaaacagggccgtacagagaggctgtgttcccagaatcctcccgttttaaagagacatcagcgcgaaattacccggacaaccttgcagtccgaccaggaagaaatcgattacgacgatacaattagcgtagagatgaagaaggaggacttcgatatttacgatgaggacgaaaaccaaagtcctaggagcttccagaaaaagaccaggcattattttattgccgctgtagaaagactttgggactatggcatgagcagcagtccacacgttctgcggaatcgggcacagtcaggttccgtgcctcaatttaaaaaagtcgtgttccaggagttcaccgacggatcttttacccagcccctctaccggggggaacttaatgagcatctcggtttattaggcccatatatccgggcggaggttgaggacaacattatggtcacattcaggaaccaggcgtcaagaccatattctttttatagcagtctgataagttatgaagaagaccaacgtcagggggcggaaccacggaaaaatttcgttaaaccaaatgagaccaagacatacttttggaaggtgcagcaccacatggcccctaccaaagatgagttcgattgcaaggcctgggcttatttttccgatgttgatctggagaaagacgttcattctgggttaatcggtccactgctagtgtgccacacaaacaccctaaaccctgctcatggccggcaagtcaccgtgcaggagttcgccctattctttaccatttttgatgagactaagtcctggtattttaccgaaaatatggagcgtaactgtagagccccatgcaacatccaaatggaggatccaactttcaaagagaattataggttccatgctatcaacggctatatcatggacacgctgccaggcctcgtgatggcccaggaccaaaggatcagatggtacttgctgtcaatgggctcgaacgaaaacatccacagcatacacttttctggccacgtctttactgtgaggaaaaaggaggagtataaaatggccttgtataatctgtaccccggcgtgtttgaaacagtggagatgctccccagcaaggcagggatctggcgggtcgagtgtctcataggcgagcatctgcacgctggcatgtccacgctgtttctggtgtactcaaacaagtgtcagacgccactcgggatggcctcagggcacattagggatttccagatcactgcatcaggccagtacggccagtgggcccccaagttggctcggttacactatagcggttcaatcaacgcttggagcacaaaagagccattctcttggataaaggtggacctgttggcccccatgatcatccacgggattaagacccaaggggcacgccagaagttctcttccctctatatcagtcagtttatcatcatgtacagcctcgacggcaagaagtggcagacatatcgaggcaattcaacgggtacactcatggtgtttttcggtaacgtcgactcaagcggaatcaagcataatatttttaacccacccatcatcgcccgctacatccgcttgcacccgacccactactccatccgatccacactccgcatggaacttatgggctgtgacctgaattcttgtagtatgccccttggcatggagtccaaagcaattagcgacgctcagataaccgccagctcttattttacaaacatgttcgccacatggagcccgtccaaggctaggctccaccttcagggtagatccaacgcatggagaccgcaggtcaacaacccaaaagagtggctccaggtggacttccaaaagacgatgaaagtgactggtgttactacgcagggggtcaaatcgctactgacatctatgtatgtcaaagaatttctgatctcttcatctcaagatggacaccagtggaccttattttttcagaatggcaaagtaaaagtgttccagggcaatcaggacagctttacgccggtcgttaactcattggatccaccgctccttaccaggtatctcaggattcacccacagtcttgggttcaccagatcgcgttgagaatggaagtgttgggttgcgaggctcaggatctttattag

SEQ ID NO: 2470 - DNA, 7056 bp, Artificial Sequence
  derived and/or modified sequence
atgcagattgaactctcgacttgcttttttctctgtctgttaagattctgttttagcgccacaaggcggtattatctgggagccgttgaactatcatgggactacatgcagtcagacctgggtgagcttccagtcgacgcccgatttccacctcgagttccaaaaagcttcccctttaacactagcgtagtctataagaaaacattgttcgttgaatttaccgatcatctgtttaatatcgctaagcccagacctccctggatgggactgttaggacccacaatacaagccgaggtctatgacaccgtcgtcattacattaaagaacatggcttcacaccccgtctcacttcacgccgtgggggtcagttattggaaggcgtctgagggagccgaatatgacgatcaaaccagccagagagagaaggaggatgataaagttttcccagggggctcacacacatacgtatggcaagtgcttaaggaaaatggaccaatggcctccgacccactgtgcctgacttactcatatctcagtcatgtcgacctcgtcaaagaccttaactcaggactaatcggagctcttctggtgtgcagagaaggaagcctcgctaaagagaaaacacaaacattacacaaatttattctgttgtttgccgttttcgacgaggggaagtcatggcactcagaaacgaaaaacagtctgatgcaggatagagacgccgcttccgctcgcgcatggccaaagatgcacacggtgaatggctacgttaaccgctctctcccaggtctcattggctgtcatagaaaatccgtctattggcacgtaattggaatgggtactaccccagaggtccatagcatcttcttagaaggtcacactttccttgtgcgtaaccacagacaagcctcactggaaattagccccataacattcctgactgcccaaacacttcttatggaccttggccaattcttactcttttgccatattagctcacaccaacacgatggaatggaggcctatgtgaaagtggattcatgcccagaggaacctcagttaagaatgaagaataatgaagaggccgaggattatgatgacgacttaaccgattcagaaatggatgtcgtgaggttcgacgacgataatagcccaagcttcattcagattaggtcagttgctaagaagcatcccaaaacttgggttcattacatcgctgctgaagaagaagactgggactatgccccactggtcctggcccccgacgacagaagctataagtcccagtacctaaacaacgggcctcaaagaatcggtagaaaatataaaaaggttaggtttatggcatacacagacgagacattcaaaaccagggaagcaatacaacatgagagcggaatattaggcccactgctttacggagaggtcggagacacactcctgataatcttcaagaaccaggcttctagaccctataatatttacccccacggcatcactgatgttcgccctttatactcccggagactccccaagggtgtgaaacatcttaaggacttccctattttgcctggagaaattttcaagtataagtggaccgtgaccgtggaggatgggccaaccaaaagtgacccccggtgcttgactcggtactactctagtttcgtaaacatggaaagagatctagccagcggtcttatagggcctctcctgatctgttataaggaatccgttgaccagaggggcaatcagattatgtccgataagcgcaacgttatacttttctctgtgtttgacgagaacagaagctggtatctaaccgagaatatccagagatttttacctaacccagccggagttcagctggaggatccagagttccaagctagtaacattatgcactctatcaatggatacgtcttcgattcccttcagctgtcagtttgtcttcacgaggttgcctactggtacatcctgtccattggagcccaaaccgatttcctatccgtgttttttagtggctacacgttcaaacataaaatggtttatgaagacactctcacactttttccatttagcggggaaaccgttttcatgtctatggaaaaccccggcctatggattctgggatgtcacaatagcgattttcggaaccgcggcatgacagccctcctcaaagtctcttcatgcgataagaacaccggcgactattacgaggacagctatgaagatatttccgcctatctgctatcaaaaaacaatgccatcgaaccacgatcattcagccagaactcgagacacccgtcaactcggcagaaacagttcaacgctaccacgattccagagaacgatatcgagaagactgatccctggtttgcccaccgaacaccaatgcccaagattcaaaatgtgtcctctagcgatctgctgatgttattgagacagagcccaacccctcatggactgagcctgtctgaccttcaggaagccaagtacgaaactttcagcgacgatccttctccaggagcaattgattccaacaatagtctgagcgaaatgacgcactttcgaccgcaattacaccactccggagatatggttttcactcctgagtccggtctgcagttaagacttaacgaaaaactcggcactactgctgccacagagttgaagaagctggattttaaggtgtcttctaccagtaataaccttatcagtactatcccctcagacaacttggccgccgggacagacaacacctcaagcctagggccaccctcaatgccggtccattacgatagccagttggacaccaccctgttcgggaaaaagtccagtcccctcacagaatccggaggaccacttagcttgtcagaagagaataatgattctaaactgctggagagtgggctgatgaattcccaagaatcaagctggggaaagaacgtctcctccactgaatctggtcgtttattcaagggtaagagagctcacggacctgctctgctgacaaaggacaatgcgttattcaaggtctctatttcactcctcaaaaccaataagacatccaataactctgccacgaacagaaagacacacatcgacggcccttcgttactaattgaaaactcaccttccgtctggcaaaacatcctggagtctgatacagaattcaaaaaggtcacgcctctgatccacgacagaatgttaatggataagaacgcaacagctttgagactcaatcatatgtcaaacaaaacgaccagcagcaaaaacatggagatggtgcagcagaaaaaagagggtccaatcccacctgatgcgcagaaccccgatatgagtttttttaagatgctctttttgcctgagagtgcaagatggatacagaggacccacggcaagaactctttgaattctggacaggggcctagtccgaagcagttagtgtcacttggacctgagaaatctgtagaaggtcagaattttctttctgaaaagaataaagtggtggttggcaaaggagaatttactaaggacgtgggcttgaaagagatggtcttcccttctagccgtaatctttttctaacaaaccttgacaacctgcacgaaaataacacccacaaccaggaaaaaaagatacaggaagaaatagagaaaaaagagactttaatccaggaaaatgtggtgttgcctcaaattcacactgtcacagggaccaagaattttatgaagaacctgtttctgctgtcaacacgtcaaaacgtcgagggaagttacgatggtgcttacgcaccagtgctccaagactttagatctctgaacgactcaactaaccgcaccaaaaagcacactgcccatttttcgaagaagggcgaagaagaaaaccttgaagggctgggcaatcaaaccaagcagatcgttgaaaaatatgcctgcactacaagaatctcgccaaatacttcacaacagaatttcgtcactcaacggtccaagagagccctgaaacagtttaggctgcccctggaagaaacagaacttgagaagcgtatcatcgtggacgacacatcaacacaatggtctaagaatatgaagcacctgacaccctccacgctaactcagattgactataatgaaaaggagaaaggcgccataacccagagtcctctgtccgattgcctaactcggagccactctatcccacaggcaaacagatcacctctccccatagctaaggtatcctcattccccagcattcgacccatctatctgactcgggtcctttttcaagacaactcttctcatttacccgccgcgtcctatcgcaaaaaggactcaggagtccaagagtctagtcattttctacaaggagcaaaaaagaataacctgagcctggccatactcacccttgagatgactggagaccagagagaagtgggtagcctaggcacctccgctacgaattcagtcacatacaaaaaagttgagaataccgtgctaccaaagcctgatcttccaaagacatccggcaaagttgagctacttcccaaagtacacatctaccagaaagacctattccctacagagactagcaacgggagccctggacacctggatctggttgaagggtccttgctccagggaacggagggagctatcaaatggaatgaggcaaataggccagggaaagtgccctttctacgggtggcaaccgaatcctcagcaaaaactccaagtaagctcttagatccccttgcctgggataatcattacggcactcagattcctaaagaagagtggaagagtcaagagaagtcacccgagaagactgcttttaaaaaaaaagatactatcttatccttgaacgcttgtgagtcaaaccatgctattgcagctatcaatgaaggacagaacaaacctgaaatcgaggtcacgtgggctaaacagggaagaactgagagactgtgctctcaaaacccccccgttctgaaacgtcaccagagggagataacccgcactacactccagagcgatcaagaagagattgactacgacgatactattagtgtggaaatgaagaaagaggattttgatatttatgatgaagatgagaatcaatcacccagatcattccaaaagaaaacaaggcactattttatcgcagcagttgagcgtctgtgggattacggcatgtcatcgtctcctcatgtgctgagaaaccgggctcaaagtgggagcgtacctcagtttaaaaaagtggtcttccaagagttcacagacggatcctttacacagccactgtaccgaggcgagctgaacgagcaccttgggttactgggcccctacataagagcagaggtggaagacaacatcatggtcactttccgcaatcaggcctcccgcccgtattcattctattcttcgttaatttcttatgaggaagatcaaaggcaaggagccgagcccaggaagaatttcgtgaaaccgaacgaaactaagacgtacttctggaaggtacagcatcatatggcacccacaaaagacgaattcgactgcaaagcctgggcctacttttcagacgtcgatttggaaaaggatgtgcactctggcctcattggtccccttctagtatgtcatactaatacacttaaccccgctcacggacgacaggttactgttcaggaattcgctttgttttttactatcttcgatgagactaagagttggtactttacagaaaacatggaacggaactgtcgagccccttgcaacattcagatggaagaccctacctttaaagaaaattatcgttttcacgcaattaatggttacattatggacacgttacccggactcgtcatggcccaggaccagcgaataagatggtatctcttgtcaatggggtctaacgagaacatccactccatccacttctcaggccacgtatttaccgttagaaaaaaggaggaatataaaatggctctttataacctataccccggagttttcgagactgtggaaatgctgccctctaaggctggtatttggcgtgtggaatgccttatcggcgaacacctccatgctggcatgagtaccctcttcctagtgtattcgaacaagtgccaaactccactcggaatggcttccggtcacatccgggactttcagatcactgctagcggacagtatggccaatgggcacctaaattggcgcgattacactacagtggctctattaatgcttggtccactaaagagccattcagttggataaaggtcgacctactcgcacctatgattatccatggcataaaaacgcaaggcgccaggcaaaagttctcctctttatatatttcacagtttatcataatgtattccttagacggaaaaaagtggcaaacgtacaggggtaatagcacaggcactcttatggtcttcttcggtaacgtagattccagcggtataaaacataatatctttaatccccctatcattgctcgctacataaggctacacccaacgcactactctatcagatctacactacgaatggaacttatggggtgtgatctaaatagttgctccatgcccctcggaatggaatcaaaggctatcagcgacgctcaaatcacggcctccagctactttacaaatatgtttgccacttggtctccatcaaaagccagactacatcttcaggggagatcaaacgcttggcgccctcaagtgaataatccaaaagaatggctgcaggtggacttccaaaaaactatgaaggtgacaggggtgactactcagggcgtgaaaagcttgcttacctctatgtatgtcaaagaattcttaatatcttcctcccaggacggtcaccaatggacacttttctttcagaacgggaaagtgaaggtgtttcagggtaaccaagatagcttcactccagtagtaaacagcctcgacccacccttgctcactcgctacctcagaatccatccgcagtcttgggtacatcaaattgcattgcgaatggaggtactgggctgtgaagcccaggacttatactag

SEQ ID NO: 2471 - RNA, 7199 nt, Artificial Sequence
  derived and/or modified sequence
gggaaauaagagagaaaagaagaguaagaagaaauauaagagccaccaugcagaucgagcucucgacaugcuucuucuugugccugcuucgcuuuuguuuuucggcaacgaggcgcuacuaccuuggugccguggaacuuucaugggacuacaugcagucggaucuuggagaacuuccaguggacgccagguuuccaccucgggugcccaagucauuucccuuuaacacaucggugguguacaagaaaacauuguucguggaauucacagaccacuuguuuaacauugcgaagcccagaccgccguggauggguuugcucggcccgacgauccaggcggaagucuacgacacgguagugaucacgcucaagaacauggccucgcaucccguaucacuucacgcaguaggagucuccuauuggaaagcguccgaaggggcagaguacgaugaucaaacaucacagcgcgagaaggaagaugacaagguguuuccggguggaucgcauacauauguguggcagguccuuaaagagaacggacccauggcaucagauccucuuugccucacguacucguauuugucgcauguagacuuggucaaggacuugaauucaggucuuauuggagcauuacuuguuuguagagaagguucucuggcuaaagaaaagacacagacauugcacaaguuuauccugcuuuucgcgguguucgacgagggaaaaucauggcacucggaaacgaaaaacucccuuaugcaggauagggacgcagcgucggccagagccuggcccaaaaugcacacugucaacgguuaugucaacagaagccuucccgguuugaucggaugccacagaaaaucgguguacuggcacgugauugggauggggacgacgcccgaaguacacuccaucuuuuuggaagggcacaccuuuuugguacgcaaccauagacaggcaucccucgagauuucgccuauuacuuucuugacggcgcagacguuguugauggacuugggucaguuuuugcucuuuugccacaucucgucgcaucagcacgauggaauggaagcguacgucaagguagacagcuguccggaagagccgcaauugaggaugaagaauaacgaagaagccgaagauuaugaugacgauuugacagacucagaaauggacgucgugcgauucgacgaugacaauagcccgagcuucauccagaucagaucagucgccaaaaagcauccaaagacauggguacacuacaucgccgcugaagaagaggacugggauuaugcaccuuuaguucuggcuccugaugauagaucuuacaagucacaguacuugaacaacgguccgcagcggaucggaagaaaguacaaaaagguccgcuuuauggccuauacagacgagacauucaagaccagggaagcaauucagcaugagagcggaauucucggaccucugcucuauggagaggucggugacacgcuguugaucaucuucaaaaaccaggcaucaaggcccuacaacaucuauccgcacgguauuacugacguccggccucucuacucccgcagacuccccaagggagugaaacaucuuaaagauuuucccauucugccuggggagaucuucaaguauaaguggacagugacggucgaggaugguccaaccaaaucagacccgagaugucugacgcgguauuacucgucauucgucaauauggagcgggacuuggccucgggguugauuggaccacuccucauuugcuacaaagaaagcgucgaucagcgcgguaaccagaucaugucggauaagcgcaacgucauccuuuucucggucuuugaugaaaaucgcucgugguaucucacggagaacauccagagguuucugccgaauccagcgggaguacagcuugaggaccccgaguuccaggcgucgaacaucaugcauagcaucaacggguaugucuuugauagccuucaguugagcgugugucuucaugaggucgcauacugguacaucuugagcaucggagcgcagacggacuuuuugucgguguucuuuagcggauacacauucaaacauaagaugguguaugaagauacacugacucucuuucccuucucgggagagacagucuucaugucgauggagaaccccgguuuguggaucuuggggugucauaacucggauuucagaaaucgcgggaugacagcuuugcugaagguguccagcugcgacaagaauaccggagacuauuacgaagacucguaugaggacaucagcgcguacuugcucucaaagaacaaugcgauugaaccuaggucauucucgcaaaacucacggcauccuucgacucgacagaaacaguucaaugcgaccacgauccccgagaaugauaucgaaaagaccgacccuugguuugcacacagaacccccaugccuaagauccagaacguaucauccagcgaccugcuuaugcuucuuaggcaaucuccuacaccucauggauuaucgcucuccgaucuccaagaagcgaaguacgagaccuuuucggaugacccuucccccggugcaauugacucaaacaauuccuuguccgagaugacacacuuccgaccccagcuucaccacagcggagacaugguguuuacccccgaaucgggacuucaacugaggcuuaacgagaaacucgggacaacagcugcgaccgaguugaaaaagcucgauuucaagguaucaucaacaucgaacaaccugaucuccacgaucccauccgauaacuuggcagccggaacggacaauacgucaucgcucggaccgccaucgaugccggugcacuaugauucgcaauuggacacuacucuguucggaaagaagucgucgccuuugacggagagcggugggccucucucacucucagaagagaacaacgauucgaaacugcucgaaagcggacuuaugaacucccaagaguccucaugggggaagaacgugagcucaacagaaucagguagacuguuuaaaggaaaacgagcucaugguccugcacuccugacuaaagacaaugcgcucuucaaggugucgaucucgcucuugaaaaccaacaaaacauccaacaacucggcgaccaaccgaaaaacccacauugauggucccucgcuucugauugaaaacucgccgucgguguggcagaacauucuugagucggauaccgaguuuaagaaggucacaccguugauccacgaccgcaugcugauggacaaaaacgcgacggcucugagguugaaucauaugucgaacaagaccacuucgagcaagaauauggaaauggugcagcaaaagaaggaaggaccuauuccgcccgacgcgcagaaucccgauauguccuuuuucaagaugcuguuucugccugaaucagcaagauggauacaacguacacauggaaaaaauucucuuaacucuggccaaggaccuaguccaaagcaguugguguccuugggucccgaaaagucaguggaggggcagaacuuucucuccgaaaagaacaaaguggucguggggaagggagaauucacaaaggauguggggcucaaggagaugguguuuccguccucgcgaaaccuuuucuugaccaaucuggauaaccuucaugagaacaacacucacaaccaggagaagaagauucaggaagaaaucgagaagaaagaaacacuuauucaggaaaaugucguccugccccagauccauaccgugaccgggacgaagaacuuuaugaagaaucucuucuugcuuagcacaaggcagaacgucgaggggagcuacgauggagcguaugcgccggugcugcaggauuuucgcucauugaacgauucaaccaauagaaccaagaaacauacggcgcacuucucgaagaaaggggaagaagagaaucuugaggggcucggcaaucagacuaaacagauuguggagaaauaugcguguaccacucgaauuucccccaauaccucgcaacagaauuuugugacucagaggucgaagcgggcauugaaacaguuucgguugccucuugaagagacugaauuggagaagaggauuaucguagacgauacaagcacccaguggucgaaaaacaugaagcaccugacacccucgacgcugacgcagaucgacuauaaugagaaggagaagggagccaucacccagucgcccuugucagauugucugacgagaucacauucgaucccgcaagcgaaucguaguccacuuccaauugcaaaaguuagcucauuuccuucuauucguccuaucuaccugacuaggguccucuuccaagauaauucaagccaucugccagcagcaagcuauaggaagaaagacucgggggugcaggagucaagccacuuucugcaaggggcgaagaaaaacaaucuuucccucgcgauccucacauuggagaugacaggugaccaacgcgaaguggggucgcucggaacaucggcuacgaauucagucacauacaagaagguagaaaacaccguccugccgaagccggauuugcccaaaacuuccgguaaagucgagcuucugcccaagguccauaucuaccagaaagauuuguucccgacggagacaucaaacggcuccccgggacaucucgaccuuguagagggaucgcugcuucagggaacugagggugcgauuaaguggaacgaggcgaauaggccugggaaggugccauucuugcgcguagccacggaaucgagcgcgaagacuccaucgaaacucuuggauccucuugcgugggacaaccauuacgggacacagaucccuaaggaagaauggaagucacaagaaaaguccccggagaaaaccgcauucaaaaagaaagacacuauccuuucgcuuaacgcgugugagucaaaucacgcgauugcggcgaucaaugaggggcagaacaagccugaaaucgaagucacgugggcaaaacaggggcgcaccgaacggcuguguucgcaaaauccgccugugcuuaagagacaucagagagagauuaccagaaccacacuccagucagaccaggaagagaucgacuacgacgauaccauuucagucgagaugaagaaagaggacuucgauaucuacgacgaggaugagaaccagucaccucggucauuccagaagaagacacggcauuacuucauugcagcaguggagcgcuugugggacuauggaaugucuucaaguccucauguucuaagaaauagggcucaaucgggaucgguuccucaguucaaaaagguaguguuucaggaauucacggacgggagcuucacacagccccuguauaggggugaguugaacgagcacuugggacuccucgguccguacauuagagcagaagucgaagacaacaucauggugacauuccggaaccaggccucgcgacccuauagcuucuauagcagccucauuucguacgaagaagaucagagacaaggggcggagccccgaaagaacuuugugaagccgaaugaaacaaagaccuauuucuggaaagugcagcaucacauggccccaacaaaagacgaguucgauugcaaggcuugggccuacuuuuccgauguggaucucgagaaagacguccacucgggacugaucggaccccuucuggucugucauacaaauacucuuaacccugcgcauggucgccaggugacggugcaagaauucgcucuuuucuuuaccauuuucgacgaaacaaaguccugguacuucaccgaaaacauggaacgaaauugcagagcgccuuguaacauccaaauggaggaucccacguuuaaagaaaacuaucgcuuccaugcaaucaaugguuacaucauggacacgcuccccggacuugugauggcccaagaccagagaauucgaugguacuugcuuucgaugggaagcaaugagaacauucacucgauccauuucagcggacacgucuuuaccgugcgcaagaaagaagaguauaagauggcgcucuacaaucuuuacccggguguguucgaaacaguggagaugcugcccucgaaggcggguaucuggcgcguggaaugucugaucggcgagcaccugcacgcgggaaugucgacguuguuucuuguguacucgaacaaaugucagacgccucucgguauggcgagcgggcauauccgggacuuucagauuacggcgucagggcaguacggacagugggcaccuaaacuggcacggcuccacuacagcgggucaaucaacgccuggucgacgaaagaaccuuucagcuggaucaaaguggaccuucuggccccuaugaucauucauggaaucaagacccagggagcccggcagaaguucucguccuuguauaucucacaguuuaucaucauguacucgcuugaugggaagaaauggcaaacguacaggggaaacucgacggggacucugaugguauucuucgggaacgucgacucgucgggaaucaaacacaacaucuuuaacccacccaucauugcgcgauacauuagacuccaccccacccauuacucaaucaggucgacuuugcgcauggaacugaugggaugugaccucaauucgugcucgaugccacuggggauggagucaaaagccauuucggacgcacagaucaccgccagcucauacuucaccaauauguucgcaacguggucgcccucgaaagcgaggcuccaucuccagggaaggucgaaugcguggcgaccgcaagugaauaaccccaaagagugguugcaggucgauuuccagaaaaccaugaaggugacagggguaacgacacagggggugaaaucacugcucacuucgauguacgugaaagaguucuugaucagcucgucccaagauggacaucaguggacacuguucuuucagaacgggaaggucaaaguguuccaggggaaucaggauagcuucacgcccgucguaaacucauuggaucccccacucuugacacgcuauuugcgaauccacccacaaucgugggugcaccagaucgcacuccggauggaaguccuugguugugaagcgcaggaucuguacugaugagcugccuucugcggggcuugccuucuggccaugcccuucuucucucccuugcaccuguaccucuuggucuuugaauaaagccugaguaggaag

SEQ ID NO: 2472 - RNA, 7056 nt, Artificial Sequence
  derived and/or modified sequence
augcagaucgaacuaucuacaugcuucuuccucugccugcugcgcuuuuguuucucggcuacaagacgguacuaucugggugcgguugaguugagcugggauuauaugcagucugaccuuggagagcuccccguggaugcacgguucccgccccgcguaccuaaauccuuuccauucaauacauccgucguuuacaaaaaaacgcucuucguugaguucacugaccaucuguucaauaucgcaaagccaaggccuccguggaugggccucuuaggaccaaccauucaagccgaaguguaugacacagucgugaucaccuugaaaaauauggccagucauccugucagccugcaugccgugggcgucucuuauuggaaggcgucagaaggagcugaauacgaugaucagacgucccaaagggagaaagaagaugauaaagucuuuccuggagguucucauaccuacguguggcagguccucaaagaaaauggcccgauggccucugaccccuuaugccugaccuacucuuaucucucgcacguggaccuggucaaagaucuaaacucuggccuuaucggugcucugcucguuugucgugaaggcucgcuggccaaggaaaagacccagacccuucauaaauuuaucuugcuguuugccguguucgacgagggcaagucuuggcacucagagacuaaaaauucgcucaugcaggacagggacgcugcuagcgccagggcuuggcccaaaaugcacacagugaacggauacgugaaucgcucauugccaggacuaauugguugccaccguaaaagcguauauuggcacguuauugguaugggcacaacacccgagguccacagcauuuuucucgagggacauaccuuucucguccgaaaccacagacaggcaucccuggagauaagcccaauuacuuuucucaccgcccagacacugcucauggacuugggacaguuuuugcucuucugccacaucaguucccaccagcaugaugggauggaggccuacgucaaaguagacucuuguccggaggaaccacagcugcggaugaagaacaaugaggaagcggaagauuaugaugacgaccugaccgacagcgaaauggacgucguccgcuucgacgaugauaacuccccaagcuuuauucagauuagaucaguugcgaagaaacauccaaaaaccuggguccauuacaucgccgcugaggaagaggauugggacuaugcucccuuagugcuggcaccugacgaccggagcuacaaaucacaguauuugaauaauggaccacagaggaucggccgaaaguacaaaaaggugagauuuauggcauauaccgaugagacguucaagacaagggaagcuauccagcaugaaucggggaucuuggggccccuguuauacggggaggugggcgacacucuacugaucaucuuuaaaaaccaggccucaaggccauacaauaucuacccacauggcaucacugacguccgaccccuuuauucccggcgguuaccaaagggaguaaagcacuugaaagacuuuccaauccugccgggugagauuuucaaguacaaauggaccgucaccguagaggauggccccacgaagagugacccacgauguuugaccagguauuacucaucuuuugucaauauggagcgggaccuugcaucugggcuuauaggaccccuguuaaucuguuacaaggaauccguggaccagcgagguaaccagaucaugucagacaagcgcaaugucauauuauucagugucuuugaugaaaauaggagcugguaucucacugagaacauucagagguuucuaccuaauccggcgggggugcagcuggaggacccagaguuccaggcuaguaacaucaugcacaguaucaacggauauguguuugauagucugcaacugucaguuugucuccaugaaguagccuacugguacauccugucaauuggugcgcagaccgauuuccuuucagucuuuuuuagcggguacacguuuaagcauaaaaugguguaugaggacacccuaacccuguuccccuuuucgggcgaaacggucuucaugucaauggaaaauccuggacuguggauccuugguugucauaacucggauuuuaggaauagggggaugacggcacugcugaagguuagcuccugcgauaagaauacgggagauuacuacgaggauucguacgaggacaucagugcuuaucuguugaguaagaacaaugccaucgaaccaagaucuuucagccaaaacagccggcacccaagcacacgccagaagcaauucaacgccaccaccauucccgagaacgacaucgaaaaaaccgaucccugguuugcccacagaacucccaugccuaaaauucagaauguuagcagcucagacuuacugaugcuccugagacagucucccacgccgcacggucuuucccugucagaccugcaggaagcuaaauacgagaccuuuucugaugaucccucccccggugcaaucgacucuaauaauagccugagugagaugacccauuuucgcccgcaacugcaucacucaggcgacaugguuuucacacccgaaagcggacugcagcucagacucaacgagaaacucggcaccaccgcagcaacggaacugaaaaaacuggacuuuaaagucaguagcacguccaauaaucugaucaguacgauacccuccgauaaucuugcggcaggcaccgauaauacauccagucuaggccccccguccaugcccguccacuacgacagccagcuggacacuaccuuguucggcaagaagaguagcccacuuaccgaaucgggggggccucuuaguuuauccgaggaaaauaaugacucuaaacuccuagagucuggcuuaaugaacagccaagaaaguaguugggggaaaaauguaaguagcacagagucuggccgccuguuuaaaggaaaacgggcucacggcccugcccuucuuacaaaagacaaugcucuuuuuaaggugucgaucagcuugcugaagaccaauaagacuagcaacaacagcgcaaccaaccggaaaacucacaucgacggccccagucuguuaauugagaacagucccucuguuuggcagaauauacuggaauccgauaccgaauuuaaaaaaguaacaccucucauucacgaccgaauguugauggacaagaaugccacugcucugcggcuuaaccacaugaguaacaagacaaccagcaguaagaacauggaaauggugcagcagaaaaaggaaggcccuauuccaccagaugcccagaauccugauaugucuuuuuuuaaaaugcuguuucugcccgaaucggcacgguggauccagcggacucacggaaagaacagucuuaacucuggacaaggaccaagcccaaaacaguuagucucccugggcccugagaagucagucgaaggccaaaacuucuuaucugaaaagaacaaagucgugguggguaaaggagaauucaccaaggacguuggauugaaagaaaugguuuuccccuccucucgcaaccucuuccucaccaaccucgacaaccugcacgagaacaauacgcacaaccaagagaaaaaaauucaagaggagaucgagaaaaaagagacccugauucaggagaacgucgugcucccccagauacauaccguaacugggacaaaaaauuucaugaagaacuuauuucuacugagcacacggcagaaugucgaagguagcuacgauggcgccuaugcucccguuuuacaggauuuccggucgcugaaugacucgaccaauagaaccaagaaacacaccgcccauuuuucuaaaaaaggggaggaggaaaaucuggagggacuuggcaaccagacuaaacagaucguggaaaaauacgccuguaccacccggauaucuccaaauaccucccagcagaauuuugugacccagagguccaaaagagcccucaagcaauucagacucccgcucgaagaaacggaacuggagaagcggaucauugucgacgauacuucuacucaguggagcaaaaacaugaagcaccugacuccuagcacucugacccagauagauuauaaugagaaggagaaaggcgcgaucacccaaucuccucuuagcgacugccucacccgcucucacucaaucccucaggccaacaggaguccccugcccauugccaagguaaguagcuuuccaagcauucggcccaucuaucugacucgcgugcuauuucaggauaauuccucucaccugcccgcagccuccuacaggaaaaaagacucaggagugcaagaguccagccacuuccugcagggcgccaagaaaaauaaccugucacuggccauccucacccucgaaaugacuggugaccaaagagaggucgguucccucgguacauccgccaccaacucuguuacauacaagaagguugaaaauacugugcuccccaaaccggaucugccuaaaacuucaggcaaaguggaacuguugccaaaggugcacauuuaccagaaagaccuguuuccuacugagacaagcaauggcagcccgggccaccucgaccucguagaagggaguuugcuucaggggacugagggugccaucaaguggaacgaggcaaacaggccugggaaagucccuuuccugcgggucgccaccgaauccucagcaaaaacuccguccaaacuccucgauccacuagcaugggacaaccacuacgggacacagauaccaaaggaagaguggaagagucaggaaaagagcccugaaaaaacugcguucaagaagaaggauacgauucugagucugaacgccugcgagucuaaccaugcuauugcagccaucaacgaggggcaaaacaagccagaaauugaggugacgugggcaaaacagggccguacagagaggcuguguucccagaauccucccguuuuaaagagacaucagcgcgaaauuacccggacaaccuugcaguccgaccaggaagaaaucgauuacgacgauacaauuagcguagagaugaagaaggaggacuucgauauuuacgaugaggacgaaaaccaaaguccuaggagcuuccagaaaaagaccaggcauuauuuuauugccgcuguagaaagacuuugggacuauggcaugagcagcaguccacacguucugcggaaucgggcacagucagguuccgugccucaauuuaaaaaagucguguuccaggaguucaccgacggaucuuuuacccagccccucuaccggggggaacuuaaugagcaucucgguuuauuaggcccauauauccgggcggagguugaggacaacauuauggucacauucaggaaccaggcgucaagaccauauucuuuuuauagcagucugauaaguuaugaagaagaccaacgucagggggcggaaccacggaaaaauuucguuaaaccaaaugagaccaagacauacuuuuggaaggugcagcaccacauggccccuaccaaagaugaguucgauugcaaggccugggcuuauuuuuccgauguugaucuggagaaagacguucauucuggguuaaucgguccacugcuagugugccacacaaacacccuaaacccugcucauggccggcaagucaccgugcaggaguucgcccuauucuuuaccauuuuugaugagacuaaguccugguauuuuaccgaaaauauggagcguaacuguagagccccaugcaacauccaaauggaggauccaacuuucaaagagaauuauagguuccaugcuaucaacggcuauaucauggacacgcugccaggccucgugauggcccaggaccaaaggaucagaugguacuugcugucaaugggcucgaacgaaaacauccacagcauacacuuuucuggccacgucuuuacugugaggaaaaaggaggaguauaaaauggccuuguauaaucuguaccccggcguguuugaaacaguggagaugcuccccagcaaggcagggaucuggcgggucgagugucucauaggcgagcaucugcacgcuggcauguccacgcuguuucugguguacucaaacaagugucagacgccacucgggauggccucagggcacauuagggauuuccagaucacugcaucaggccaguacggccagugggcccccaaguuggcucgguuacacuauagcgguucaaucaacgcuuggagcacaaaagagccauucucuuggauaaagguggaccuguuggcccccaugaucauccacgggauuaagacccaaggggcacgccagaaguucucuucccucuauaucagucaguuuaucaucauguacagccucgacggcaagaaguggcagacauaucgaggcaauucaacggguacacucaugguguuuuucgguaacgucgacucaagcggaaucaagcauaauauuuuuaacccacccaucaucgcccgcuacauccgcuugcacccgacccacuacuccauccgauccacacuccgcauggaacuuaugggcugugaccugaauucuuguaguaugccccuuggcauggaguccaaagcaauuagcgacgcucagauaaccgccagcucuuauuuuacaaacauguucgccacauggagcccguccaaggcuaggcuccaccuucaggguagauccaacgcauggagaccgcaggucaacaacccaaaagaguggcuccagguggacuuccaaaagacgaugaaagugacugguguuacuacgcagggggucaaaucgcuacugacaucuauguaugucaaagaauuucugaucucuucaucucaagauggacaccaguggaccuuauuuuuucagaauggcaaaguaaaaguguuccagggcaaucaggacagcuuuacgccggucguuaacucauuggauccaccgcuccuuaccagguaucucaggauucacccacagucuuggguucaccagaucgcguugagaauggaaguguuggguugcgaggcucaggaucuuuauuag

SEQ ID NO: 2473 - RNA, 7056 nt, Artificial Sequence
  derived and/or modified sequence
augcagauugaacucucgacuugcuuuuuucucugucuguuaagauucuguuuuagcgccacaaggcgguauuaucugggagccguugaacuaucaugggacuacaugcagucagaccugggugagcuuccagucgacgcccgauuuccaccucgaguuccaaaaagcuuccccuuuaacacuagcguagucuauaagaaaacauuguucguugaauuuaccgaucaucuguuuaauaucgcuaagcccagaccucccuggaugggacuguuaggacccacaauacaagccgaggucuaugacaccgucgucauuacauuaaagaacauggcuucacaccccgucucacuucacgccgugggggucaguuauuggaaggcgucugagggagccgaauaugacgaucaaaccagccagagagagaaggaggaugauaaaguuuucccagggggcucacacacauacguauggcaagugcuuaaggaaaauggaccaauggccuccgacccacugugccugacuuacucauaucucagucaugucgaccucgucaaagaccuuaacucaggacuaaucggagcucuucuggugugcagagaaggaagccucgcuaaagagaaaacacaaacauuacacaaauuuauucuguuguuugccguuuucgacgaggggaagucauggcacucagaaacgaaaaacagucugaugcaggauagagacgccgcuuccgcucgcgcauggccaaagaugcacacggugaauggcuacguuaaccgcucucucccaggucucauuggcugucauagaaaauccgucuauuggcacguaauuggaauggguacuaccccagagguccauagcaucuucuuagaaggucacacuuuccuugugcguaaccacagacaagccucacuggaaauuagccccauaacauuccugacugcccaaacacuucuuauggaccuuggccaauucuuacucuuuugccauauuagcucacaccaacacgauggaauggaggccuaugugaaaguggauucaugcccagaggaaccucaguuaagaaugaagaauaaugaagaggccgaggauuaugaugacgacuuaaccgauucagaaauggaugucgugagguucgacgacgauaauagcccaagcuucauucagauuaggucaguugcuaagaagcaucccaaaacuuggguucauuacaucgcugcugaagaagaagacugggacuaugccccacugguccuggcccccgacgacagaagcuauaagucccaguaccuaaacaacgggccucaaagaaucgguagaaaauauaaaaagguuagguuuauggcauacacagacgagacauucaaaaccagggaagcaauacaacaugagagcggaauauuaggcccacugcuuuacggagaggucggagacacacuccugauaaucuucaagaaccaggcuucuagacccuauaauauuuacccccacggcaucacugauguucgcccuuuauacucccggagacuccccaagggugugaaacaucuuaaggacuucccuauuuugccuggagaaauuuucaaguauaaguggaccgugaccguggaggaugggccaaccaaaagugacccccggugcuugacucgguacuacucuaguuucguaaacauggaaagagaucuagccagcggucuuauagggccucuccugaucuguuauaaggaauccguugaccagaggggcaaucagauuauguccgauaagcgcaacguuauacuuuucucuguguuugacgagaacagaagcugguaucuaaccgagaauauccagagauuuuuaccuaacccagccggaguucagcuggaggauccagaguuccaagcuaguaacauuaugcacucuaucaauggauacgucuucgauucccuucagcugucaguuugucuucacgagguugccuacugguacauccuguccauuggagcccaaaccgauuuccuauccguguuuuuuaguggcuacacguucaaacauaaaaugguuuaugaagacacucucacacuuuuuccauuuagcggggaaaccguuuucaugucuauggaaaaccccggccuauggauucugggaugucacaauagcgauuuucggaaccgcggcaugacagcccuccucaaagucucuucaugcgauaagaacaccggcgacuauuacgaggacagcuaugaagauauuuccgccuaucugcuaucaaaaaacaaugccaucgaaccacgaucauucagccagaacucgagacacccgucaacucggcagaaacaguucaacgcuaccacgauuccagagaacgauaucgagaagacugaucccugguuugcccaccgaacaccaaugcccaagauucaaaauguguccucuagcgaucugcugauguuauugagacagagcccaaccccucauggacugagccugucugaccuucaggaagccaaguacgaaacuuucagcgacgauccuucuccaggagcaauugauuccaacaauagucugagcgaaaugacgcacuuucgaccgcaauuacaccacuccggagauaugguuuucacuccugaguccggucugcaguuaagacuuaacgaaaaacucggcacuacugcugccacagaguugaagaagcuggauuuuaaggugucuucuaccaguaauaaccuuaucaguacuauccccucagacaacuuggccgccgggacagacaacaccucaagccuagggccacccucaaugccgguccauuacgauagccaguuggacaccacccuguucgggaaaaaguccaguccccucacagaauccggaggaccacuuagcuugucagaagagaauaaugauucuaaacugcuggagagugggcugaugaauucccaagaaucaagcuggggaaagaacgucuccuccacugaaucuggucguuuauucaaggguaagagagcucacggaccugcucugcugacaaaggacaaugcguuauucaaggucucuauuucacuccucaaaaccaauaagacauccaauaacucugccacgaacagaaagacacacaucgacggcccuucguuacuaauugaaaacucaccuuccgucuggcaaaacauccuggagucugauacagaauucaaaaaggucacgccucugauccacgacagaauguuaauggauaagaacgcaacagcuuugagacucaaucauaugucaaacaaaacgaccagcagcaaaaacauggagauggugcagcagaaaaaagaggguccaaucccaccugaugcgcagaaccccgauaugaguuuuuuuaagaugcucuuuuugccugagagugcaagauggauacagaggacccacggcaagaacucuuugaauucuggacaggggccuaguccgaagcaguuagugucacuuggaccugagaaaucuguagaaggucagaauuuucuuucugaaaagaauaaaguggugguuggcaaaggagaauuuacuaaggacgugggcuugaaagagauggucuucccuucuagccguaaucuuuuucuaacaaaccuugacaaccugcacgaaaauaacacccacaaccaggaaaaaaagauacaggaagaaauagagaaaaaagagacuuuaauccaggaaaaugugguguugccucaaauucacacugucacagggaccaagaauuuuaugaagaaccuguuucugcugucaacacgucaaaacgucgagggaaguuacgauggugcuuacgcaccagugcuccaagacuuuagaucucugaacgacucaacuaaccgcaccaaaaagcacacugcccauuuuucgaagaagggcgaagaagaaaaccuugaagggcugggcaaucaaaccaagcagaucguugaaaaauaugccugcacuacaagaaucucgccaaauacuucacaacagaauuucgucacucaacgguccaagagagcccugaaacaguuuaggcugccccuggaagaaacagaacuugagaagcguaucaucguggacgacacaucaacacaauggucuaagaauaugaagcaccugacacccuccacgcuaacucagauugacuauaaugaaaaggagaaaggcgccauaacccagaguccucuguccgauugccuaacucggagccacucuaucccacaggcaaacagaucaccucuccccauagcuaagguauccucauuccccagcauucgacccaucuaucugacucggguccuuuuucaagacaacucuucucauuuacccgccgcguccuaucgcaaaaaggacucaggaguccaagagucuagucauuuucuacaaggagcaaaaaagaauaaccugagccuggccauacucacccuugagaugacuggagaccagagagaaguggguagccuaggcaccuccgcuacgaauucagucacauacaaaaaaguugagaauaccgugcuaccaaagccugaucuuccaaagacauccggcaaaguugagcuacuucccaaaguacacaucuaccagaaagaccuauucccuacagagacuagcaacgggagcccuggacaccuggaucugguugaaggguccuugcuccagggaacggagggagcuaucaaauggaaugaggcaaauaggccagggaaagugcccuuucuacggguggcaaccgaauccucagcaaaaacuccaaguaagcucuuagauccccuugccugggauaaucauuacggcacucagauuccuaaagaagaguggaagagucaagagaagucacccgagaagacugcuuuuaaaaaaaaagauacuaucuuauccuugaacgcuugugagucaaaccaugcuauugcagcuaucaaugaaggacagaacaaaccugaaaucgaggucacgugggcuaaacagggaagaacugagagacugugcucucaaaacccccccguucugaaacgucaccagagggagauaacccgcacuacacuccagagcgaucaagaagagauugacuacgacgauacuauuaguguggaaaugaagaaagaggauuuugauauuuaugaugaagaugagaaucaaucacccagaucauuccaaaagaaaacaaggcacuauuuuaucgcagcaguugagcgucugugggauuacggcaugucaucgucuccucaugugcugagaaaccgggcucaaagugggagcguaccucaguuuaaaaaaguggucuuccaagaguucacagacggauccuuuacacagccacuguaccgaggcgagcugaacgagcaccuuggguuacugggccccuacauaagagcagagguggaagacaacaucauggucacuuuccgcaaucaggccucccgcccguauucauucuauucuucguuaauuucuuaugaggaagaucaaaggcaaggagccgagcccaggaagaauuucgugaaaccgaacgaaacuaagacguacuucuggaagguacagcaucauauggcacccacaaaagacgaauucgacugcaaagccugggccuacuuuucagacgucgauuuggaaaaggaugugcacucuggccucauugguccccuucuaguaugucauacuaauacacuuaaccccgcucacggacgacagguuacuguucaggaauucgcuuuguuuuuuacuaucuucgaugagacuaagaguugguacuuuacagaaaacauggaacggaacugucgagccccuugcaacauucagauggaagacccuaccuuuaaagaaaauuaucguuuucacgcaauuaaugguuacauuauggacacguuacccggacucgucauggcccaggaccagcgaauaagaugguaucucuugucaauggggucuaacgagaacauccacuccauccacuucucaggccacguauuuaccguuagaaaaaaggaggaauauaaaauggcucuuuauaaccuauaccccggaguuuucgagacuguggaaaugcugcccucuaaggcugguauuuggcguguggaaugccuuaucggcgaacaccuccaugcuggcaugaguacccucuuccuaguguauucgaacaagugccaaacuccacucggaauggcuuccggucacauccgggacuuucagaucacugcuagcggacaguauggccaaugggcaccuaaauuggcgcgauuacacuacaguggcucuauuaaugcuugguccacuaaagagccauucaguuggauaaaggucgaccuacucgcaccuaugauuauccauggcauaaaaacgcaaggcgccaggcaaaaguucuccucuuuauauauuucacaguuuaucauaauguauuccuuagacggaaaaaaguggcaaacguacagggguaauagcacaggcacucuuauggucuucuucgguaacguagauuccagcgguauaaaacauaauaucuuuaaucccccuaucauugcucgcuacauaaggcuacacccaacgcacuacucuaucagaucuacacuacgaauggaacuuauggggugugaucuaaauaguugcuccaugccccucggaauggaaucaaaggcuaucagcgacgcucaaaucacggccuccagcuacuuuacaaauauguuugccacuuggucuccaucaaaagccagacuacaucuucaggggagaucaaacgcuuggcgcccucaagugaauaauccaaaagaauggcugcagguggacuuccaaaaaacuaugaaggugacaggggugacuacucagggcgugaaaagcuugcuuaccucuauguaugucaaagaauucuuaauaucuuccucccaggacggucaccaauggacacuuuucuuucagaacgggaaagugaagguguuucaggguaaccaagauagcuucacuccaguaguaaacagccucgacccacccuugcucacucgcuaccucagaauccauccgcagucuuggguacaucaaauugcauugcgaauggagguacugggcugugaagcccaggacuuauacuag

SEQ ID NO: 2474 - protein, 461 aa, Artificial Sequence
  derived and/or modified sequence
MQRVNMIMAESPGLITICLLGYLLSAECTVFLDHENANKILNRPKRYNSGKLEEFVQGNLERECMEEKCSFEEAREVFENTERTTEFWKQYVDGDQCESNPCLNGGSCKDDINSYECWCPFGFEGKNCELDVTCNIKNGRCEQFCKNSADNKVVCSCTEGYRLAENQKSCEPAVPFPCGRVSVSQTSKLTRAETVFPDVDYVNSTEAETILDNITQSTQSFNDFTRVVGGEDAKPGQFPWQVVLNGKVDAFCGGSIVNEKWIVTAAHCVETGVKITVVAGEHNIEETEHTEQKRNVIRIIPHHNYNAAINKYNHDIALLELDEPLVLNSYVTPICIADKEYTNIFLKFGSGYVSGWGRVFHKGRSALVLQYLRVPLVDRATCLRSTKFTIYNNMFCAGFHEGGRDSCQGDSGGPHVTEVEGTSFLTGIISWGEECAMKGKYGIYTKVSRYVNWIKEKTKLT

SEQ ID NO: 2475 - protein, 696 aa, Artificial Sequence
  derived and/or modified sequence
MQRVNMIMAESPGLITICLLGYLLSAECTVFLDHENANKILNRPKRYNSGKLEEFVQGNLERECMEEKCSFEEAREVFENTERTTEFWKQYVDGDQCESNPCLNGGSCKDDINSYECWCPFGFEGKNCELDVTCNIKNGRCEQFCKNSADNKVVCSCTEGYRLAENQKSCEPAVPFPCGRVSVSQTSKLTRAETVFPDVDYVNSTEAETILDNITQSTQSFNDFTRVVGGEDAKPGQFPWQVVLNGKVDAFCGGSIVNEKWIVTAAHCVETGVKITVVAGEHNIEETEHTEQKRNVIRIIPHHNYNAAINKYNHDIALLELDEPLVLNSYVTPICIADKEYTNIFLKFGSGYVSGWGRVFHKGRSALVLQYLRVPLVDRATCLRSTKFTIYNNMFCAGFHEGGRDSCQGDSGGPHVTEVEGTSFLTGIISWGEECAMKGKYGIYTKVSRYVNWIKEKTKLTEFAGAAAVDKTHTCPPCPAPELLGGPSVFLFPPKPKDTLMISRTPEVTCVVVDVSHEDPEVKFNWYVDGVEVHNAKTKPREEQYNSTYRVVSVLTVLHQDWLNGKEYKCKVSNKALPAPIEKTISKAKGQPREPQVYTLPPSRDELTKNQVSLTCLVKGFYPSDIAVEWESNGQPENNYKTTPPVLDSDGSFFLYSKLTVDKSRWQQGNVFSCSVMHEALHNHYTQKSLSLSPGK

SEQ ID NO: 2476 - DNA, 1536 bp, Artificial Sequence
  derived and/or modified sequence
gggaaataagagagaaaagaagagtaagaagaaatataagagccaccaatgcagcgcgtcaacatgattatggccgaatcgccgggactcatcacaatctgcctcttgggttatctcttgtcggcagaatgtaccgtgttcttggatcacgaaaacgcgaacaaaattcttaatcgcccgaagcggtataactccgggaaacttgaggagtttgtgcagggcaatcttgaacgagagtgcatggaggagaaatgctcctttgaggaggcgagggaagtgtttgaaaacacagagcgaacaacggagttttggaagcaatacgtagatggggaccagtgtgagtcgaatccgtgcctcaatgggggatcatgtaaagatgacatcaatagctatgaatgctggtgcccgtttgggtttgaagggaagaactgtgagctggatgtgacgtgcaacatcaaaaacggacgctgtgagcagttttgtaagaactcggctgacaataaggtagtatgctcgtgcacagagggataccggctggcggagaaccaaaaatcgtgcgagcccgcagtcccgttcccttgtgggagggtgagcgtgtcacagactagcaagttgacgagagcggagactgtattccccgacgtggactacgtcaacagcaccgaagccgaaacaatcctcgataacatcacgcagagcactcagtccttcaatgactttacgagggtcgtaggtggtgaggacgcgaaacccggtcagttcccctggcaggtggtattgaacggaaaagtcgatgccttttgtggaggttccattgtcaacgagaagtggattgtcacagcggcacactgcgtagaaacaggagtgaaaatcacggtagtggcgggagagcataacattgaagagacagagcacacggaacaaaagcgaaatgtcatcagaatcattccacaccataactataacgcggcaatcaataagtacaatcacgacatcgcacttttggagcttgacgaacctttggtgcttaattcgtacgtcacccctatttgtattgccgacaaagagtatacaaacatcttcttgaaattcggctccgggtacgtatcgggctggggcagagtgttccataagggtagatccgcactggtgttgcaatacctcagggtgcccctcgtggatcgagccacttgtctgcggtccaccaaattcacaatctacaacaatatgttctgtgcgggattccatgaaggtgggagagatagctgccagggagactcagggggtccccacgtgacggaagtcgaggggacgtcatttctgacgggaattatctcatggggagaggaatgtgcgatgaaggggaaatatggcatctacactaaagtgtcacggtatgtcaattggatcaaggaaaagacgaaactcacgtgatcagccagcgctgccttctgcggggcttgccttctggccatgcccttcttctctcccttgcacctgtacctcttggtctttgaataaagcctgagtaggaag

SEQ ID NO: 2477 - DNA, 1578 bp, Artificial Sequence
  derived and/or modified sequence
taatacgactcactatagggaaataagagagaaaagaagagtaagaagaaatataagagccaccaatgcagcgcgtcaacatgattatggccgaatcgccgggactcatcacaatctgcctcttgggttatctcttgtcggcagaatgtaccgtgttcttggatcacgaaaacgcgaacaaaattcttaatcgcccgaagcggtataactccgggaaacttgaggagtttgtgcagggcaatcttgaacgagagtgcatggaggagaaatgctcctttgaggaggcgagggaagtgtttgaaaacacagagcgaacaacggagttttggaagcaatacgtagatggggaccagtgtgagtcgaatccgtgcctcaatgggggatcatgtaaagatgacatcaatagctatgaatgctggtgcccgtttgggtttgaagggaagaactgtgagctggatgtgacgtgcaacatcaaaaacggacgctgtgagcagttttgtaagaactcggctgacaataaggtagtatgctcgtgcacagagggataccggctggcggagaaccaaaaatcgtgcgagcccgcagtcccgttcccttgtgggagggtgagcgtgtcacagactagcaagttgacgagagcggagactgtattccccgacgtggactacgtcaacagcaccgaagccgaaacaatcctcgataacatcacgcagagcactcagtccttcaatgactttacgagggtcgtaggtggtgaggacgcgaaacccggtcagttcccctggcaggtggtattgaacggaaaagtcgatgccttttgtggaggttccattgtcaacgagaagtggattgtcacagcggcacactgcgtagaaacaggagtgaaaatcacggtagtggcgggagagcataacattgaagagacagagcacacggaacaaaagcgaaatgtcatcagaatcattccacaccataactataacgcggcaatcaataagtacaatcacgacatcgcacttttggagcttgacgaacctttggtgcttaattcgtacgtcacccctatttgtattgccgacaaagagtatacaaacatcttcttgaaattcggctccgggtacgtatcgggctggggcagagtgttccataagggtagatccgcactggtgttgcaatacctcagggtgcccctcgtggatcgagccacttgtctgcggtccaccaaattcacaatctacaacaatatgttctgtgcgggattccatgaaggtgggagagatagctgccagggagactcagggggtccccacgtgacggaagtcgaggggacgtcatttctgacgggaattatctcatggggagaggaatgtgcgatgaaggggaaatatggcatctacactaaagtgtcacggtatgtcaattggatcaaggaaaagacgaaactcacgtgatcagccagcgctgccttctgcggggcttgccttctggccatgcccttcttctctcccttgcacctgtacctcttggtctttgaataaagcctgagtaggaaggcggccgctcgagcatgcatctaga

SEQ ID NO: 2478 - DNA, 137 bp, Artificial Sequence
  derived and/or modified sequence
atgcagagagtgaacatgattatggccgagtccccatcgctcatcacaatctgcctgcttggtacctgctttccgccgaatgcactgtctttctggatcacgagaatgcgaataagatcttgaaccgacccaaacgg

SEQ ID NO: 2479 - DNA, 1594 bp, Artificial Sequence
  derived and/or modified sequence
taatacgactcactatagggaaataagagagaaaagaagagtaagaagaaatataagagccaccatgcagcgcgtcaacatgattatggccgaatcgccgggactcatcacaatctgcctcttgggttatctcttgtcggcagaatgtaccgtgttcttggatcacgaaaacgcgaacaaaattcttaatcgcccgaagcggtataactccgggaaacttgaggagtttgtgcagggcaatcttgaacgagagtgcatggaggagaaatgctcctttgaggaggcgagggaagtgtttgaaaacacagagcgaacaacggagttttggaagcaatacgtagatggggaccagtgtgagtcgaatccgtgcctcaatgggggatcatgtaaagatgacatcaatagctatgaatgctggtgcccgtttgggtttgaagggaagaactgtgagctggatgtgacgtgcaacatcaaaaacggacgctgtgagcagttttgtaagaactcggctgacaataaggtagtatgctcgtgcacagagggataccggctggcggagaaccaaaaatcgtgcgagcccgcagtcccgttcccttgtgggagggtgagcgtgtcacagactagcaagttgacgagagcggagactgtattccccgacgtggactacgtcaacagcaccgaagccgaaacaatcctcgataacatcacgcagagcactcagtccttcaatgactttacgagggtcgtaggtggtgaggacgcgaaacccggtcagttcccctggcaggtggtattgaacggaaaagtcgatgccttttgtggaggttccattgtcaacgagaagtggattgtcacagcggcacactgcgtagaaacaggagtgaaaatcacggtagtggcgggagagcataacattgaagagacagagcacacggaacaaaagcgaaatgtcatcagaatcattccacaccataactataacgcggcaatcaataagtacaatcacgacatcgcacttttggagcttgacgaacctttggtgcttaattcgtacgtcacccctatttgtattgccgacaaagagtatacaaacatcttcttgaaattcggctccgggtacgtatcgggctggggcagagtgttccataagggtagatccgcactggtgttgcaatacctcagggtgcccctcgtggatcgagccacttgtctgcggtccaccaaattcacaatctacaacaatatgttctgtgcgggattccatgaaggtgggagagatagctgccagggagactcagggggtccccacgtgacggaagtcgaggggacgtcatttctgacgggaattatctcatggggagaggaatgtgcgatgaaggggaaatatggcatctacactaaagtgtcacggtatgtcaattggatcaaggaaaagacgaaactcacgtgataataggctggagcctcggtggccatgcttcttgccccttgggcctccccccagcccctcctccccttcctgcacccgtaccccccaaacaccattgtcacactccagtggtctttgaataaagtctgagtgggcggctctaga

SEQ ID NO: 2480 - DNA, 1571 bp, Artificial Sequence
  derived and/or modified sequence
gggaaataagagagaaaagaagagtaagaagaaatataagagccaccatgcagcgcgtcaacatgattatggccgaatcgccgggactcatcacaatctgcctcttgggttatctcttgtcggcagaatgtaccgtgttcttggatcacgaaaacgcgaacaaaattcttaatcgcccgaagcggtataactccgggaaacttgaggagtttgtgcagggcaatcttgaacgagagtgcatggaggagaaatgctcctttgaggaggcgagggaagtgtttgaaaacacagagcgaacaacggagttttggaagcaatacgtagatggggaccagtgtgagtcgaatccgtgcctcaatgggggatcatgtaaagatgacatcaatagctatgaatgctggtgcccgtttgggtttgaagggaagaactgtgagctggatgtgacgtgcaacatcaaaaacggacgctgtgagcagttttgtaagaactcggctgacaataaggtagtatgctcgtgcacagagggataccggctggcggagaaccaaaaatcgtgcgagcccgcagtcccgttcccttgtgggagggtgagcgtgtcacagactagcaagttgacgagagcggagactgtattccccgacgtggactacgtcaacagcaccgaagccgaaacaatcctcgataacatcacgcagagcactcagtccttcaatgactttacgagggtcgtaggtggtgaggacgcgaaacccggtcagttcccctggcaggtggtattgaacggaaaagtcgatgccttttgtggaggttccattgtcaacgagaagtggattgtcacagcggcacactgcgtagaaacaggagtgaaaatcacggtagtggcgggagagcataacattgaagagacagagcacacggaacaaaagcgaaatgtcatcagaatcattccacaccataactataacgcggcaatcaataagtacaatcacgacatcgcacttttggagcttgacgaacctttggtgcttaattcgtacgtcacccctatttgtattgccgacaaagagtatacaaacatcttcttgaaattcggctccgggtacgtatcgggctggggcagagtgttccataagggtagatccgcactggtgttgcaatacctcagggtgcccctcgtggatcgagccacttgtctgcggtccaccaaattcacaatctacaacaatatgttctgtgcgggattccatgaaggtgggagagatagctgccagggagactcagggggtccccacgtgacggaagtcgaggggacgtcatttctgacgggaattatctcatggggagaggaatgtgcgatgaaggggaaatatggcatctacactaaagtgtcacggtatgtcaattggatcaaggaaaagacgaaactcacgtgataataggctggagcctcggtggccatgcttcttgccccttgggcctccccccagcccctcctccccttcctgcacccgtaccccccaaacaccattgtcacactccagtggtctttgaataaagtctgagtgggcggc

SEQ ID NO: 2481 - DNA, 1579 bp, Artificial Sequence
  derived and/or modified sequence
taatacgactcactatagggaaataagagagaaaagaagagtaagaagaaatataagagccaccatgcagcgcgtcaacatgattatggccgaatcgccgggactcatcacaatctgcctcttgggttatctcttgtcggcagaatgtaccgtgttcttggatcacgaaaacgcgaacaaaattcttaatcgcccgaagcggtataactccgggaaacttgaggagtttgtgcagggcaatcttgaacgagagtgcatggaggagaaatgctcctttgaggaggcgagggaagtgtttgaaaacacagagcgaacaacggagttttggaagcaatacgtagatggggaccagtgtgagtcgaatccgtgcctcaatgggggatcatgtaaagatgacatcaatagctatgaatgctggtgcccgtttgggtttgaagggaagaactgtgagctggatgtgacgtgcaacatcaaaaacggacgctgtgagcagttttgtaagaactcggctgacaataaggtagtatgctcgtgcacagagggataccggctggcggagaaccaaaaatcgtgcgagcccgcagtcccgttcccttgtgggagggtgagcgtgtcacagactagcaagttgacgagagcggagactgtattccccgacgtggactacgtcaacagcaccgaagccgaaacaatcctcgataacatcacgcagagcactcagtccttcaatgactttacgagggtcgtaggtggtgaggacgcgaaacccggtcagttcccctggcaggtggtattgaacggaaaagtcgatgccttttgtggaggttccattgtcaacgagaagtggattgtcacagcggcacactgcgtagaaacaggagtgaaaatcacggtagtggcgggagagcataacattgaagagacagagcacacggaacaaaagcgaaatgtcatcagaatcattccacaccataactataacgcggcaatcaataagtacaatcacgacatcgcacttttggagcttgacgaacctttggtgcttaattcgtacgtcacccctatttgtattgccgacaaagagtatacaaacatcttcttgaaattcggctccgggtacgtatcgggctggggcagagtgttccataagggtagatccgcactggtgttgcaatacctcagggtgcccctcgtggatcgagccacttgtctgcggtccaccaaattcacaatctacaacaatatgttctgtgcgggattccatgaaggtgggagagatagctgccagggagactcagggggtccccacgtgacggaagtcgaggggacgtcatttctgacgggaattatctcatggggagaggaatgtgcgatgaaggggaaatatggcatctacactaaagtgtcacggtatgtcaattggatcaaggaaaagacgaaactcacgtgataataggctggagcctcggtggccatgcttcttgccccttgggcctccccccagcccctcctccccttcctgcacccgtacccccacactccgtggtctttgaataaagtctgagtgggcggctctaga

SEQ ID NO: 2482 - DNA, 1556 bp, Artificial Sequence
  derived and/or modified sequence
gggaaataagagagaaaagaagagtaagaagaaatataagagccaccatgcagcgcgtcaacatgattatggccgaatcgccgggactcatcacaatctgcctcttgggttatctcttgtcggcagaatgtaccgtgttcttggatcacgaaaacgcgaacaaaattcttaatcgcccgaagcggtataactccgggaaacttgaggagtttgtgcagggcaatcttgaacgagagtgcatggaggagaaatgctcctttgaggaggcgagggaagtgtttgaaaacacagagcgaacaacggagttttggaagcaatacgtagatggggaccagtgtgagtcgaatccgtgcctcaatgggggatcatgtaaagatgacatcaatagctatgaatgctggtgcccgtttgggtttgaagggaagaactgtgagctggatgtgacgtgcaacatcaaaaacggacgctgtgagcagttttgtaagaactcggctgacaataaggtagtatgctcgtgcacagagggataccggctggcggagaaccaaaaatcgtgcgagcccgcagtcccgttcccttgtgggagggtgagcgtgtcacagactagcaagttgacgagagcggagactgtattccccgacgtggactacgtcaacagcaccgaagccgaaacaatcctcgataacatcacgcagagcactcagtccttcaatgactttacgagggtcgtaggtggtgaggacgcgaaacccggtcagttcccctggcaggtggtattgaacggaaaagtcgatgccttttgtggaggttccattgtcaacgagaagtggattgtcacagcggcacactgcgtagaaacaggagtgaaaatcacggtagtggcgggagagcataacattgaagagacagagcacacggaacaaaagcgaaatgtcatcagaatcattccacaccataactataacgcggcaatcaataagtacaatcacgacatcgcacttttggagcttgacgaacctttggtgcttaattcgtacgtcacccctatttgtattgccgacaaagagtatacaaacatcttcttgaaattcggctccgggtacgtatcgggctggggcagagtgttccataagggtagatccgcactggtgttgcaatacctcagggtgcccctcgtggatcgagccacttgtctgcggtccaccaaattcacaatctacaacaatatgttctgtgcgggattccatgaaggtgggagagatagctgccagggagactcagggggtccccacgtgacggaagtcgaggggacgtcatttctgacgggaattatctcatggggagaggaatgtgcgatgaaggggaaatatggcatctacactaaagtgtcacggtatgtcaattggatcaaggaaaagacgaaactcacgtgataataggctggagcctcggtggccatgcttcttgccccttgggcctccccccagcccctcctccccttcctgcacccgtacccccacactccgtggtctttgaataaagtctgagtgggcggc

SEQ ID NO: 2483 - DNA, 1587 bp, Artificial Sequence
  derived and/or modified sequence
taatacgactcactatagggaaataagagagaaaagaagagtaagaagaaatataagagccaccatgcagcgcgtcaacatgattatggccgaatcgccgggactcatcacaatctgcctcttgggttatctcttgtcggcagaatgtaccgtgttcttggatcacgaaaacgcgaacaaaattcttaatcgcccgaagcggtataactccgggaaacttgaggagtttgtgcagggcaatcttgaacgagagtgcatggaggagaaatgctcctttgaggaggcgagggaagtgtttgaaaacacagagcgaacaacggagttttggaagcaatacgtagatggggaccagtgtgagtcgaatccgtgcctcaatgggggatcatgtaaagatgacatcaatagctatgaatgctggtgcccgtttgggtttgaagggaagaactgtgagctggatgtgacgtgcaacatcaaaaacggacgctgtgagcagttttgtaagaactcggctgacaataaggtagtatgctcgtgcacagagggataccggctggcggagaaccaaaaatcgtgcgagcccgcagtcccgttcccttgtgggagggtgagcgtgtcacagactagcaagttgacgagagcggagactgtattccccgacgtggactacgtcaacagcaccgaagccgaaacaatcctcgataacatcacgcagagcactcagtccttcaatgactttacgagggtcgtaggtggtgaggacgcgaaacccggtcagttcccctggcaggtggtattgaacggaaaagtcgatgccttttgtggaggttccattgtcaacgagaagtggattgtcacagcggcacactgcgtagaaacaggagtgaaaatcacggtagtggcgggagagcataacattgaagagacagagcacacggaacaaaagcgaaatgtcatcagaatcattccacaccataactataacgcggcaatcaataagtacaatcacgacatcgcacttttggagcttgacgaacctttggtgcttaattcgtacgtcacccctatttgtattgccgacaaagagtatacaaacatcttcttgaaattcggctccgggtacgtatcgggctggggcagagtgttccataagggtagatccgcactggtgttgcaatacctcagggtgcccctcgtggatcgagccacttgtctgcggtccaccaaattcacaatctacaacaatatgttctgtgcgggattccatgaaggtgggagagatagctgccagggagactcagggggtccccacgtgacggaagtcgaggggacgtcatttctgacgggaattatctcatggggagaggaatgtgcgatgaaggggaaatatggcatctacactaaagtgtcacggtatgtcaattggatcaaggaaaagacgaaactcacgtgataataggctggagcctcggtggccatgcttcttgccccttgggcctccccccagcccctcctccccttcctgcacccgtaccccccaaacaccattgtcagtggtctttgaataaagtctgagtgggcggctctaga

SEQ ID NO: 2484 - DNA, 1564 bp, Artificial Sequence
  derived and/or modified sequence
gggaaataagagagaaaagaagagtaagaagaaatataagagccaccatgcagcgcgtcaacatgattatggccgaatcgccgggactcatcacaatctgcctcttgggttatctcttgtcggcagaatgtaccgtgttcttggatcacgaaaacgcgaacaaaattcttaatcgcccgaagcggtataactccgggaaacttgaggagtttgtgcagggcaatcttgaacgagagtgcatggaggagaaatgctcctttgaggaggcgagggaagtgtttgaaaacacagagcgaacaacggagttttggaagcaatacgtagatggggaccagtgtgagtcgaatccgtgcctcaatgggggatcatgtaaagatgacatcaatagctatgaatgctggtgcccgtttgggtttgaagggaagaactgtgagctggatgtgacgtgcaacatcaaaaacggacgctgtgagcagttttgtaagaactcggctgacaataaggtagtatgctcgtgcacagagggataccggctggcggagaaccaaaaatcgtgcgagcccgcagtcccgttcccttgtgggagggtgagcgtgtcacagactagcaagttgacgagagcggagactgtattccccgacgtggactacgtcaacagcaccgaagccgaaacaatcctcgataacatcacgcagagcactcagtccttcaatgactttacgagggtcgtaggtggtgaggacgcgaaacccggtcagttcccctggcaggtggtattgaacggaaaagtcgatgccttttgtggaggttccattgtcaacgagaagtggattgtcacagcggcacactgcgtagaaacaggagtgaaaatcacggtagtggcgggagagcataacattgaagagacagagcacacggaacaaaagcgaaatgtcatcagaatcattccacaccataactataacgcggcaatcaataagtacaatcacgacatcgcacttttggagcttgacgaacctttggtgcttaattcgtacgtcacccctatttgtattgccgacaaagagtatacaaacatcttcttgaaattcggctccgggtacgtatcgggctggggcagagtgttccataagggtagatccgcactggtgttgcaatacctcagggtgcccctcgtggatcgagccacttgtctgcggtccaccaaattcacaatctacaacaatatgttctgtgcgggattccatgaaggtgggagagatagctgccagggagactcagggggtccccacgtgacggaagtcgaggggacgtcatttctgacgggaattatctcatggggagaggaatgtgcgatgaaggggaaatatggcatctacactaaagtgtcacggtatgtcaattggatcaaggaaaagacgaaactcacgtgataataggctggagcctcggtggccatgcttcttgccccttgggcctccccccagcccctcctccccttcctgcacccgtaccccccaaacaccattgtcagtggtctttgaataaagtctgagtgggcggc

SEQ ID NO: 2485 - DNA, 1596 bp, Artificial Sequence
  derived and/or modified sequence
taatacgactcactatagggaaataagagagaaaagaagagtaagaagaaatataagagccaccatgcagcgcgtcaacatgattatggccgaatcgccgggactcatcacaatctgcctcttgggttatctcttgtcggcagaatgtaccgtgttcttggatcacgaaaacgcgaacaaaattcttaatcgcccgaagcggtataactccgggaaacttgaggagtttgtgcagggcaatcttgaacgagagtgcatggaggagaaatgctcctttgaggaggcgagggaagtgtttgaaaacacagagcgaacaacggagttttggaagcaatacgtagatggggaccagtgtgagtcgaatccgtgcctcaatgggggatcatgtaaagatgacatcaatagctatgaatgctggtgcccgtttgggtttgaagggaagaactgtgagctggatgtgacgtgcaacatcaaaaacggacgctgtgagcagttttgtaagaactcggctgacaataaggtagtatgctcgtgcacagagggataccggctggcggagaaccaaaaatcgtgcgagcccgcagtcccgttcccttgtgggagggtgagcgtgtcacagactagcaagttgacgagagcggagactgtattccccgacgtggactacgtcaacagcaccgaagccgaaacaatcctcgataacatcacgcagagcactcagtccttcaatgactttacgagggtcgtaggtggtgaggacgcgaaacccggtcagttcccctggcaggtggtattgaacggaaaagtcgatgccttttgtggaggttccattgtcaacgagaagtggattgtcacagcggcacactgcgtagaaacaggagtgaaaatcacggtagtggcgggagagcataacattgaagagacagagcacacggaacaaaagcgaaatgtcatcagaatcattccacaccataactataacgcggcaatcaataagtacaatcacgacatcgcacttttggagcttgacgaacctttggtgcttaattcgtacgtcacccctatttgtattgccgacaaagagtatacaaacatcttcttgaaattcggctccgggtacgtatcgggctggggcagagtgttccataagggtagatccgcactggtgttgcaatacctcagggtgcccctcgtggatcgagccacttgtctgcggtccaccaaattcacaatctacaacaatatgttctgtgcgggattccatgaaggtgggagagatagctgccagggagactcagggggtccccacgtgacggaagtcgaggggacgtcatttctgacgggaattatctcatggggagaggaatgtgcgatgaaggggaaatatggcatctacactaaagtgtcacggtatgtcaattggatcaaggaaaagacgaaactcacgtgataataggctgccttctgcggggcttgccttctggccatgcccttcttctctcccttgcacctgtacctctcaaacaccattgtcacactccatggtctttgaataaagcctgagtaggaaggcggccgctcgagcatgcatctaga

SEQ ID NO: 2486 - DNA, 1554 bp, Artificial Sequence
  derived and/or modified sequence
gggaaataagagagaaaagaagagtaagaagaaatataagagccaccatgcagcgcgtcaacatgattatggccgaatcgccgggactcatcacaatctgcctcttgggttatctcttgtcggcagaatgtaccgtgttcttggatcacgaaaacgcgaacaaaattcttaatcgcccgaagcggtataactccgggaaacttgaggagtttgtgcagggcaatcttgaacgagagtgcatggaggagaaatgctcctttgaggaggcgagggaagtgtttgaaaacacagagcgaacaacggagttttggaagcaatacgtagatggggaccagtgtgagtcgaatccgtgcctcaatgggggatcatgtaaagatgacatcaatagctatgaatgctggtgcccgtttgggtttgaagggaagaactgtgagctggatgtgacgtgcaacatcaaaaacggacgctgtgagcagttttgtaagaactcggctgacaataaggtagtatgctcgtgcacagagggataccggctggcggagaaccaaaaatcgtgcgagcccgcagtcccgttcccttgtgggagggtgagcgtgtcacagactagcaagttgacgagagcggagactgtattccccgacgtggactacgtcaacagcaccgaagccgaaacaatcctcgataacatcacgcagagcactcagtccttcaatgactttacgagggtcgtaggtggtgaggacgcgaaacccggtcagttcccctggcaggtggtattgaacggaaaagtcgatgccttttgtggaggttccattgtcaacgagaagtggattgtcacagcggcacactgcgtagaaacaggagtgaaaatcacggtagtggcgggagagcataacattgaagagacagagcacacggaacaaaagcgaaatgtcatcagaatcattccacaccataactataacgcggcaatcaataagtacaatcacgacatcgcacttttggagcttgacgaacctttggtgcttaattcgtacgtcacccctatttgtattgccgacaaagagtatacaaacatcttcttgaaattcggctccgggtacgtatcgggctggggcagagtgttccataagggtagatccgcactggtgttgcaatacctcagggtgcccctcgtggatcgagccacttgtctgcggtccaccaaattcacaatctacaacaatatgttctgtgcgggattccatgaaggtgggagagatagctgccagggagactcagggggtccccacgtgacggaagtcgaggggacgtcatttctgacgggaattatctcatggggagaggaatgtgcgatgaaggggaaatatggcatctacactaaagtgtcacggtatgtcaattggatcaaggaaaagacgaaactcacgtgataataggctgccttctgcggggcttgccttctggccatgcccttcttctctcccttgcacctgtacctctcaaacaccattgtcacactccatggtctttgaataaagcctgagtaggaag

SEQ ID NO: 2487 - DNA, 1581 bp, Artificial Sequence
  derived and/or modified sequence
taatacgactcactatagggaaataagagagaaaagaagagtaagaagaaatataagagccaccatgcagcgcgtcaacatgattatggccgaatcgccgggactcatcacaatctgcctcttgggttatctcttgtcggcagaatgtaccgtgttcttggatcacgaaaacgcgaacaaaattcttaatcgcccgaagcggtataactccgggaaacttgaggagtttgtgcagggcaatcttgaacgagagtgcatggaggagaaatgctcctttgaggaggcgagggaagtgtttgaaaacacagagcgaacaacggagttttggaagcaatacgtagatggggaccagtgtgagtcgaatccgtgcctcaatgggggatcatgtaaagatgacatcaatagctatgaatgctggtgcccgtttgggtttgaagggaagaactgtgagctggatgtgacgtgcaacatcaaaaacggacgctgtgagcagttttgtaagaactcggctgacaataaggtagtatgctcgtgcacagagggataccggctggcggagaaccaaaaatcgtgcgagcccgcagtcccgttcccttgtgggagggtgagcgtgtcacagactagcaagttgacgagagcggagactgtattccccgacgtggactacgtcaacagcaccgaagccgaaacaatcctcgataacatcacgcagagcactcagtccttcaatgactttacgagggtcgtaggtggtgaggacgcgaaacccggtcagttcccctggcaggtggtattgaacggaaaagtcgatgccttttgtggaggttccattgtcaacgagaagtggattgtcacagcggcacactgcgtagaaacaggagtgaaaatcacggtagtggcgggagagcataacattgaagagacagagcacacggaacaaaagcgaaatgtcatcagaatcattccacaccataactataacgcggcaatcaataagtacaatcacgacatcgcacttttggagcttgacgaacctttggtgcttaattcgtacgtcacccctatttgtattgccgacaaagagtatacaaacatcttcttgaaattcggctccgggtacgtatcgggctggggcagagtgttccataagggtagatccgcactggtgttgcaatacctcagggtgcccctcgtggatcgagccacttgtctgcggtccaccaaattcacaatctacaacaatatgttctgtgcgggattccatgaaggtgggagagatagctgccagggagactcagggggtccccacgtgacggaagtcgaggggacgtcatttctgacgggaattatctcatggggagaggaatgtgcgatgaaggggaaatatggcatctacactaaagtgtcacggtatgtcaattggatcaaggaaaagacgaaactcacgtgataataggctgccttctgcggggcttgccttctggccatgcccttcttctctcccttgcacctgtacctctacactcctggtctttgaataaagcctgagtaggaaggcggccgctcgagcatgcatctaga

SEQ ID NO: 2488 - DNA, 1539 bp, Artificial Sequence
  derived and/or modified sequence
gggaaataagagagaaaagaagagtaagaagaaatataagagccaccatgcagcgcgtcaacatgattatggccgaatcgccgggactcatcacaatctgcctcttgggttatctcttgtcggcagaatgtaccgtgttcttggatcacgaaaacgcgaacaaaattcttaatcgcccgaagcggtataactccgggaaacttgaggagtttgtgcagggcaatcttgaacgagagtgcatggaggagaaatgctcctttgaggaggcgagggaagtgtttgaaaacacagagcgaacaacggagttttggaagcaatacgtagatggggaccagtgtgagtcgaatccgtgcctcaatgggggatcatgtaaagatgacatcaatagctatgaatgctggtgcccgtttgggtttgaagggaagaactgtgagctggatgtgacgtgcaacatcaaaaacggacgctgtgagcagttttgtaagaactcggctgacaataaggtagtatgctcgtgcacagagggataccggctggcggagaaccaaaaatcgtgcgagcccgcagtcccgttcccttgtgggagggtgagcgtgtcacagactagcaagttgacgagagcggagactgtattccccgacgtggactacgtcaacagcaccgaagccgaaacaatcctcgataacatcacgcagagcactcagtccttcaatgactttacgagggtcgtaggtggtgaggacgcgaaacccggtcagttcccctggcaggtggtattgaacggaaaagtcgatgccttttgtggaggttccattgtcaacgagaagtggattgtcacagcggcacactgcgtagaaacaggagtgaaaatcacggtagtggcgggagagcataacattgaagagacagagcacacggaacaaaagcgaaatgtcatcagaatcattccacaccataactataacgcggcaatcaataagtacaatcacgacatcgcacttttggagcttgacgaacctttggtgcttaattcgtacgtcacccctatttgtattgccgacaaagagtatacaaacatcttcttgaaattcggctccgggtacgtatcgggctggggcagagtgttccataagggtagatccgcactggtgttgcaatacctcagggtgcccctcgtggatcgagccacttgtctgcggtccaccaaattcacaatctacaacaatatgttctgtgcgggattccatgaaggtgggagagatagctgccagggagactcagggggtccccacgtgacggaagtcgaggggacgtcatttctgacgggaattatctcatggggagaggaatgtgcgatgaaggggaaatatggcatctacactaaagtgtcacggtatgtcaattggatcaaggaaaagacgaaactcacgtgataataggctgccttctgcggggcttgccttctggccatgcccttcttctctcccttgcacctgtacctctacactcctggtctttgaataaagcctgagtaggaag

SEQ ID NO: 2489 - DNA, 1589 bp, Artificial Sequence
  derived and/or modified sequence
taatacgactcactatagggaaataagagagaaaagaagagtaagaagaaatataagagccaccatgcagcgcgtcaacatgattatggccgaatcgccgggactcatcacaatctgcctcttgggttatctcttgtcggcagaatgtaccgtgttcttggatcacgaaaacgcgaacaaaattcttaatcgcccgaagcggtataactccgggaaacttgaggagtttgtgcagggcaatcttgaacgagagtgcatggaggagaaatgctcctttgaggaggcgagggaagtgtttgaaaacacagagcgaacaacggagttttggaagcaatacgtagatggggaccagtgtgagtcgaatccgtgcctcaatgggggatcatgtaaagatgacatcaatagctatgaatgctggtgcccgtttgggtttgaagggaagaactgtgagctggatgtgacgtgcaacatcaaaaacggacgctgtgagcagttttgtaagaactcggctgacaataaggtagtatgctcgtgcacagagggataccggctggcggagaaccaaaaatcgtgcgagcccgcagtcccgttcccttgtgggagggtgagcgtgtcacagactagcaagttgacgagagcggagactgtattccccgacgtggactacgtcaacagcaccgaagccgaaacaatcctcgataacatcacgcagagcactcagtccttcaatgactttacgagggtcgtaggtggtgaggacgcgaaacccggtcagttcccctggcaggtggtattgaacggaaaagtcgatgccttttgtggaggttccattgtcaacgagaagtggattgtcacagcggcacactgcgtagaaacaggagtgaaaatcacggtagtggcgggagagcataacattgaagagacagagcacacggaacaaaagcgaaatgtcatcagaatcattccacaccataactataacgcggcaatcaataagtacaatcacgacatcgcacttttggagcttgacgaacctttggtgcttaattcgtacgtcacccctatttgtattgccgacaaagagtatacaaacatcttcttgaaattcggctccgggtacgtatcgggctggggcagagtgttccataagggtagatccgcactggtgttgcaatacctcagggtgcccctcgtggatcgagccacttgtctgcggtccaccaaattcacaatctacaacaatatgttctgtgcgggattccatgaaggtgggagagatagctgccagggagactcagggggtccccacgtgacggaagtcgaggggacgtcatttctgacgggaattatctcatggggagaggaatgtgcgatgaaggggaaatatggcatctacactaaagtgtcacggtatgtcaattggatcaaggaaaagacgaaactcacgtgataataggctgccttctgcggggcttgccttctggccatgcccttcttctctcccttgcacctgtacctctcaaacaccattgtcatggtctttgaataaagcctgagtaggaaggcggccgctcgagcatgcatctaga

SEQ ID NO: 2490 - DNA, 1547 bp, Artificial Sequence
  derived and/or modified sequence
gggaaataagagagaaaagaagagtaagaagaaatataagagccaccatgcagcgcgtcaacatgattatggccgaatcgccgggactcatcacaatctgcctcttgggttatctcttgtcggcagaatgtaccgtgttcttggatcacgaaaacgcgaacaaaattcttaatcgcccgaagcggtataactccgggaaacttgaggagtttgtgcagggcaatcttgaacgagagtgcatggaggagaaatgctcctttgaggaggcgagggaagtgtttgaaaacacagagcgaacaacggagttttggaagcaatacgtagatggggaccagtgtgagtcgaatccgtgcctcaatgggggatcatgtaaagatgacatcaatagctatgaatgctggtgcccgtttgggtttgaagggaagaactgtgagctggatgtgacgtgcaacatcaaaaacggacgctgtgagcagttttgtaagaactcggctgacaataaggtagtatgctcgtgcacagagggataccggctggcggagaaccaaaaatcgtgcgagcccgcagtcccgttcccttgtgggagggtgagcgtgtcacagactagcaagttgacgagagcggagactgtattccccgacgtggactacgtcaacagcaccgaagccgaaacaatcctcgataacatcacgcagagcactcagtccttcaatgactttacgagggtcgtaggtggtgaggacgcgaaacccggtcagttcccctggcaggtggtattgaacggaaaagtcgatgccttttgtggaggttccattgtcaacgagaagtggattgtcacagcggcacactgcgtagaaacaggagtgaaaatcacggtagtggcgggagagcataacattgaagagacagagcacacggaacaaaagcgaaatgtcatcagaatcattccacaccataactataacgcggcaatcaataagtacaatcacgacatcgcacttttggagcttgacgaacctttggtgcttaattcgtacgtcacccctatttgtattgccgacaaagagtatacaaacatcttcttgaaattcggctccgggtacgtatcgggctggggcagagtgttccataagggtagatccgcactggtgttgcaatacctcagggtgcccctcgtggatcgagccacttgtctgcggtccaccaaattcacaatctacaacaatatgttctgtgcgggattccatgaaggtgggagagatagctgccagggagactcagggggtccccacgtgacggaagtcgaggggacgtcatttctgacgggaattatctcatggggagaggaatgtgcgatgaaggggaaatatggcatctacactaaagtgtcacggtatgtcaattggatcaaggaaaagacgaaactcacgtgataataggctgccttctgcggggcttgccttctggccatgcccttcttctctcccttgcacctgtacctctcaaacaccattgtcatggtctttgaataaagcctgagtaggaag

SEQ ID NO: 2491 - DNA, 1549 bp, Artificial Sequence
  derived and/or modified sequence
gggaaataagagagaaaagaagagtaagaagaaatataagagccaccatgcagcgcgtcaacatgattatggccgaatcgccgggactcatcacaatctgcctcttgggttatctcttgtcggcagaatgtaccgtgttcttggatcacgaaaacgcgaacaaaattcttaatcgcccgaagcggtataactccgggaaacttgaggagtttgtgcagggcaatcttgaacgagagtgcatggaggagaaatgctcctttgaggaggcgagggaagtgtttgaaaacacagagcgaacaacggagttttggaagcaatacgtagatggggaccagtgtgagtcgaatccgtgcctcaatgggggatcatgtaaagatgacatcaatagctatgaatgctggtgcccgtttgggtttgaagggaagaactgtgagctggatgtgacgtgcaacatcaaaaacggacgctgtgagcagttttgtaagaactcggctgacaataaggtagtatgctcgtgcacagagggataccggctggcggagaaccaaaaatcgtgcgagcccgcagtcccgttcccttgtgggagggtgagcgtgtcacagactagcaagttgacgagagcggagactgtattccccgacgtggactacgtcaacagcaccgaagccgaaacaatcctcgataacatcacgcagagcactcagtccttcaatgactttacgagggtcgtaggtggtgaggacgcgaaacccggtcagttcccctggcaggtggtattgaacggaaaagtcgatgccttttgtggaggttccattgtcaacgagaagtggattgtcacagcggcacactgcgtagaaacaggagtgaaaatcacggtagtggcgggagagcataacattgaagagacagagcacacggaacaaaagcgaaatgtcatcagaatcattccacaccataactataacgcggcaatcaataagtacaatcacgacatcgcacttttggagcttgacgaacctttggtgcttaattcgtacgtcacccctatttgtattgccgacaaagagtatacaaacatcttcttgaaattcggctccgggtacgtatcgggctggggcagagtgttccataagggtagatccgcactggtgttgcaatacctcagggtgcccctcgtggatcgagccacttgtctgcggtccaccaaattcacaatctacaacaatatgttctgtgcgggattccatgaaggtgggagagatagctgccagggagactcagggggtccccacgtgacggaagtcgaggggacgtcatttctgacgggaattatctcatggggagaggaatgtgcgatgaaggggaaatatggcatctacactaaagtgtcacggtatgtcaattggatcaaggaaaagacgaaactcacgtgataataggctggagcctcggtggccatgcttcttgccccttgggcctccccccagcccctcctccccttcctgcacccgtacccccgtggtctttgaataaagtctgagtgggcggc

SEQ ID NO: 2492 - DNA, 1532 bp, Artificial Sequence
  derived and/or modified sequence
gggaaataagagagaaaagaagagtaagaagaaatataagagccaccatgcagcgcgtcaacatgattatggccgaatcgccgggactcatcacaatctgcctcttgggttatctcttgtcggcagaatgtaccgtgttcttggatcacgaaaacgcgaacaaaattcttaatcgcccgaagcggtataactccgggaaacttgaggagtttgtgcagggcaatcttgaacgagagtgcatggaggagaaatgctcctttgaggaggcgagggaagtgtttgaaaacacagagcgaacaacggagttttggaagcaatacgtagatggggaccagtgtgagtcgaatccgtgcctcaatgggggatcatgtaaagatgacatcaatagctatgaatgctggtgcccgtttgggtttgaagggaagaactgtgagctggatgtgacgtgcaacatcaaaaacggacgctgtgagcagttttgtaagaactcggctgacaataaggtagtatgctcgtgcacagagggataccggctggcggagaaccaaaaatcgtgcgagcccgcagtcccgttcccttgtgggagggtgagcgtgtcacagactagcaagttgacgagagcggagactgtattccccgacgtggactacgtcaacagcaccgaagccgaaacaatcctcgataacatcacgcagagcactcagtccttcaatgactttacgagggtcgtaggtggtgaggacgcgaaacccggtcagttcccctggcaggtggtattgaacggaaaagtcgatgccttttgtggaggttccattgtcaacgagaagtggattgtcacagcggcacactgcgtagaaacaggagtgaaaatcacggtagtggcgggagagcataacattgaagagacagagcacacggaacaaaagcgaaatgtcatcagaatcattccacaccataactataacgcggcaatcaataagtacaatcacgacatcgcacttttggagcttgacgaacctttggtgcttaattcgtacgtcacccctatttgtattgccgacaaagagtatacaaacatcttcttgaaattcggctccgggtacgtatcgggctggggcagagtgttccataagggtagatccgcactggtgttgcaatacctcagggtgcccctcgtggatcgagccacttgtctgcggtccaccaaattcacaatctacaacaatatgttctgtgcgggattccatgaaggtgggagagatagctgccagggagactcagggggtccccacgtgacggaagtcgaggggacgtcatttctgacgggaattatctcatggggagaggaatgtgcgatgaaggggaaatatggcatctacactaaagtgtcacggtatgtcaattggatcaaggaaaagacgaaactcacgtgataataggctgccttctgcggggcttgccttctggccatgcccttcttctctcccttgcacctgtacctcttggtctttgaataaagcctgagtaggaag

SEQ ID NO: 2493 - DNA, 1383 bp, Artificial Sequence
  derived and/or modified sequence
atgcagcgcgtgaacatgatcatggccgagagccccggcctgatcaccatctgcctgctgggctacctgctgagcgccgagtgcaccgtgttcctggaccacgagaacgccaacaagatcctgaaccgccccaagcgctacaacagcggcaagctggaggagttcgtgcagggcaacctggagcgcgagtgcatggaggagaagtgcagcttcgaggaggcccgcgaggtgttcgagaacaccgagcgcaccaccgagttctggaagcagtacgtggacggcgaccagtgcgagagcaacccctgcctgaacggcggcagctgcaaggacgacatcaacagctacgagtgctggtgccccttcggcttcgagggcaagaactgcgagctggacgtgacctgcaacatcaagaacggccgctgcgagcagttctgcaagaacagcgccgacaacaaggtggtgtgcagctgcaccgagggctaccgcctggccgagaaccagaagagctgcgagcccgccgtgcccttcccctgcggccgcgtgagcgtgagccagaccagcaagctgacccgcgccgagaccgtgttccccgacgtggactacgtgaacagcaccgaggccgagaccatcctggacaacatcacccagagcacccagagcttcaacgacttcacccgcgtggtgggcggcgaggacgccaagcccggccagttcccctggcaggtggtgctgaacggcaaggtggacgccttctgcggcggcagcatcgtgaacgagaagtggatcgtgaccgccgcccactgcgtggagaccggcgtgaagatcaccgtggtggccggcgagcacaacatcgaggagaccgagcacaccgagcagaagcgcaacgtgatccgcatcatcccccaccacaactacaacgccgccatcaacaagtacaaccacgacatcgccctgctggagctggacgagcccctggtgctgaacagctacgtgacccccatctgcatcgccgacaaggagtacaccaacatcttcctgaagttcggcagcggctacgtgagcggctggggccgcgtgttccacaagggccgcagcgccctggtgctgcagtacctgcgcgtgcccctggtggaccgcgccacctgcctgcgcagcaccaagttcaccatctacaacaacatgttctgcgccggcttccacgagggcggccgcgacagctgccagggcgacagcggcggcccccacgtgaccgaggtggagggcaccagcttcctgaccggcatcatcagctggggcgaggagtgcgccatgaagggcaagtacggcatctacaccaaggtgagccgctacgtgaactggatcaaggagaagaccaagctgacc

SEQ ID NO: 2494 - DNA, 2780 bp, Artificial Sequence
  derived and/or modified sequence
aaaggttatgcagcgcgtgaacatgatcatggcagaatcaccaggcctcatcaccatctgccttttaggatatctactcagtgctgaatgtacagtttttcttgatcatgaaaacgccaacaaaattctgaatcggccaaagaggtataattcaggtaaattggaagagtttgttcaagggaaccttgagagagaatgtatggaagaaaagtgtagttttgaagaagcacgagaagtttttgaaaacactgaaagaacaactgaattttggaagcagtatgttgatggagatcagtgtgagtccaatccatgtttaaatggcggcagttgcaaggatgacattaattcctatgaatgttggtgtccctttggatttgaaggaaagaactgtgaattagatgtaacatgtaacattaagaatggcagatgcgagcagttttgtaaaaatagtgctgataacaaggtggtttgctcctgtactgagggatatcgacttgcagaaaaccagaagtcctgtgaaccagcagtgccatttccatgtggaagagtttctgtttcacaaacttctaagctcacccgtgctgagactgtttttcctgatgtggactatgtaaattctactgaagctgaaaccattttggataacatcactcaaagcacccaatcatttaatgacttcactcgggttgttggtggagaagatgccaaaccaggtcaattcccttggcaggttgttttgaatggtaaagttgatgcattctgtggaggctctatcgttaatgaaaaatggattgtaactgctgcccactgtgttgaaactggtgttaaaattacagttgtcgcaggtgaacataatattgaggagacagaacatacagagcaaaagcgaaatgtgattcgaattattcctcaccacaactacaatgcagctattaataagtacaaccatgacattgcccttctggaactggacgaacccttagtgctaaacagctacgttacacctatttgcattgctgacaaggaatacacgaacatcttcctcaaatttggatctggctatgtaagtggctggggaagagtcttccacaaagggagatcagctttagttcttcagtaccttagagttccacttgttgaccgagccacatgtcttcgatctacaaagttcaccatctataacaacatgttctgtgctggcttccatgaaggaggtagagattcatgtcaaggagatagtgggggaccccatgttactgaagtggaagggaccagtttcttaactggaattattagctggggtgaagagtgtgcaatgaaaggcaaatatggaatatataccaaggtatcccggtatgtcaactggattaaggaaaaaacaaagctcacttaatgaaagatggatttccaaggttaattcattggaattgaaaattaacagggcctctcactaactaatcactttcccatcttttgttagatttgaatatatacattctatgatcattgctttttctctttacaggggagaatttcatattttacctgagcaaattgattagaaaatggaaccactagaggaatataatgtgttaggaaattacagtcatttctaagggcccagcccttgacaaaattgtgaagttaaattctccactctgtccatcagatactatggttctccactatggcaactaactcactcaattttccctccttagcagcattccatcttcccgatcttctttgcttctccaaccaaaacatcaatgtttattagttctgtatacagtacaggatctttggtctactctatcacaaggccagtaccacactcatgaagaaagaacacaggagtagctgagaggctaaaactcatcaaaaacactactccttttcctctaccctattcctcaatcttttaccttttccaaatcccaatccccaaatcagtttttctctttcttactccctctctcccttttaccctccatggtcgttaaaggagagatggggagcatcattctgttatacttctgtacacagttatacatgtctatcaaacccagacttgcttccgtagtggagacttgcttttcagaacatagggatgaagtaaggtgcctgaaaagtttgggggaaaagtttctttcagagagttaagttattttatatatataatatatatataaaatatataatatacaatataaatatatagtgtgtgtgtatgcgtgtgtgtagacacacacgcatacacacatataatggaagcaataagccattctaagagcttgtatggttatggaggtctgactaggcatgatttcacgaaggcaagattggcatatcattgtaactaaaaaagctgacattgacccagacatattgtactctttctaaaaataataataataatgctaacagaaagaagagaaccgttcgtttgcaatctacagctagtagagactttgaggaagaattcaacagtgtgtcttcagcagtgttcagagccaagcaagaagttgaagttgcctagaccagaggacataagtatcatgtctcctttaactagcataccccgaagtggagaagggtgcagcaggctcaaaggcataagtcattccaatcagccaactaagttgtccttttctggtttcgtgttcaccatggaacattttgattatagttaatccttctatcttgaatcttctagagagttgctgaccaactgacgtatgtttccctttgtgaattaataaactggtgttctggttcat

SEQ ID NO: 2495 - DNA, 1383 bp, Artificial Sequence
  derived and/or modified sequence
atgcagagagtgaacatgatcatggccgagtcacccggcctgattaccatatgtctactagggtacctcttgagtgcggagtgcaccgtattcctggatcatgagaatgccaataagatccttaatagaccaaaaaggtacaattcgggcaagctggaggagttcgttcaggggaacctggagagggagtgtatggaagaaaagtgtagtttcgaagaggcccgggaagttttcgagaataccgaaaggactactgaattttggaaacagtacgtggatggcgaccaatgcgagtctaacccttgcctgaatgggggtagctgtaaggacgacataaattcatatgagtgttggtgtccctttggcttcgaaggcaagaactgcgagctggatgtgacatgcaacattaagaacggcaggtgtgagcagttttgtaagaattccgcagataacaaagtggtatgcagctgcacggaaggataccgactcgctgagaatcaaaaatcttgtgaacctgcagttcctttcccgtgcggacgggtgagcgtctcccagacctctaaacttactcgagctgaaacagtgttcccggacgtggattatgtcaacagtacagaggctgagacaatactcgacaacatcacacagagcacccagagctttaacgattttacaagagttgttggcggagaagatgccaaacctgggcaattcccgtggcaggtggtgctgaacggtaaagtggatgctttctgcggcggctcgattgtcaatgagaagtggatcgtgacagccgctcattgcgtggaaactggcgtgaagattactgtggtggcgggtgagcacaacattgaggaaacagagcacacagagcaaaagcgcaatgtgattcgcataattccacatcataattacaacgctgccatcaataaatataatcacgacattgcactgctcgagctggacgagccccttgtgttgaattcatatgtcactccaatctgtatagccgacaaggaatatacaaacatctttctcaagtttggctcgggttacgtatcaggttgggggcgggtcttccataagggaaggagcgcacttgtgctacagtacttacgtgttcccctggttgaccgcgccacctgcctccgatccaccaaatttactatatacaacaatatgttttgcgctggtttccatgagggtgggcgcgactcctgccagggtgattccgggggtccccatgtcacagaagtggaggggacctcctttttgacggggatcatatcctggggagaggaatgcgcaatgaagggcaaatacggtatatatactaaggtgtcccggtacgtgaattggatcaaagaaaaaaccaaactgaca

SEQ ID NO: 2496 - DNA, 1383 bp, Artificial Sequence
  derived and/or modified sequence
atgcaacgcgtgaacatgattatggcagaaagcccgggcctcattacgatttgcctgctgggatacctgttgtcggcagaatgtactgtgttcctggatcacgaaaatgccaacaagatcttgaaccgccccaaacggtacaactcaggtaagctcgaagagtttgtccagggcaacctggaaagggagtgcatggaggaaaaatgttcgtttgaggaagcacgggaagtgttcgagaacaccgaacgcaccactgaattttggaagcaatatgtggacggggatcagtgcgagtcaaatccttgcctgaacgggggctcctgcaaggacgacattaactcctatgaatgctggtgtccgtttggattcgaaggaaagaactgcgaactcgacgtgacttgcaatatcaaaaatggacgctgcgaacagttttgtaagaattcagccgacaacaaggtggtgtgctcgtgcactgagggctaccggctcgccgagaatcagaaatcgtgtgagcccgctgtgccgttcccatgcggccgcgtgagcgtgagccagacgagcaaactgacccgcgctgaaaccgttttcccggatgtggactacgtgaacagcacggaagcagaaaccattctggacaacatcacgcaatcaactcaatccttcaatgatttcactcgcgttgtcggaggggaagatgcaaagccgggtcaattcccatggcaggtcgtcttgaacggaaaagtcgatgccttctgcggaggatccatcgtcaacgagaagtggatcgtgaccgcagcgcattgcgtggaaaccggagtgaagatcaccgtggtcgcaggagaacacaacatcgaggaaactgagcatactgagcaaaagcggaatgtgattagaattatcccacaccacaactacaacgcagcgatcaataagtacaatcatgatatcgctctgttggaactcgacgagccgctggtgctcaatagctatgtcactcccatctgcatcgcggacaaagagtacactaacatcttcctgaagttcggatccggatacgtctccggatggggaagagtctttcataaaggaagatcggcacttgtcttgcaatacctccgggtgccgttggtcgaccgcgctacttgcctgcggtcgactaagttcactatctacaacaatatgttctgcgcgggattccatgagggcggacgcgattcgtgccagggtgactccggaggcccccatgtgaccgaagtggagggcaccagctttctcaccggtatcatctcgtggggggaagagtgtgcgatgaagggaaagtacggaatctacacgaaagtctcccggtacgtgaattggatcaaggaaaagactaagctcacc

SEQ ID NO: 2497 - DNA, 1383 bp, Artificial Sequence
  derived and/or modified sequence
atgcaaagagtgaacatgatcatggccgagtcccctgggttgatcactatctgtttattagggtacctgctgtccgcggaatgtacggtatttcttgatcacgagaacgcgaacaagattctgaatcgacctaagcggtacaactccggaaaattagaggagtttgtgcagggaaaccttgagagagaatgcatggaagagaaatgctcattcgaggaagcccgggaggtgtttgagaataccgagcgtaccaccgagttctggaaacagtacgttgacggtgaccagtgcgagtctaatccttgtctgaatggaggttcatgcaaggacgacatcaattcttacgaatgctggtgcccattcggatttgagggcaaaaactgcgaactcgatgttacatgtaatattaaaaacggtcgctgcgagcagttctgtaagaacagcgccgataataaggtggtatgtagctgcaccgaagggtatcgtctggctgaaaatcaaaagtcttgcgagccggctgtgccattcccctgcggacgcgtgtctgtttctcagacctccaagctaaccagggccgaaacggtttttccggatgtggactatgtgaactccaccgaagccgagacaatcctggacaacatcactcaatcaacacagtcattcaacgacttcaccagagtcgtaggcggcgaagatgccaagcccggccagtttccttggcaggtggtcctcaatggtaaggtcgacgcattctgcggggggagcatcgtcaacgagaagtggatagtcacggctgctcactgcgtcgagacaggagttaaaataaccgttgttgctggtgaacacaacatcgaagagaccgaacacacagagcagaaacgcaatgttataaggattatcccccatcacaattacaatgcagcaattaacaaatacaaccacgatatcgccctgttggaactcgacgagcccctagttctcaattcttacgtgactcctatttgcattgcagataaggaatacactaacatttttctgaagtttggcagcggatacgtttccggatgggggcgggtcttccataagggacggtctgccttagtgctccaatacctgcgggtacccctggtggatcgtgctacttgcctccggagcacaaagttcaccatctataacaatatgttttgtgcgggctttcacgagggcggacgagatagctgccagggggacagtggcggccctcatgtgacagaggtcgagggtacatctttcctaactggaatcatatcatggggagaagagtgcgccatgaagggtaagtacggtatatatacaaaggtctcccggtatgtcaactggattaaggaaaaaaccaagctcaca

SEQ ID NO: 2498 - DNA, 1383 bp, Artificial Sequence
  derived and/or modified sequence
atgcagagagtgaatatgattatggcagagagcccaggacttatcactatctgcctcctgggttacctcctgtccgcagagtgtactgtgtttctggaccacgaaaacgctaataagattcttaatcgccctaagcgatacaatagcggcaaactggaagagtttgtccagggaaatcttgaacgtgaatgtatggaggaaaagtgctcgttcgaggaagcacgagaggtgtttgaaaatactgaaagaactactgaattctggaagcagtacgtcgatggtgatcaatgtgaatcgaacccatgtctgaacggtgggtcatgtaaggacgacatcaattcttacgaatgttggtgtccatttggatttgaaggaaagaactgtgaactcgatgtgacttgtaacattaagaacggacggtgtgaacagttttgtaagaactcggcggataacaaggtcgtgtgtagctgcaccgaaggttaccgcctggcagagaaccagaagtcgtgtgaacctgcggtcccttttccctgtggcagggtttctgtctcgcagacctcaaagctgactcgggcagagactgtgttccctgatgtggattacgtgaatagcactgaagccgaaaccattcttgataacattacccaatcgacgcagtcgtttaacgattttacccgcgtggtggggggcgaagatgccaaaccgggccaatttccttggcaagtggtgctgaatgggaaggtggatgcattctgcggcgggagcattgtgaacgaaaagtggattgtgacggcggcacactgtgtggagactggcgtgaaaatcaccgtggtcgcaggggagcataacattgaagagacggaacataccgagcagaagcggaacgtcataaggataattcctcatcacaactacaacgcagcaattaacaagtacaaccacgacatagcgctgctggaactcgatgaacctctggtgcttaattcgtatgtgactcctatatgcatcgccgataaggaatacaccaacatattcctgaagtttggctcaggctacgtgtcgggctggggaagagtgttccataaaggaaggtccgcactcgtgcttcagtacctcagagtgccactggtggatcgggcaacgtgcctcagatcaactaagtttactatttacaacaacatgttttgcgccggcttccacgaaggaggaagggatagctgtcagggagactccggtgggcctcatgtcactgaagtcgaaggaacctcattccttaccggaatcattagctggggagaagaatgtgcaatgaagggcaagtacggtatttacaccaaagtgtcaaggtacgtgaattggattaaggaaaaaactaaacttacc

SEQ ID NO: 2499 - DNA, 1383 bp, Artificial Sequence
  derived and/or modified sequence
atgcagagagtgaacatgatcatggctgaatcgccgggactgatcaccatctgtctgcttggatacctcctgtccgcggaatgtactgtgttcctggaccacgagaatgcaaacaagatcctcaataggcccaaacggtacaatagcggaaaacttgaggaattcgtgcagggaaatctggaaagggagtgcatggaagagaagtgctcatttgaagaggcgcgagaagtgtttgagaacacggagagaactacggagttttggaagcagtacgtggatggcgatcagtgcgagtcaaacccgtgtttgaatgggggaagctgcaaggacgacattaactcatacgagtgctggtgtcccttcggattcgagggaaaaaactgcgaactggatgtcacgtgcaatatcaaaaacgggagatgtgaacaattctgcaagaactcagctgataacaaggtggtgtgctcatgcaccgagggctaccgcctggcagaaaaccaaaagtcgtgtgagccagccgtgccttttccgtgtggacgtgtgtcggtgtcccagacctcgaaactcacccgcgctgagactgtctttccggacgtggattacgtgaattccactgaggcagagactatcctggacaacataactcagtcgactcagtccttcaacgacttcaccagagtcgtgggaggggaagatgcaaaaccgggtcaattcccgtggcaggtggtgctcaatggaaaggttgacgccttctgtggaggaagcatcgtcaacgaaaaatggattgtgaccgcggcgcactgcgtggagactggagtgaaaatcactgtggtggccggagagcacaacattgaagaaactgagcataccgaacaaaagaggaacgtgatccggattatccctcatcacaactacaatgcggccattaacaagtacaatcacgacatcgccctgttggaactcgacgaaccgcttgtgctgaactcatacgtgaccccaatctgtattgcagataaggaatacaccaacatattcctgaagttcggctccggatatgtctccggatggggtcgtgtgttccacaagggaagatcagccctggttctccagtacctgagagtgccactcgtggaccgggcgacttgcctccgctcgacgaagtttactatctacaacaacatgttttgcgccggattccacgagggcgggcgggattcctgccagggagactcgggagggccgcatgtgaccgaggtcgaaggaacctccttcctgactggaatcatctcctggggggaagaatgtgccatgaagggaaagtacggcatctacaccaaggtgtcccgctacgtcaactggattaaggaaaagactaagctgact

SEQ ID NO: 2500 - DNA, 1383 bp, Artificial Sequence
  derived and/or modified sequence
atgcagcgtgtgaatatgatcatggcagagtcgccaggtctgataaccatctgcctcctcggataccttttgtcggcagaatgtaccgtatttctggaccatgaaaacgccaacaagattcttaatagacctaagcgctataactcgggaaagctggaagaattcgtccaaggaaacttggaaagagaatgcatggaggagaagtgttcctttgaagaggcacgtgaagtgttcgaaaacactgaacgcactactgaattttggaagcaatacgtggatggtgatcaatgcgagtcgaacccttgcctgaacggaggaagctgtaaggatgacataaactcatacgaatgctggtgcccattcgggtttgagggcaaaaactgtgaactggatgtgacttgcaacatcaaaaacggtagatgtgaacaattttgtaaaaactcagcggacaataaagtcgtgtgtagctgtactgaggggtacagacttgccgaaaatcaaaagagctgtgagccggcagtgccgtttccctgtggccgggtttcggtgagccagacctcgaaacttactcgcgccgagacggtgtttcccgatgtcgattacgtgaactcaaccgaggccgaaaccattctcgataacatcacgcagtccactcaaagtttcaatgatttcacccgtgtcgtgggcggggaagatgctaagccagggcagtttccatggcaagttgtgctgaatgggaaagtggacgcgttttgtggaggttcgattgtgaatgagaagtggattgtgaccgcggcgcactgcgtggaaacgggagtgaagatcacggtcgtcgctggagaacacaatatagaagaaacggagcatactgaacagaagcggaatgtgatccgtattatcccacaccacaattacaacgccgccatcaacaaatacaatcacgacattgccttgctggagctcgacgaaccactcgttctcaacagctacgtgacgcctatctgcatagccgacaaggagtacaccaatatcttcctcaagttcgggagcggttacgtctcaggttggggccgagtctttcacaagggtcgatctgcattggtcctgcagtacctgcgagtccccctggtggatagggcgacctgtctgcgtagcaccaagtttactatatacaacaacatgttttgtgcaggatttcatgagggtggtagggactcctgtcaaggtgatagcggaggaccccatgtcactgaagtggagggtacttcctttcttactggcatcatctcatggggtgaagagtgtgcaatgaagggcaagtatggtatctacaccaaggtttcgagatacgtgaattggatcaaggaaaaaaccaagctgact

SEQ ID NO: 2501 - DNA, 1383 bp, Artificial Sequence
  derived and/or modified sequence
atgcaaagagtgaatatgattatggcggagtcccctggtcttattactatttgtttgcttggttaccttctttccgcagaatgtaccgtgtttctcgaccatgaaaacgcgaataagattctgaacagaccaaagcggtacaattcaggaaagctcgaagagtttgtccagggcaatctggagcgcgaatgtatggaggaaaaatgctcgtttgaggaagcaagagaagtgttcgagaacacggaaagaaccactgaattctggaaacaatacgtggatggggatcaatgtgaatccaacccttgccttaatggaggatcatgtaaggatgacattaactcttacgaatgctggtgtcccttcggctttgaagggaagaactgtgagctcgatgttacctgtaacatcaaaaatggcagatgcgaacagttctgcaagaactcagcagacaataaggtcgtctgtagctgtactgaaggataccgccttgcagaaaaccaaaagagctgcgagcctgccgtgccctttccctgtggtagggttagcgtgagccaaacttccaaactcactcgtgcagaaaccgtgtttccggacgttgattacgtgaactcgaccgaggcagaaactattctggacaacattacccaaagcacccaatccttcaacgacttcacccgggtcgtcggaggagaagatgcaaagccgggacaatttccttggcaggtggtgctcaacggtaaggtcgacgccttttgcggaggatcgattgtgaatgagaaatggattgtgaccgctgcccattgtgtggaaacgggtgtcaagatcaccgtcgtggccggggagcataacatagaagaaaccgaacacactgagcaaaaaagaaacgtcatccgcatcatcccccaccacaattacaatgccgcaattaacaagtacaaccatgacattgcgctgctggaacttgatgaaccacttgtgcttaactcctacgtgaccccaatatgcattgctgacaaggaatacaccaacattttcctcaaatttggttcgggatacgtctctggttggggccgcgtgttccataagggacgcagcgcacttgtcctgcaatatctgcgggtgcctctggttgatcgggcaacttgtctgaggagcaccaagtttaccatctataacaacatgttctgcgcaggatttcatgaaggtggacgcgattcctgccaaggtgattcgggtggtccccatgtcaccgaggtggagggcacgtccttccttacggggatcatttcctggggtgaagagtgtgctatgaagggaaagtacggtatatacacgaaggtgtcacggtatgtgaactggatcaaggaaaagaccaagctgact

SEQ ID NO: 2502 - DNA, 1383 bp, Artificial Sequence
  derived and/or modified sequence
atgcagcgggtgaacatgattatggctgagagcccaggcttaatcaccatttgcttgctaggatatctcctgtccgccgagtgtacagtgttccttgatcacgaaaacgccaataagatcctgaaccgtcctaaaagatacaacagtggcaagctcgaggagtttgtccaaggtaacctagagcgtgaatgtatggaagaaaagtgcagctttgaagaggctcgtgaggtcttcgaaaacacagagcgtaccaccgaattctggaaacagtacgttgacggtgaccaatgtgaatccaacccgtgcctcaacggtggctcatgtaaggacgatattaatagttatgagtgctggtgccccttcggtttcgagggcaagaattgcgagctcgacgtcacttgcaatatcaagaacggacgatgtgaacagttctgcaagaattctgcagacaacaaggtcgtgtgttcgtgtaccgagggttaccggttggccgagaaccaaaagtcatgcgaaccggctgtccccttcccctgtggacgtgtaagcgtaagccagaccagtaagctcacgcgagcagaaacggtgttcccagatgtcgactacgttaactcaactgaggccgagaccattctggacaatatcacacagtcgacgcagtctttcaacgattttacgagagtagtgggtggtgaagatgccaagcccggacagtttccttggcaggtggttctgaacggtaaggtcgacgccttctgtggcgggtcgatagttaatgaaaagtggatcgtcaccgcagcgcactgcgttgagactggtgtgaagatcacagtggttgcaggtgagcataatatagaagaaaccgaacatacagagcagaagaggaatgtcatccggattatacctcatcataattataacgcagcgattaacaagtataatcatgatattgctttgctcgagctggatgagcccttagtacttaattcatacgtgactccgatctgtatcgccgataaggaatataccaacatctttttgaagttcggttctggctacgtgagcggctggggacgtgtgttccacaagggccgcagcgcccttgttcttcaatacttgagagttcccctagtggatcgagcaacgtgtctacgctctactaagtttacgatttacaataacatgttctgtgcaggatttcatgaaggtggtagagactcgtgtcaaggtgactccgggggccctcatgtcactgaagttgaaggtacgagcttcttgaccggcatcatttcttggggcgaagagtgtgcaatgaagggtaaatacggaatctataccaaggtgagccgatacgtgaattggatcaaggaaaaaacaaagctcaca

SEQ ID NO: 2503 - DNA, 1383 bp, Artificial Sequence
  derived and/or modified sequence
atgcagcgagttaacatgattatggccgagtcgccaggactgattacaatctgtctgctaggctacttgctatcggcggaatgtacagtgttccttgatcacgaaaatgccaacaagattctgaatagaccgaaacgctataattcgggaaaactcgaagagttcgtacagggaaatttggaacgcgagtgcatggaagaaaagtgctcctttgaagaggcaagagaggtcttcgaaaatacagaaaggactacggagttctggaagcaatatgtagatggagaccaatgcgagtcaaatccctgcctcaatggcggttcatgtaaagatgacattaattcatatgagtgttggtgcccatttggcttcgaaggaaagaattgtgaactcgatgtcacttgtaacatcaaaaatggtcgatgtgaacagttctgcaaaaactctgctgacaataaggttgtttgttcgtgtaccgagggatacagacttgctgagaatcaaaagtcctgcgagccagccgtaccgttcccatgcgggcgagtttcagttagtcaaacatcgaagttaactcgagcagaaaccgtgtttccggatgtcgattatgtaaattctacggaggcagaaactattcttgataatataacgcaatctacacagagctttaatgacttcacccgagtcgttggaggagaagatgcgaaaccaggacaattcccttggcaagttgtgcttaatggaaaggttgatgctttttgtgggggaagtatcgtcaatgagaagtggatagtgacagctgctcattgtgttgaaacgggggtcaaaattactgttgttgctggagaacataacattgaagaaactgaacatacggaacagaaaagaaacgttattcgaatcattccacatcacaattataacgccgcaattaataaatacaatcatgatattgcattattagaactggacgagccactcgtgctcaattcatacgtcacaccaatttgtatcgccgataaggagtatacgaatatctttctaaagtttggatcaggatatgttagcggttggggacgggtttttcataagggcagatctgcattagtattgcaatatctaagagtaccactggtggatcgagctacttgcctacgttcgactaaatttaccatttataataatatgttctgcgccggattccatgagggtggaagagatagttgtcaaggagactcgggcggaccacatgtgaccgaagttgaaggaacaagttttttgactggaattatttcttggggagaagagtgcgcaatgaagggaaaatacggcatttacacaaaagtttcaagatatgtgaattggattaaggagaaaaccaagttaacg

SEQ ID NO: 2504 - DNA, 1383 bp, Artificial Sequence
  derived and/or modified sequence
atgcaacgggtcaatatgatcatggccgagtcgcctggactcatcaccatttgcctccttggatacctcctctcggcagaatgtactgtctttctggaccatgagaacgcaaacaaaatccttaacagaccgaaacggtacaattccgggaagctggaagaatttgtgcaaggaaatctggagagggaatgcatggaggaaaagtgctcattcgaagaggctcgtgaggtgtttgagaacaccgaaaggactaccgagttctggaaacagtacgtcgacggggaccagtgtgaatcgaacccttgcctcaacggaggatcgtgcaaggatgacattaacagctacgaatgctggtgtccgttcggcttcgagggcaagaattgtgaactggacgtcacctgcaacattaagaacggacgctgcgagcagttctgcaagaacagcgccgataacaaagtggtgtgcagctgtactgaaggttacagactggccgaaaatcaaaagtcatgtgaaccagccgtcccgtttccgtgtggaagggtatctgtgtctcagaccagcaaactcactcgcgccgagactgtctttcccgatgtggattacgtgaattcaactgaggctgaaaccatcctggataacatcacgcagagtacgcaatccttcaatgatttcactcgggtggtcgggggagaggacgcgaagccaggacagttcccgtggcaagtggtcctgaacggtaaggtggatgcattttgcggtggttccatcgtgaatgaaaaatggatcgtgaccgccgcacactgtgtggaaaccggagtgaagatcaccgttgtggcaggagaacataacattgaggaaaccgagcatactgaacagaagcgaaacgtcattcggataatccctcaccataactacaacgctgcgatcaataagtacaatcacgacattgctttgctggagctcgacgaaccactggtgcttaactcctacgtcaccccaatctgcatcgccgacaaggagtacactaacatctttctgaaatttggatctggatacgtgtcgggctggggacgagttttccataaggggcggtccgcactggtgctgcagtacttgcgcgtcccgttggtggaccgagccacctgccttaggtccacgaagttcaccatatacaataacatgttctgcgcgggcttccacgaaggcggaagagacagctgccagggcgatagcggcggacctcacgtgactgaagtggaaggaacttcgttcttgactgggatcatctcttggggcgaggagtgcgctatgaagggaaagtacggaatctatactaaggtgagcagatatgtgaattggatcaaggaaaagactaaactgacc

SEQ ID NO: 2505 - DNA, 1383 bp, Artificial Sequence
  derived and/or modified sequence
atgcagagagttaatatgattatggccgaatctcctgggctgataacaatatgtttgttagggtaccttctgtccgccgaatgtactgtgttcctagatcatgaaaatgccaacaaaattctgaatcgccctaaacggtacaattcaggaaagctggaagaattcgtacagggaaacctcgagagggaatgtatggaagagaaatgctccttcgaagaagctagggaagtatttgaaaacacagaaagaacaactgaattctggaaacagtatgtggatggagatcagtgtgagagtaacccttgcttgaatggggggtcttgcaaagatgatatcaattcctatgagtgttggtgcccttttggatttgaagggaagaattgtgaattagatgtaacatgtaacatcaaaaacggacggtgtgagcagttttgtaaaaattcagctgataacaaagttgtgtgttcctgtacagaagggtatagattagctgaaaaccagaagtcatgcgaacctgccgtaccgttcccttgtgggcgcgtttctgtctcacagacatcaaaactaactagagcagaaacagtgtttccagacgtagattatgtaaactctactgaagccgaaacaatactggataacataacacaatccacacagtccttcaacgactttacaagagtggtggggggagaggacgctaaacccgggcagtttccttggcaggttgtactaaatggaaaggtggatgccttttgtggaggatctatcgtgaatgaaaaatggatcgttacagctgctcattgtgtggagactggggtgaaaattacagtcgtagccggagaacacaacatcgaagagacagaacacacagaacagaagaggaacgtcataaggattatcccccaccataattataacgctgccataaacaaatataatcatgatattgccctccttgagctagatgaaccactcgtgcttaactcttatgtgactcccatctgtatagcggacaaagaatatacaaatattttcttgaaatttggatcgggatatgtttcaggatgggggagagtttttcataaagggagatctgctctcgtattgcagtatctgagggttccccttgtggacagagctacatgtctccggtctacaaaattcacaatttataacaacatgttctgcgccggatttcatgaaggggggagagactcttgtcagggggattcagggggacctcatgtgactgaggtggagggaacttccttccttacagggataatatcctggggagaggaatgcgcgatgaaaggaaaatacgggatatatactaaagtatctcgatatgtgaactggattaaagaaaaaactaaacttaca

SEQ ID NO: 2506 - DNA, 1383 bp, Artificial Sequence
  derived and/or modified sequence
atgcagcgggttaatatgatcatggccgaatccccagggctgatcactatctgcttactgggctacctcctgtcagctgaatgcacagttttccttgatcatgaaaatgcaaacaaaatcctcaacagacccaaacgctataatagcgggaagcttgaagaatttgtacagggcaacttggagcgagagtgtatggaagagaaatgttcttttgaggaggcacgagaagtgttcgagaataccgaaagaacgactgaattttggaagcagtatgttgatggagaccagtgcgaatctaacccttgtctgaatggaggcagctgcaaggacgatatcaattcctacgagtgttggtgccctttcggatttgagggaaagaactgtgagctcgacgtgacgtgcaatattaagaatgggcgatgcgagcaattctgtaagaacagcgccgacaataaagtggtatgttcctgcactgaggggtataggctggcagagaaccagaagtcttgcgagccggccgtgcccttcccctgcgggcgtgtatccgttagtcagacttccaaacttacccgtgcggagacagtgtttccagacgtggactatgttaacagcacggaggccgagaccattctggacaatatcacgcagtcgacccagtcttttaacgatttcactagggtggtcggcggagaagacgccaaacctggccaatttccatggcaagtggttctgaacgggaaggtcgacgccttttgtggtggaagcatcgtaaacgaaaaatggattgtcactgccgctcattgcgtcgagacgggagtcaagatcactgtggtggctggagagcacaacatcgaggaaaccgaacatacagaacagaagagaaacgtgatcaggatcattccacaccacaattacaacgcagcaatcaacaaatacaatcacgacattgcactgctggagctcgacgaacccctggtcttgaattcttacgtcacccccatctgcatcgccgataaggaatacacaaatattttccttaagttcgggagcggttatgtgtctggatggggacgtgtgtttcataagggaaggagtgccctcgttttgcagtatctcagggtacctcttgtagaccgagcaacatgcctgaggagcacaaaattcactatctataacaacatgttctgcgctgggtttcatgagggcggacgagactcctgccagggggactctggcggtccccacgtgacagaagtcgagggcacctccttcctgacagggatcattagctggggagaagaatgcgccatgaaggggaagtacggaatttataccaaggtatctaggtacgtcaattggatcaaagagaaaacgaagttgacc

SEQ ID NO: 2507 - DNA, 1383 bp, Artificial Sequence
  derived and/or modified sequence
atgcagcgcgtcaacatgatcatggcagaatccccaggactgatcacaatctgtctcttaggctatctgctatctgctgagtgtacagtttttctcgatcatgagaacgcgaataaaatcctgaacagacctaagagatacaattccggcaaactggaggagtttgtgcagggaaacctggaaagggagtgtatggaggaaaagtgcagctttgaggaagctagagaggtttttgaaaataccgaaagaactaccgaattttggaagcagtacgtggacggcgatcagtgtgaatctaacccctgcttaaatggtggttcctgtaaagacgatatcaactcctacgagtgttggtgtccattcggttttgaggggaaaaactgcgaactcgacgtgacgtgcaatattaaaaacggacgatgtgagcaattttgcaaaaattcagccgataacaaagtcgtctgcagctgcacagagggttatagactggctgaaaaccagaaatcctgtgaacccgcagttccctttccatgcggacgtgtttctgtgagtcagacctctaaactgacaagggccgaaaccgtttttcctgacgttgattatgtgaattcaacggaagccgagaccattctcgacaacataacacagtctacacagtcattcaacgactttaccagagtggtcggcggtgaggacgccaaacctggccagttcccatggcaggtggtcctgaatgggaaggtcgatgcattctgtggtggaagcattgtgaatgagaagtggatcgtaactgcagctcactgtgtggaaacgggcgtgaagatcacagtcgtcgcgggcgaacataatattgaggagacggagcatacagagcagaagagaaatgttatccgcataatcccacaccacaactacaatgcagcgatcaacaaatataatcatgacatcgctctgctggagcttgatgaaccccttgtgttgaactcatacgtcactccaatatgcatcgctgacaaggagtatactaatatttttctcaagtttggctctggttacgtgagcggctggggccgtgtgtttcataaaggccgcagcgccttggtgttacagtatcttagggtacccctggtcgaccgggctacctgtctgcgatcaacaaaatttacaatatacaacaatatgttttgcgcgggcttccacgaaggcggtcgagattcctgccagggcgacagcggtggcccgcatgttaccgaggtagagggtacaagttttctcacaggtattatcagctggggagaagagtgcgctatgaagggcaagtacggtatatatactaaagtgagcagatacgtaaactggattaaggagaagacaaagctgaca

SEQ ID NO: 2508 - DNA, 1383 bp, Artificial Sequence
  derived and/or modified sequence
atgcaaagggtgaatatgattatggctgagagtcccggccttataacgatatgcctcctcgggtatctcctgagcgctgaatgcaccgtgttcctcgaccatgagaacgctaataagatcctgaatcggcccaagaggtacaacagcggaaaactcgaggaatttgttcagggcaatttggagcgcgagtgtatggaggaaaaatgttcttttgaagaggcccgggaggtcttcgagaacaccgagagaaccactgagttctggaagcagtatgtggatggcgaccagtgtgaaagcaatccttgtctgaacggcggaagttgtaaggacgacatcaatagttacgaatgttggtgccctttcgggtttgaaggcaaaaactgcgaactggacgttacatgcaatataaaaaacggccggtgcgaacaattctgcaaaaattcagccgacaacaaggtcgtctgttcctgcaccgaagggtatagactggcagagaatcagaagtcctgcgaaccggccgtgcctttcccttgtggccgagtttctgtcagtcagacatcaaaactgacacgggctgagacagtgttccccgatgtggattatgtgaatagcacagaggctgaaaccatactggacaatattactcagtccacccaatccttcaacgattttactagagtagtgggaggggaggatgctaaaccaggtcagttcccgtggcaggtggtactgaacggcaaagtcgacgctttttgtggcgggtcaatcgtcaatgagaaatggattgtcacagcagctcattgcgtcgagaccggcgtgaagattacagtggttgcaggggaacataatatcgaggaaaccgagcacacagaacagaaacggaatgttattagaattataccccatcacaattataatgccgcaatcaacaaatataatcacgacatcgcattgctcgaacttgacgagcccttggtcctgaatagttacgtgactcctatctgcattgccgacaaagagtatactaatatcttcctcaagttcggcagtggatatgtatcaggatggggcagagtgttccacaaaggaagaagtgctctggtccttcaatacttgagggttccactggtggacagagctacttgtctcaggtcaaccaagttcacgatttataataatatgttttgtgccgggttccacgaaggggggagggactcttgtcagggcgacagcggtggtccacacgtgacagaagtggagggtacatccttcctgacaggtattatcagttggggagaggaatgcgcgatgaagggcaaatatggcatatatacgaaggtgtcccgctacgtgaattggattaaggagaaaaccaaacttaca

SEQ ID NO: 2509 - DNA, 1383 bp, Artificial Sequence
  derived and/or modified sequence
atgcagagggttaatatgattatggcagaaagtcctggtttgattaccatctgtctgctgggctacctgctgtctgcagagtgtacggtctttctagaccacgagaacgcgaacaaaatcctgaatagacccaagaggtacaattccggtaagctcgaggaattcgtgcagggcaacctcgagcgcgagtgcatggaggaaaaatgttctttcgaggaggcacgcgaggttttcgaaaataccgagcgaacgaccgagttctggaaacagtatgtagacggggaccagtgcgagtcgaatccctgcctgaatggagggtcatgtaaggatgacattaactcctatgagtgctggtgtccattcggattcgagggcaagaattgcgagctcgatgttacctgcaacataaaaaacggacgctgcgagcaattttgcaagaatagcgccgacaataaggtggtttgctcctgtaccgagggctaccgactcgccgaaaatcagaagtcctgcgagcccgccgtgcccttcccctgtggccgggtgagcgtcagtcaaacctctaaattgacaagagcagagactgtttttcccgacgtggactacgtgaactctaccgaggccgaaacgatcctcgacaacattactcagagtacacagtcatttaacgatttcactagagtcgttggaggggaggacgccaagccgggacagtttccctggcaggtggttctgaatggcaaggtggatgccttctgcgggggctccatagtgaatgagaaatggatagtcaccgctgctcactgcgtggagactggggtgaagatcaccgtggtcgcaggcgaacacaacattgaggagaccgaacatacggagcagaaacgcaacgtgataagaataatcccacaccataactataacgcagctattaataagtataatcatgacatcgcgctgttagaactggatgaaccgctggtgctcaattcctacgtgacccccatctgcatcgctgataaggagtacacaaatatcttcctgaagttcggttcaggttacgtgagcggctggggtcgggtattccataaggggcgcagtgctctggtgctgcagtacttgagggtcccacttgtcgaccgggcaacctgtttgaggtctacgaaatttactatctacaataatatgttttgtgctgggttccatgagggggggagagattcctgccagggggactctggagggccgcacgttaccgaggtggaggggacttccttcctgactggcataatctcctggggggaggagtgcgccatgaaaggaaaatatggcatctacacaaaggtaagtaggtacgtaaattggataaaggagaagacaaagctaacc

SEQ ID NO: 2510 - DNA, 1383 bp, Artificial Sequence
  derived and/or modified sequence
atgcagcgcgtcaatatgatcatggccgaatcgccggggctcatcaccatttgccttctggggtatctgctctccgcggaatgtacggtgttcctggaccacgaaaacgctaataagatcttgaacaggccgaagcgatacaactcagggaagctcgaggaattcgtgcaggggaatctggagagggagtgcatggaagagaagtgtagcttcgaagaggcccgggaggtgttcgaaaatactgaacggactacggagttctggaagcaatacgtcgacggagatcagtgcgagtctaatccctgcctgaacggaggatcctgcaaggacgacatcaattcgtacgagtgttggtgtccatttggtttcgaaggaaagaactgcgagttggatgtgacctgcaacataaagaatggtcgctgcgaacagttttgcaaaaacagcgccgataacaaggtcgtctgctcctgtactgagggataccgtctggctgaaaaccagaagtcgtgcgagcctgctgtgcctttcccatgcggtagagtctcagtgtcacaaacctctaagctgactcgcgctgagactgttttcccagacgtggattacgtgaactcgaccgaagcagaaaccatcctcgataacatcactcagagcacccagagcttcaacgattttacccgcgtggtgggaggagaggatgcaaagccaggccagttcccttggcaagtagtgctcaatggaaaagtggacgccttctgcgggggttctatcgtgaacgagaagtggatcgtcaccgccgcacactgcgtggagactggagtgaaaatcaccgtcgtcgccggtgaacataacatcgaggaaactgagcacactgaacagaaacggaatgtgattcggatcattccacaccataactacaatgccgctattaacaagtacaaccacgacatcgctctcctggaattggacgagccgctggtgctgaattcctacgtcactccgatctgtatcgcagataaggaatacaccaatatcttcctcaaattcggatcgggctacgtctcgggatggggaagggtctttcataaagggcggtcagcccttgtccttcaatacctcagggtgccacttgtggacagagctacctgtctgcggagcactaagttcaccatctacaacaacatgttctgcgccgggtttcatgagggaggccgtgactcgtgccaaggcgactcgggcggaccgcacgtgactgaggtggaaggcaccagtttcctgaccggaatcatttcctggggggaagaatgtgctatgaagggcaagtacggcatctacaccaaagtctctcgctacgtgaactggatcaaagaaaagaccaagctcact

SEQ ID NO: 2511 - DNA, 1383 bp, Artificial Sequence
  derived and/or modified sequence
atgcagagagtaaatatgatcatggccgagagcccgggcctgattaccatttgcctgcttggatacctcctaagcgctgagtgcaccgtgtttctcgatcacgagaacgctaacaaaattcttaacagacccaagagatataacagcggaaaactggaagagtttgtgcaggggaacctggagagggagtgcatggaggagaaatgcagcttcgaagaagcccgggaagtttttgaaaacaccgaaaggaccactgagttttggaagcaatacgttgatggcgaccaatgtgagagtaacccgtgtcttaatggaggaagctgcaaggatgacatcaactcatacgaatgttggtgcccattcggattcgaagggaagaactgcgagctggatgtaacctgcaatatcaaaaacggccgctgtgaacagttctgcaaaaacagcgctgataacaaagttgtgtgcagttgcacagaggggtatcgcctggccgaaaaccaaaaatcctgcgaaccagctgttcccttcccatgtggaagagtgtctgtgtctcagacttccaaactcacacgcgccgagaccgtgtttccagatgtggactatgtgaatagtactgaagcagaaaccattttggataatatcactcaatccacacagtcctttaacgatttcactcgcgtggtcggcggagaggacgccaagcctggacagttcccttggcaagtagtcttgaacggaaaggttgatgccttttgcggaggaagtattgtcaatgaaaagtggattgtgaccgccgcacattgcgtggagaccggtgtgaagatcactgtcgtggctggagagcacaatatcgaagaaacagagcacacagaacaaaagagaaacgtgattagaattattccccatcataactacaacgcggctattaacaaatataaccatgacattgctttgcttgagctcgatgagcctttagtccttaacagctatgtaactcctatctgcatcgctgataaggaatacaccaacatttttctgaaattcgggtctggatatgtttctggatgggggcgagtatttcataaagggcgtagcgctttggtgttacagtacttgcgagttcccctcgttgatcgcgccacctgcttgcgcagtacaaagtttaccatttataacaatatgttttgtgcaggatttcatgagggaggaagagattcttgccagggtgacagtgggggaccccacgtgaccgaagtcgagggtacatcttttttgaccggcatcatctcttggggtgaggagtgtgccatgaagggaaagtacggaatctacaccaaggtctcaaggtacgtcaactggatcaaggagaagaccaaactaacc

SEQ ID NO: 2512 - DNA, 1383 bp, Artificial Sequence
  derived and/or modified sequence
atgcagcgcgttaatatgatcatggccgagtccccagggctgatcaccatctgcctacttgggtacctgctcagcgccgagtgtactgtgttcttggatcacgagaacgccaataaaatccttaacaggcctaagcgatataattctggaaaattagaagagttcgttcaaggcaacctggagagggaatgtatggaagaaaagtgctcgttcgaagaagctagagaggtcttcgaaaatacagagcgaacaacagaattctggaaacagtacgttgatggcgatcagtgcgagtctaatccttgtcttaacgggggctcttgtaaggatgacatcaattcatatgagtgttggtgcccttttggctttgaaggcaagaattgcgagctcgacgtcacctgcaacatcaaaaatggtcggtgcgagcaattttgtaagaactccgcggataataaggtggtctgctcatgcactgagggctaccggctcgccgagaaccaaaagtcatgcgagccagcagtgccctttccatgtgggcgcgtctccgtgtctcaaaccagcaaactgacaagagccgagactgtcttccccgacgtggactacgtcaattccacggaggcagaaacaatcctggacaacattacccagtctacccagagctttaatgatttcactcgggtggttgggggcgaggatgcgaagcctggacagttcccttggcaagtggtgcttaacggcaaggtggacgccttttgtggcggtagtatagtcaacgagaagtggatagtgacggctgcccattgtgtggagactggcgtcaagatcactgttgtcgcgggagaacacaatatagaggaaacggaacacaccgagcagaagagaaatgtcatcagaattatacctcaccacaactataatgctgccattaacaagtacaaccatgatatcgccttgctggaattggatgagcctttagtactgaatagctacgtcacccctatttgtatcgcggacaaggagtacaccaacatctttttaaagtttggatctggttacgtaagtggatgggggcgggtgttccacaaaggtcgatcagcactggttttacagtatctgcgagtccctctagtcgacagagccacctgcttacgctccaccaaatttactatttacaacaacatgttctgcgcaggattccatgaaggtggccgcgactcctgtcagggcgattctggtggcccgcacgtgactgaagtggaaggcactagcttccttacaggcattatttcgtggggcgaagaatgcgctatgaaaggtaaatacggaatttacaccaaagtgagccggtatgtcaattggattaaagagaagaccaagctgact

SEQ ID NO: 2513 - DNA, 1383 bp, Artificial Sequence
  derived and/or modified sequence
atgcagagagtgaacatgatcatggcggagagtcctgggctcattactatttgcctgctcggttatcttctgtccgctgagtgtaccgtctttctggaccacgagaacgctaacaagatacttaaccgacccaagagatataactcaggcaaattggaagagtttgtccaggggaaccttgaaagagaatgcatggaggagaaatgctcattcgaagaggcccgggaagttttcgagaacacagagcgcaccactgagttttggaagcagtatgtcgatggggaccagtgcgagtcaaacccctgcctcaacggcgggagctgcaaagacgacatcaacagctacgagtgctggtgtcctttcggcttcgagggaaagaattgcgagctggatgttacatgcaatatcaaaaacggaagatgtgaacagttctgcaagaattccgccgacaataaagtagtgtgtagctgcaccgagggttatcgcctggccgaaaatcagaaaagttgcgaaccggcggtgccatttccctgcgggagagtcagcgtgtcacagacttctaaactcactcgggctgagactgttttcccagatgtggattatgttaactcaacagaggcggaaactattttggataatataacccagtccacacagtcttttaatgacttcacccgggtggtaggaggtgaggatgccaagccagggcaatttccttggcaagtggtccttaatgggaaagtagatgccttctgcgggggtagcatcgttaacgagaaatggattgttactgccgcccactgtgtggagaccggcgttaaaattacagttgtggccggtgagcataacattgaagaaactgagcatacggagcaaaagcggaacgttatcaggatcattccacatcacaattataatgccgctatcaacaaatataaccatgatattgccttgctggagttagacgaaccactggtccttaactcatatgttaccccaatttgtattgcagacaaagagtatacaaacattttcttgaagttcggatcaggctatgtttccggctggggccgtgtttttcacaagggaagatcggctctggtcctccaatacctccgggtgcccctagtggatagggccacctgcctcagatccactaagttcacaatttacaataatatgttctgcgctggctttcacgaagggggcagagacagttgtcagggcgacagtggaggccctcatgttaccgaggtcgagggaaccagctttctcactgggataatctcatggggcgaggagtgtgctatgaaggggaaatacggcatctacacaaaagtgagtagatatgtcaattggatcaaggagaagacgaagcttaca

SEQ ID NO: 2514 - DNA, 1383 bp, Artificial Sequence
  derived and/or modified sequence
atgcagagggtaaacatgataatggccgaatcacccgggttgattaccatctgtttgcttggctaccttctctcagccgaatgcacagtgtttcttgaccatgaaaatgcaaacaagattctgaaccgaccaaaaaggtataatagtgggaaactagaggaattcgtacagggtaatctcgagcgagaatgcatggaagagaaatgtagctttgaggaagcccgtgaggtgttcgagaacacagagcgaacaaccgaattctggaagcaatatgttgatggtgaccagtgcgagagtaacccctgtctgaatgggggaagttgcaaggatgacataaatagctacgaatgctggtgcccttttgggttcgagggcaagaactgcgagctggacgtcacgtgcaacattaagaatgggcgctgcgagcagttttgtaaaaattcagctgacaataaggtcgtttgtagctgcacagaggggtaccggctggcagagaatcagaagtcctgtgaacctgcggtgccctttccctgtggccgcgtgagtgtgtcgcagacctctaagctcacgcgggccgagactgtatttcctgatgtggattatgtgaattctactgaggcagaaaccatacttgacaatataactcagagtacccagagcttcaatgatttcactcgcgtggtggggggcgaggacgccaaacccggacagtttccttggcaggtggtcctcaatgggaaagttgacgctttttgcggcgggagcattgtcaacgagaagtggatcgtgaccgctgctcattgcgtggagacaggcgtgaaaatcacagtagtggccggtgaacacaatatagaggaaaccgagcacactgaacagaaaaggaatgtgattagaattatcccccatcataactacaatgctgctataaataagtataatcacgacattgcattgcttgaactggacgaacctctggtccttaactcctacgttactccaatttgcattgccgacaaagagtacaccaatatttttcttaaattcgggtcgggttacgtgtcggggtggggccgagtgttccataagggccgatccgcactggtgctgcagtatctgcgggttccccttgtcgatcgggctacatgcctgagatccacaaagtttaccatttacaacaacatgttctgtgcaggtttccacgaggggggtcgggattcctgccagggggacagcggaggccctcatgtgacggaagtggaggggactagctttctgacgggtatcatcagctggggggaagaatgcgctatgaagggcaagtatgggatctacactaaggttagcagatatgtgaactggattaaggaaaagactaaactcact

SEQ ID NO: 2515 - DNA, 1383 bp, Artificial Sequence
  derived and/or modified sequence
atgcagcgggtgaacatgatcatggccgaaagccctggactcatcacgatctgcctgctggggtatctgctgtctgccgaatgcaccgtgttcctggaccatgagaacgcaaataagatcctgaaccggcctaagaggtacaatagcggcaaactcgaggaattcgtgcaaggaaacctggaaagggaatgcatggaggagaagtgttccttcgaagaagcccgggaagtgttcgaaaacactgaacgcactaccgaattctggaaacagtacgtggacggggaccaatgcgaatcaaacccctgtcttaatggcggaagctgcaaggatgacattaactcgtatgaatgttggtgcccgtttggattcgaaggaaagaactgtgagctcgacgtgacctgtaacattaagaatggacggtgcgaacagttctgcaagaactcggcagataacaaggtggtgtgttcatgtacggaagggtaccggcttgcagaaaatcagaagtcctgtgagccagccgtgccttttccatgtggtcgggtgtcggtgtcccaaactagtaagctgacccgtgctgagactgtctttccagacgtggattacgtgaactcgactgaagctgaaaccatcctggacaatatcactcaatcaacccaatccttcaatgacttcactcgcgtggtgggaggagaagatgccaagcccggccagtttccgtggcaggtggtgctcaacggcaaagtcgatgcgttctgcggaggttcgatcgtcaatgagaagtggatcgtgactgctgctcattgtgtggaaaccggcgtcaagatcacggttgtggccggagaacacaatatcgaggaaaccgaacataccgaacagaaaagaaatgtcatccgcataatacctcatcataactacaatgccgcgatcaacaagtataaccatgacatcgcgttgttggagctggatgagccgctggttcttaattcctacgtcacccctatctgcatcgccgataaggagtacactaatatcttcctgaaatttggctcaggttacgtctcgggatggggacgggtgttccacaagggacggagcgcgctcgtgttgcagtacttgcgcgtgccgctcgttgatagagccacgtgcctgaggtcgaccaagttcaccatctacaataacatgttttgcgctggcttccatgaaggaggacgcgactcgtgccagggagatagcggagggccacatgtgaccgaggtcgaaggcacctcattcctgaccggcattatctcctggggagaggaatgtgcgatgaaaggaaaatacggaatctacaccaaagtgtcgcggtacgttaactggatcaaggagaaaaccaagctgacc

SEQ ID NO: 2516 - DNA, 1383 bp, Artificial Sequence
  derived and/or modified sequence
atgcagcgagtgaacatgatcatggcagagtcacctggcctgatcacaatttgcctgctgggctatctgttgtccgcagagtgcactgtgttcctggatcatgaaaatgcgaacaagatcctgaaccggccgaaacgatataattctgggaagctggaagagtttgtgcaaggtaatctagaaagagaatgtatggaagagaagtgctccttcgaagaggccagggaggtattcgagaacaccgagcgcacaactgaattttggaagcagtatgttgatggagatcagtgcgagagcaacccctgcttgaacggtgggagctgcaaggacgacattaatagctatgaatgctggtgcccgttcggattcgagggcaagaattgtgagcttgatgttacttgtaacatcaagaacgggagatgtgaacaattttgtaagaacagcgcagacaacaaggtggtgtgttcatgtacagaaggatatcgtctggcggagaatcagaagagctgtgagcccgccgttccattcccctgtggcagagtgtctgtctcacagacctcgaagcttactcgcgctgagactgtgttcccagatgtcgactatgttaactctacagaggctgaaactattttggataacattacccagtcaacgcaatcgttcaacgacttcacccgtgtggtgggcggggaggatgccaagccgggccagttcccgtggcaggttgtgctgaacggtaaggttgacgcattctgtggtggctctattgtcaacgaaaagtggatagtgacagccgcccattgcgtggagaccggagtgaagatcaccgtggtcgccggtgagcacaacatagaagagactgagcacacagagcagaaacgcaatgtgatacgtatcattcctcatcacaattataatgccgctatcaataaatataatcacgatatagcgttacttgaattggatgaaccactggtgctcaacagttacgttactcccatatgtatagcagacaaggaatacacaaacatattcctaaaatttggttccggctacgtgtcaggatggggaagggtgttccataaaggacgcagtgccctggttcttcaatacctgcgggtgcctctggttgaccgagccacgtgcctaagatccacaaaatttactatttacaacaatatgttctgcgctggattccacgagggcggacgggactcatgccaaggagactcaggcggtccgcatgtaactgaggtggagggcacgtccttccttaccgggattatctcctggggggaggagtgtgctatgaagggtaagtacggaatttatactaaagtgtctagatatgtcaactggataaaagaaaagaccaagctcact

SEQ ID NO: 2517 - DNA, 1383 bp, Artificial Sequence
  derived and/or modified sequence
atgcagcgggtgaacatgatcatggctgagtcgccgggcctcatcactatttgcctgttgggatacctgttgagcgctgaatgcactgtgttcctcgaccatgagaacgccaacaagatcctgaacagaccaaaacgctacaactctggcaagctggaggaattcgtgcaaggcaacctggaacgcgagtgcatggaagaaaagtgcagcttcgaggaggctagggaggtattcgaaaataccgagagaactactgagttttggaaacaatacgtcgacggagatcaatgtgagtcgaatccatgccttaatggcggatcctgcaaggacgatatcaacagctatgaatgctggtgccctttcggtttcgaaggcaaaaactgcgagctggatgtaacctgcaacatcaaaaacggtcgctgcgaacagttttgcaagaactccgcggacaacaaagtggtatgtagctgtaccgaaggatacaggttggcggaaaaccagaaaagctgtgagccagcggtcccgtttccctgcggacgggtgtcggtgagccagacctccaagctcaccagggctgaaaccgtgttccctgacgtggactacgtgaattccaccgaggcagagactattctggataacatcacccagtcaactcagtcgtttaatgatttcactagagtcgtgggaggcgaggacgccaagccgggacaattcccgtggcaggttgtcctcaacgggaaagtggacgcgttttgcgggggatccatcgtgaacgaaaagtggatcgtcactgcggcacactgcgtggagactggtgtgaagatcactgtggtcgcgggagagcacaatatcgaggaaaccgaacacaccgagcagaagcgcaatgttatcaggattataccgcaccacaattacaacgcagccatcaacaaatacaaccatgacatcgctctgcttgaactggatgagccgctcgtgctcaacagctacgtgactccaatctgcattgccgataaagaatacacgaatatcttccttaagtttgggtcgggatatgtgtcggggtggggacgggtgttccacaagggccggtctgcactcgtgctgcagtacttgcgggtgcctctggtggacagagcgacctgcctccgttcaaccaagttcacgatctacaataacatgttctgtgccggatttcatgaaggtggacgcgactcatgtcaaggggactcgggcggaccgcatgtcaccgaggtcgaaggcacgtccttcctcaccgggatcatctcttggggcgaagaatgtgcgatgaagggcaagtacggcatctacacgaaggtgtcaagatacgttaactggatcaaggaaaagactaagctgacc

SEQ ID NO: 2518 - DNA, 1383 bp, Artificial Sequence
  derived and/or modified sequence
atgcagagggtgaatatgatcatggcggagtcacctggcctgattaccatctgcttgctgggctacctcctgagcgctgaatgcaccgtgtttctggatcatgagaacgccaataaaatccttaacagaccgaaacggtacaacagcggaaagctcgaagagttcgtccaaggaaacctcgagcgcgaatgcatggaggagaaatgctccttcgaggaagcgagagaggtgttcgaaaacaccgagagaaccacggagttctggaagcagtacgtggatggagatcagtgtgagagcaatccctgtctgaacggagggtcgtgtaaggatgacataaactcgtatgaatgctggtgcccgttcggattcgaaggcaagaactgtgaactggatgttacgtgcaacatcaagaacggccgctgtgaacagttctgcaagaacagcgctgacaataaggtggtatgttcctgcaccgaaggctaccgcttggccgagaatcaaaagtcgtgcgaacctgctgtcccatttccatgcggccgcgtgtcagtctcccaaacttcaaaactcacccgggccgagactgtttttccggacgttgattatgtgaactccactgaagccgaaaccatcctggacaacatcactcagtcgacccagtcgttcaacgacttcactcgggtggtgggcggagaggacgcaaagccgggtcaattcccgtggcaggtcgtgctgaacggtaaggtggacgccttctgcggaggatccatcgtcaacgaaaagtggatcgtgactgccgcacattgtgtggaaactggtgtcaagatcaccgtcgtggccggtgaacacaatatcgaggaaaccgaacacaccgaacaaaaaaggaatgtgattcggatcatcccacaccacaattacaacgcggcgatcaacaaatacaatcacgacattgccctgttggagctcgacgagcccctggtccttaattcgtacgtgaccccaatctgcatcgctgacaaggagtacactaatatttttctcaaattcgggtccgggtacgtgtcgggatgggggcgcgtgtttcataaaggaagatcagcactcgtcctgcagtaccttagggtgccgctggtggatcgagcgacttgcctccggagcacgaagtttactatctacaataacatgttctgcgcaggattccatgaaggaggacgcgactcctgccagggtgattctggaggacctcacgtcaccgaagtggagggaacttcgttcctgaccggcatcatctcatggggggaagaatgcgccatgaagggcaagtacggaatttacaccaaggtgagccgttacgtcaactggatcaaagaaaagacgaagctgact

SEQ ID NO: 2519 - DNA, 1383 bp, Artificial Sequence
  derived and/or modified sequence
atgcagcgtgtcaacatgattatggctgaatctccaggtcttattacaatttgcttgcttggatacctgctctctgcagagtgcacagtgttcctggatcatgagaacgctaacaaaattttgaataggcccaaacgttacaattctggcaagctggaagagttcgtacagggcaatctggagagggagtgcatggaggagaagtgttcattcgaggaggcaagggaggtctttgagaacactgagcgcactactgaattttggaaacagtatgtcgacggagaccaatgcgaatccaacccctgcttgaacggtggttcttgcaaagacgacattaattcttacgagtgttggtgtcctttcggtttcgagggcaagaattgcgaattggatgtcacctgtaacattaagaacggtaggtgtgagcaattctgtaagaactctgctgacaacaaggtcgtctgttcatgcacagaaggatacaggctcgccgagaatcaaaagtcttgcgaacctgccgtaccatttccctgtggcagagtcagcgtttctcagacctctaaactcactcgtgccgaaactgtgttccctgatgtcgactatgtgaattcaacagaggccgaaacaatcctggataacatcactcagtctacccaatcctttaacgactttacacgtgtcgtcggtggagaagacgccaagcccggtcagttcccttggcaggttgtgctgaacggcaaagtcgatgcattctgtggtggatccatcgtcaacgagaagtggattgtgaccgctgctcattgtgtggaaaccggcgtgaaaatcactgttgtcgctggcgagcataacatcgaggagaccgaacacaccgagcagaaaaggaacgtgatccgcatcatccctcaccataactacaacgctgcaataaataagtacaatcatgacattgcacttctcgagctggacgaaccattggtgttgaatagctacgtgactcccatttgtatcgccgataaggagtacaccaacatctttctcaagttcggcagcggatatgtctccggatggggccgtgtttttcacaaaggccgctctgccctcgtcctccagtacctgcgtgtgcccctcgttgatcgcgctacctgccttcgctctactaagttcactatctacaacaatatgttctgcgctggatttcatgaaggcggtagagactcttgtcagggcgattccggtggtcctcatgtgaccgaggtggaaggcacatccttcttgacaggtatcattagctggggagaggaatgtgccatgaaaggcaagtatggcatctacactaaagtcagtcgctacgtcaattggatcaaggagaagaccaagcttacc

SEQ ID NO: 2520 - DNA, 1383 bp, Artificial Sequence
  derived and/or modified sequence
atgcagcgggtgaatatgatcatggctgaatccccgggtctgatcaccatttgcctgctggggtaccttctcagcgccgagtgcactgtgttcctggaccacgaaaacgccaacaaaatcctcaaccggccaaaaagatacaattcgggcaagctcgaggaattcgtgcagggtaacctggaaagagaatgcatggaggagaagtgctcgttcgaagaagctcgcgaagtgttcgagaatactgaacggactaccgaattttggaaacagtacgtcgatggagatcagtgcgaatcgaacccatgcctcaacgggggcagctgcaaggatgatatcaattcctatgagtgttggtgtccgttcggctttgaaggaaagaattgcgagctcgatgtgacttgcaacattaagaacggccgctgcgagcaattctgcaagaacagcgccgacaataaagtcgtgtgctcatgtaccgagggatacaggctggctgaaaaccaaaagtcctgtgagccggccgtgccgttcccgtgcgggcgggtgtcggtttctcagacttcgaaactgactagggccgaaaccgtgttcccggatgtggactacgtgaattcgactgaggcagaaaccatcctggacaatatcactcagtcaacccaatcgttcaacgacttcactcgcgtggtgggaggtgaagatgcgaagcccggtcagttcccgtggcaagtggtgctgaacggcaaggtcgatgcattctgcggcggctccattgtgaatgagaagtggatcgtcaccgcggctcactgcgtcgaaactggtgtcaagatcaccgtcgtggccggagaacacaatatcgaagagactgaacacactgaacagaaacggaatgtgattcgcattatcccacatcacaattacaacgccgcgatcaacaagtacaatcacgacatcgccctgctggaactggacgagccgttggtcctcaacagctacgtcacccccatttgcatcgcagataaggaatataccaatatctttctcaagttcggcagtggatacgtctcgggttggggaagagtgttccataagggccggtcagcactcgtgctccaatacctgcgcgtcccgttggtggatcgcgctacttgcttgaggtcaactaagttcaccatctacaataacatgttctgcgcgggattccatgaaggaggacgcgactcgtgtcaaggggattccggcggaccgcacgtcaccgaggtggaaggaacctccttcctgaccggtatcattagctggggagaggagtgcgcaatgaagggtaagtacggtatctacactaaagtctcgcgctacgtgaactggatcaaggaaaagacgaagctgacc

SEQ ID NO: 2521 - DNA, 1383 bp, Artificial Sequence
  derived and/or modified sequence
atgcagcgcgtcaacatgatcatggccgaaagtccaggacttattactatctgtttgctcggctatctgctctccgcagagtgcaccgtctttctggatcatgagaacgcgaacaaaattctgaatcgccctaaacgctacaactcaggtaagctggaggaatttgttcagggtaacctggagcgagaatgtatggaggaaaaatgtagctttgaagaagctagagaagtgttcgaaaacaccgagcgcaccaccgagttttggaaacaatacgtggatggtgatcagtgtgagtcaaatccgtgtctcaatggcgggtcgtgtaaggatgacatcaattcctacgaatgttggtgtccatttggttttgaggggaagaactgcgagctggacgtgacctgtaacattaagaacggccgttgtgagcagttctgtaagaatagcgcagataacaaagtggtctgttcgtgcactgaaggatacagactcgcagaaaaccaaaagagctgtgagcccgcagtgccatttccttgcgggcgggtgtcggtgtctcagacctccaagctcacccgcgccgaaacggtctttcctgacgtcgactacgttaactccaccgaagcagaaactatacttgataacattactcaatctactcagagctttaatgacttcactcgcgtggtcggcggagaagatgcaaaaccaggtcagttcccatggcaggtggtccttaatggaaaagtggacgcattctgtggcgggtccattgtgaatgagaagtggatagtgactgctgcacattgcgtggaaaccggagttaagatcacggtggtggcaggggaacataacattgaagagactgaacataccgaacaaaagcgaaatgtgattagaataatccctcaccacaactacaatgcagcaatcaacaagtacaatcacgatattgctctgttggaactggacgaaccattggtgctgaattcgtacgtcaccccaatctgtatcgcggacaaggaatacaccaacatctttcttaagtttggaagcggttacgttagcggttggggccgcgtgttccataaaggcagatccgcgcttgtcctccaatacttgcgcgtcccactggtggatcgcgctacgtgtcttaggtcaaccaagtttaccatttacaacaatatgttttgtgccggatttcatgagggcggaagagacagctgccaaggggactcgggcgggccccacgtaactgaagtcgaaggtactagcttccttacggggattatcagctggggcgaagaatgcgctatgaagggaaagtacggaatctacactaaagtgtcaagatacgtgaattggataaaagaaaagactaagctgacc

SEQ ID NO: 2522 - DNA, 1383 bp, Artificial Sequence
  derived and/or modified sequence
atgcagagagtgaatatgatcatggctgaatcccccgggttgatcactatttgtctgcttggatatctcctttccgcagaatgcactgtctttctcgatcatgaaaatgccaacaaaatcttgaacaggcctaagaggtataactcaggaaaactcgaagaattcgtccaggggaatctggagagagaatgcatggaagaaaaatgttcattcgaagaagctagggaagtgtttgaaaacacagaacggacaactgagttttggaaacagtacgttgatggagatcagtgtgaatcaaacccctgcctgaatggaggatcttgcaaggacgatataaattcctacgaatgttggtgtcccttcggatttgaagggaagaactgcgaattagatgttacttgtaacatcaagaatgggaggtgtgagcagttttgtaaaaattcagctgataacaaagtcgtctgttcttgtactgaaggatatcggctcgccgaaaatcagaaatcttgcgaacctgctgtgccatttccatgtggaagagtctcagtatcccagacaagtaaattaactagggccgagacagtgttcccagatgtggattacgtcaattcgactgaagccgaaactatacttgataatatcactcagtcaactcagtctttcaatgattttacacgcgtggtgggaggggaggatgccaaacccgggcagttcccttggcaggtagtgttaaatggaaaagtcgatgctttctgtggagggtccatcgtcaacgaaaaatggatcgtcacagctgcacattgcgtggaaactggggtgaaaataacggtagtggctggagagcataatatcgaagaaacagagcacactgagcagaaacggaacgttatacgaatcatcccacatcacaactacaacgccgcaattaacaaatataatcacgacatagcccttctagaactcgatgaaccactggtgcttaattcctatgtgactcctatctgcatagccgataaggaatatacaaatattttcctcaagttcggatccgggtatgtctctgggtgggggcgagtgttccataaagggagatctgctcttgtgctccagtacctacgggtgcctctcgtagatagagccacttgtctcaggagtactaaattcactatatataacaatatgttctgtgctggatttcatgaagggggaagggattcatgtcaaggagattccgggggacctcacgtgactgaagttgaaggaacttcgttcctcacagggattatatcttggggagaggaatgcgcaatgaaagggaaatatggaatttatacaaaagtctcccggtatgtcaattggataaaagagaagactaaactcaca

SEQ ID NO: 2523 - DNA, 1383 bp, Artificial Sequence
  derived and/or modified sequence
atgcagcgcgtcaatatgatcatggctgaaagcccgggcctcattaccatctgcctgctgggatacttgctttccgcagagtgtaccgtctttcttgaccatgagaatgccaacaagatactcaatcggccgaagcggtacaactcgggaaagctcgaggaattcgtgcagggaaatctggaacgcgagtgcatggaagagaagtgttcattcgaagaggcacgggaagtgttcgaaaacaccgaacggacgactgagttttggaagcagtacgtggacggcgatcaatgcgagtcgaacccttgcctgaacggcggcagctgcaaagatgatatcaacagctacgaatgttggtgccctttcggttttgaaggtaagaactgcgaacttgacgtgacctgcaatatcaagaacggaaggtgcgagcagttctgcaaaaactccgctgacaacaaggtggtgtgttcctgcactgaaggttatcgcctggccgaaaaccagaagtcctgcgagccagccgtgccgttcccttgtggacgtgtgtcggtgtcccagacctcgaagctcacccgtgctgaaactgtgtttccggacgtggattacgtgaactcaactgaggccgaaactattctggacaacatcacccagtccacccagtcgtttaatgacttcactcgggtcgtcggtggggaggatgcgaagcctgggcaattcccgtggcaagtggtgctcaatggcaaggtggatgccttctgcggaggttcgatcgtgaacgagaaatggattgtgactgccgcgcattgtgtcgagactggagtcaaaatcacggtggtggcgggcgaacacaatatcgaggagactgaacataccgaacagaagcgcaatgtcattcggatcatccctcaccacaactacaatgccgcgatcaataagtacaaccacgatatcgcgctgcttgagctggacgaaccattggtcctgaactcgtacgtgacgccaatctgcatcgcggacaaggagtacacgaacatcttcctgaagttcgggtccggatacgtgtcgggctggggccgcgtgtttcacaagggccgcagcgcactggtgctccaatacctcagggtcccgctcgtggaccgggcaacttgccttcggtccaccaagttcaccatctataacaacatgttctgcgccggattccacgaaggggggcgcgattcctgccagggcgactcaggtggcccgcacgtgaccgaagtcgaaggaacgtccttcctcaccggaatcatttcatggggcgaggagtgcgctatgaagggaaagtacgggatttacacgaaagtgtcacggtacgtcaattggatcaaggaaaagaccaagctcacc

SEQ ID NO: 2524 - DNA, 1383 bp, Artificial Sequence
  derived and/or modified sequence
atgcaacgggtgaacatgattatggctgagagccccggcctgatcacaatatgtctccttgggtacctgctgagcgctgaatgtaccgtattcctagaccacgaaaatgccaataagattttaaaccggccgaaaagatacaactctgggaaactggaagagttcgttcaaggcaatcttgaacgcgaatgtatggaggagaagtgctctttcgaggaggcaagggaggtatttgagaacaccgagcgcaccaccgagttctggaagcagtatgtggatggggatcaatgtgagtcaaatccgtgtctgaacggtggatcttgcaaagacgacattaacagctacgaatgttggtgccctttcggctttgagggaaagaattgcgagttagatgtgacatgtaacataaaaaatggacggtgcgaacagttttgtaaaaactcggccgataataaagtggtatgttcctgcaccgaggggtacaggcttgctgagaaccagaagagctgtgaacccgcagtgcctttcccctgcgggagagtcagtgtgtctcagacctccaaactgaccagagcagagacagttttcccggacgtggactacgtcaacagcactgaggcagagaccatcctggacaacataactcagagcactcagagtttcaatgactttaccagagtggtaggcggagaggatgctaagccgggccagtttccatggcaggtggtcctgaacggtaaagtggatgccttttgtgggggctccatcgtgaacgaaaagtggatcgtaaccgcggcccactgtgtagagaccggcgtaaaaataacagtggtcgccggggagcataacatcgaagagaccgagcacacagagcaaaaacggaacgtgatcagaattatacctcaccacaactataatgcggccatcaataagtataaccatgacatcgcactgctggaactggacgaaccactggtgctcaatagttacgtgactcctatttgtatcgccgacaaggaatacacaaatatttttctgaagttcggcagtggttacgtgtccggatggggacgtgtcttccataaaggaaggagcgcccttgttctccaatacctgagagtgccacttgtagaccgcgcgacttgcctacgaagtaccaagttcacaatctacaacaacatgttttgcgctggatttcatgagggcgggcgggactcctgccagggagatagcggaggcccgcacgtcacagaggtcgagggtacttcattccttactggcatcataagctggggagaggaatgcgccatgaagggcaagtacggcatttatacaaaggtaagtagatacgtcaactggatcaaagaaaaaacgaaattaaca

SEQ ID NO: 2525 - DNA, 1383 bp, Artificial Sequence
  derived and/or modified sequence
atgcaacgtgttaacatgattatggcagaaagtccaggacttataacaatatgccttcttggatatcttttatcagcagaatgtactgtgtttcttgatcatgaaaatgctaacaagattttgaatagacctaaacgttataactctggaaaattagaagaatttgttcaaggaaatcttgaaagagaatgtatggaagaaaaatgttcatttgaagaagctcgtgaagtttttgaaaatacagaaagaacaactgaattctggaaacaatatgttgatggagatcaatgtgaaagtaatccatgtttgaatggaggatcatgtaaggatgacatcaattcatatgaatgttggtgtccatttggttttgaaggaaaaaattgtgaattagatgttacctgtaatataaaaaatggacgttgtgagcaattttgtaaaaactcagcagataataaggttgtttgttcatgcacagaaggatatagattagcagaaaatcaaaaaagttgtgaaccagcagttccatttccttgtggaagagtatcagtatcacaaactagtaagttaacaagagcagaaactgttttcccagacgttgattacgttaattccacagaagctgaaactattttagataatattacacaaagtacacaaagttttaatgattttactcgtgttgtaggaggggaagatgcaaaacctggacaatttccatggcaagttgttcttaatggaaaagttgatgcattttgtggtggaagtattgttaatgaaaaatggattgttacagctgcacattgcgttgaaacaggtgttaaaataactgttgttgctggagaacataatattgaagaaacagaacatacagaacaaaaaagaaatgtaatacgaattattccacaccataattataatgctgctattaataaatataatcatgatatagcattgttagaactagatgaacctttagttttgaattcttacgttactcctatttgcattgctgataaagaatatactaatatctttcttaaattcggaagtgggtatgtttcaggttggggtagagtatttcataaggggcgttcagctttagtattacaatatttaagagttcctttagttgatagagctacatgccttagaagtacaaagttcacaatttataataatatgttttgtgcaggtttccatgaaggaggtagagattcatgtcaaggagatagtgggggaccacatgtcactgaagtagaaggaactagttttttaactggtataatttcatggggagaagaatgtgctatgaaaggaaagtatggaatatacactaaggtgtcacgttatgttaattggattaaggaaaaaacaaaactaaca

SEQ ID NO: 2526 - DNA, 1383 bp, Artificial Sequence
  derived and/or modified sequence
atgcagagagtgaatatgattatggcggaatcgcctggcctgataactatttgccttcttgggtacctcttgtccgccgagtgcaccgttttccttgaccatgaaaatgcaaacaagattctgaataggccgaaaagatacaactcaggcaaattggaggagtttgtgcagggaaatcttgagagagaatgcatggaggagaagtgttcgttcgaagaggcccgcgaggtctttgaaaatactgagaggactactgagttctggaagcagtatgtcgacggggaccaatgtgagtccaacccttgtctgaatgggggcagctgtaaggacgatatcaattcatacgaatgttggtgcccctttggttttgaagggaagaattgtgaacttgacgttacgtgtaacattaagaatggacgttgcgagcaattctgcaagaactccgcagataacaaggtcgtgtgctcctgtactgaaggttaccggctggctgagaaccagaagagctgtgagcccgctgtgcctttcccatgtggccgcgtgagtgtttcgcaaaccagtaagttgactagagcagaaaccgtgtttcccgatgtggattacgtgaactctactgaagccgagacgatccttgataacataactcagtcgacccagagcttcaatgattttacgcgggtcgtgggtggagaggacgcaaaaccaggacaatttccttggcaggtcgtgctgaacgggaaagtggatgccttttgcggtggatcgatcgtgaacgaaaaatggatcgtaaccgcggcgcattgtgtcgaaacgggcgtgaagataaccgtggtcgcaggggaacataacatagaggaaacggaacacaccgaacaaaagcggaatgttattcgcattatcccacaccacaactacaacgcggctattaacaagtacaaccatgatatcgcccttctcgagctggacgaacccctggttcttaacagctacgtgacgccaatctgtatcgcagacaaggaatacactaacatatttctcaagtttggtagcggatatgtctcgggatggggtagggtgtttcataaggggagaagcgccctcgtgctccagtacctgcgcgtgcctctcgtggatcgcgcaacctgtctgaggtcgaccaagtttactatctacaataacatgttttgcgcaggcttccacgaaggcggtcgggattcgtgtcagggtgattcaggtggccctcatgtgactgaagtggaagggacctcttttctgactggtatcatttcatggggagaggaatgcgcaatgaagggcaagtacggaatttacactaaagtctcgcgatacgtgaactggattaaggaaaaaaccaaactgacc

SEQ ID NO: 2527 - DNA, 1383 bp, Artificial Sequence
  derived and/or modified sequence
atgcagagggtaaatatgataatggccgagtcccccggtttgataacgatttgtttgctcgggtaccttctgtctgcggagtgcacagttttcctggatcatgaaaacgcgaacaagattctaaaccgacccaaacgatacaactctggcaagctggaggagttcgttcagggaaaccttgaaagggagtgtatggaagaaaaatgctccttcgaggaagcgagagaggttttcgaaaacacagaacgtactactgagttttggaagcagtacgtggacggcgaccagtgcgagagtaacccctgcttaaacggaggctcctgcaaagatgatattaactcatacgaatgttggtgcccatttggattcgagggcaagaattgcgaattggatgtgacctgcaacataaaaaacgggaggtgcgaacagttctgtaagaattcagccgataacaaggtggtctgttcatgtaccgaaggctaccgactggcagagaatcagaagagttgtgagcctgccgtcccattcccctgcggcagagtgagcgtctcccagacgagcaaacttacacgggctgagacagtcttccccgatgtggattatgtcaactccaccgaggcagaaacaattttagacaacattacacagtctacccagtcgtttaatgacttcactcgagtcgtcggaggggaagacgctaaaccaggccagtttccctggcaagtggtgttgaatggcaaagtagatgcattttgtggtggatcaattgtaaatgagaagtggatcgttaccgccgcccactgcgttgaaactggagtcaagatcactgtggttgctggggaacataacatagaagaaacggaacacaccgagcagaaaaggaatgttattcgaataattcctcatcacaactataatgcagcaattaacaagtataatcacgacatcgcactactggagctcgatgagccactcgttctaaactcgtacgttacgcctatatgcatagctgataaagaatatacaaacattttccttaaattcggaagtggctatgtgtccgggtggggcagggtgttccacaagggacgtagcgcgctggtcctgcagtacttgagggtgccattggtcgacagagccacctgcctgaggtcgaccaaatttaccatttataacaatatgttttgcgccgggtttcatgagggcggcagagatagctgccagggagacagcggcggtcctcacgtaaccgaagtcgagggcacttcattcctgacaggtattatttcttggggggaggaatgtgctatgaaggggaaatatggcatctacacaaaagtcagtaggtacgtgaattggatcaaagaaaaaacaaagctcact

SEQ ID NO: 2528 - DNA, 1383 bp, Artificial Sequence
  derived and/or modified sequence
atgcagagagtcaatatgatcatggccgagtcacccgggctgataaccatctgccttctgggatacttgctgtccgccgagtgcaccgtgttcttggaccacgagaatgcaaacaagattctgaatcgccccaaaaggtacaatagcggaaagctggaagagttcgtgcagggaaacctggaacgtgaatgcatggaggaaaagtgctcgttcgaagaggcgagagaggtattcgagaataccgaacggaccactgaattctggaagcagtacgtggatggggaccagtgcgagtcgaacccttgtctgaacggcggatcctgcaaggacgacatcaacagctacgaatgttggtgtccgttcggatttgaaggaaaaaactgtgagctcgatgtcacttgcaacatcaagaacggacgctgcgagcagttttgcaagaattcggcggacaacaaggtggtgtgctcttgtacggaaggatatcgcctggctgagaaccagaagtcatgcgagcctgccgtgccgtttccgtgcggcagggtgtcggtgagccagacctcgaagttgacccgcgcagagactgtgttccccgacgtggactacgtgaactcaacggaggcagaaactatcttggataacatcactcagtcgactcaatcattcaacgacttcacccgggtggtcggaggcgaagatgccaagccaggacagttcccgtggcaagtcgtgcttaacggcaaggtcgatgccttttgcggcggaagcatcgtgaacgaaaagtggatcgtgaccgccgcgcactgtgtggaaaccggagtcaaaatcaccgtggtggcaggcgaacacaatatcgaggaaaccgaacacaccgaacagaagcgcaatgtgattcgcatcatcccacatcacaactacaacgccgccatcaacaagtacaaccatgacattgccctcctcgagctcgatgaacccctggtgctgaactcctacgtgaccccaatctgtatcgctgacaaggaatacaccaacatcttcctgaagtttgggtccggctacgtgtctggttggggtcgggtgttccataagggtaggagcgcgctggtgctgcagtacctgcgcgtgccactggtggatcgagccacttgcctgcgctcgaccaagttcaccatctacaacaatatgttctgcgcgggcttccatgaaggcggacgggattcatgtcaaggggactccggaggacctcatgtgaccgaggtggagggcaccagcttcctcaccgggatcatttcctggggagaggagtgcgcgatgaaaggcaaatacggaatctacactaaggtgtccaggtacgtgaactggatcaaggaaaagacgaaacttacc

SEQ ID NO: 2529 - DNA, 1383 bp, Artificial Sequence
  derived and/or modified sequence
atgcagagagttaacatgatcatggcagagagtcccgggctgatcactatctgcctgctgggctacctcctgagcgcggaatgcacagttttcttggatcatgagaacgccaataagatcctgaaccggccaaaacgctacaatagcggcaaactagaggagttcgtccagggtaatctggagcgtgagtgcatggaggagaagtgcagttttgaagaggcacgagaggtattcgagaacaccgagcggacaacggaattctggaagcagtatgtagacggcgatcagtgcgagtcaaatccctgcctaaacggcggatcctgcaaggatgatatcaacagctatgaatgctggtgcccgttcggttttgagggcaaaaattgcgaattggatgtgacgtgcaacataaaaaatggccgctgcgagcagttttgcaagaatagcgccgataataaggtggtgtgttcttgtacagagggttaccgtcttgcggaaaatcagaagagttgcgagccggctgtaccatttccgtgcggacgcgtgtcagtgtcacagaccagcaagctgactagagctgagaccgtattcccagatgtcgattacgtgaattcaacagaggccgaaactatcctggacaatattactcagtccactcagagcttcaatgactttacgcgcgtggtggggggcgaggatgcaaagccgggccagtttccctggcaggtcgtcctgaatggaaaagtggacgccttctgtggcggaagcatcgttaatgagaagtggattgtgaccgccgctcactgcgtggaaacaggggtgaaaattaccgtggtggccggcgagcacaatatcgaagaaaccgagcacaccgagcaaaagcgaaatgtgatacgcattattccacaccataactacaacgcagcaattaataagtacaaccatgacatcgccctgctcgagctggatgagcccttggtcctgaattcgtacgttacgcctatttgcatagcggacaaggagtacaccaatattttcctaaagtttggttcgggttacgtgtcgggctggggacgagtttttcacaagggacgctccgccctggtcctgcagtacctgcgcgttcccctcgtggacagagccacctgcctccgaagtaccaagtttaccatttacaataacatgttctgcgctggctttcacgagggcggacgtgatagctgccagggtgattccgggggaccccatgtaacagaagtggaaggcacgtccttcctaactggcattatatcgtggggagaagagtgcgcgatgaagggaaagtatggaatatacaccaaagtctcgcgctacgtgaattggattaaggaaaagactaagctgacc

SEQ ID NO: 2530 - DNA, 1383 bp, Artificial Sequence
  derived and/or modified sequence
atgcagagagttaacatgatcatggctgagtcccctggactcatcaccatttgcctattggggtacctcctgagtgcagagtgcaccgtgttcctggaccatgagaatgccaataaaattttgaaccgtcccaaaaggtacaactccggcaaactagaagaattcgtgcaaggtaacctggagagagaatgcatggaggagaagtgcagtttcgaagaggctcgagaggttttcgagaacaccgaaaggacaactgaattctggaagcagtatgttgacggagatcagtgtgagagcaatccttgcctcaacggcgggtcttgtaaagacgatattaatagctacgaatgctggtgcccctttggcttcgaaggcaagaattgtgaactcgacgtgacgtgcaacatcaagaatggccgatgcgagcagttttgcaaaaattcagctgataacaaggtcgtttgctcatgcacggagggttaccgactggcagagaaccagaagagctgcgaaccggcagttccgtttccgtgcggacgtgtgagcgtctcccagaccagcaagttaaccagggcagagacagttttccccgacgtggattacgtcaacagtactgaggcagaaaccatactggacaacatcacacaatccacccagtcattcaacgacttcacccgtgtagtgggcggagaagacgcaaagcctggccaattcccctggcaagtcgtcctgaacggaaaggtggacgcgttctgcggaggttcaatcgtgaacgagaagtggatcgtcacggccgctcattgcgttgagactggcgtgaaaataaccgtggtggcaggggaacacaatatagaagagacagaacatacggaacagaagagaaatgtcatccggatcattccccaccacaattataacgctgccattaacaagtacaaccacgatattgcactcttagagctggacgagcctctcgttctaaatagctacgttacaccaatttgcattgctgataaagagtacacgaacatcttcttgaaattcggctcaggttacgtgtccggctggggcagagtttttcacaaaggaagatcagctctggtgctgcagtaccttcgtgtgcctttggttgatcgtgccacttgcctaagatccactaagttcaccatctataataacatgttctgcgcaggctttcacgagggcgggcgggattcctgccagggagactctggaggtcctcacgtgacagaggtggaaggtacttcgttcctcacaggcataataagctggggagaagaatgcgcaatgaagggtaagtatgggatttacaccaaagtgtctcgctacgttaactggattaaggaaaaaacaaaactgact

SEQ ID NO: 2531 - DNA, 1383 bp, Artificial Sequence
  derived and/or modified sequence
atgcaacgcgtgaatatgatcatggccgagtcgcctgggttgataacgatttgtctgctgggatacctgctctccgcggagtgtactgtgtttctggatcatgagaatgcgaacaaaattctgaacagacctaaacggtacaatagcggtaaattggaggaattcgtgcaaggaaatctcgaacgagaatgcatggaagagaagtgctcattcgaagaagcaagggaggtgttcgaaaataccgagcgcacgactgaattctggaagcaatacgtcgacggagatcaatgtgagtccaatccatgcctcaacggagggtcctgcaaggatgacatcaattcatacgaatgttggtgtccatttggattcgaaggaaaaaactgcgagctcgatgtgacctgcaacatcaagaacggacgctgcgagcagttttgtaaaaactccgcagacaacaaggttgtgtgtagctgtactgaagggtacagactggcagagaaccagaagtcctgtgaaccagcagtacctttcccctgtggcagagtgtccgtatcgcagacttcgaagctgactcgggctgagactgtctttcctgatgtggactacgtgaactcgaccgaagcagagactattcttgataacataacgcagtccactcaatcattcaacgattttaccagggtggtgggaggtgaagatgctaagccgggacaatttccctggcaggtcgtgctgaacgggaaggtggatgctttttgtgggggatctattgtcaacgaaaagtggatagtgaccgcagcccactgcgtggagactggtgtgaagattactgtggtggccggtgaacataacattgaagaaactgagcataccgaacaaaaaaggaatgtaattcgtatcatcccacatcataactacaacgcagcgattaacaagtacaatcacgacatagcccttcttgaacttgatgagcctctggtgcttaactcgtatgtgacccccatttgcatcgcagacaaggaatacaccaatatctttctcaagtttggcagcggatacgtgtcggggtggggacgggtctttcataagggccgttcggccctggtgctccaataccttagagtgccacttgttgatagagcaacctgtcttagatctacgaaattcaccatttacaataacatgttctgtgctgggtttcacgaagggggccgggacagctgtcagggggattcaggtggtcctcacgttaccgaagtcgaaggcacgtcgtttcttaccggaattatcagctggggcgaagagtgtgcaatgaaaggaaagtacggtatctacactaaagtttcacgatatgtcaattggataaaggaaaagacgaagctcacc

SEQ ID NO: 2532 - DNA, 1383 bp, Artificial Sequence
  derived and/or modified sequence
atgcaaagagtgaatatgataatggctgaaagccccggattaatcacaatttgccttcttggctacctgctaagcgccgaatgtaccgtcttcctggatcacgagaacgctaataagatactgaaccgacccaagcgctacaatagtggtaagctggaagagttcgttcagggtaacttggaacgagagtgtatggaagaaaagtgcagttttgaggaggctagggaggtatttgagaatacagagcgaacaacagagttctggaaacaatatgtggatggggaccaatgtgaaagcaatccctgcttaaacggcggctcatgtaaagacgatataaacagctatgaatgttggtgtccctttggattcgagggaaaaaattgcgaactcgacgtgacatgcaatatcaagaacgggcggtgcgaacagttttgtaaaaacagcgcggacaacaaagtggtgtgttcgtgtacagaggggtacagactggcagagaaccaaaagtcttgtgagccagccgtgccctttccttgcggacgggtgagcgtgtcacagacatcgaaactgacgcgggcggaaacagtgttcccggatgtggattacgttaattctaccgaagctgaaaccatactggataacattacacagtccacacagagcttcaacgactttactcgggtggtgggaggagaagacgccaaacctggacagttcccctggcaggtggtgctcaatggaaaagtcgacgccttctgtggaggttctatcgtgaatgagaagtggattgtcaccgcagcccactgtgttgaaacaggggtgaaaattacagtcgtagccggcgagcataacatagaggagactgaacacacagagcagaagcgaaacgtaataagaatcattccacaccacaactacaacgctgcaattaataagtacaaccacgatatcgccctgcttgaactagacgaacccctcgtgcttaactcctacgttacgcccatctgtattgccgataaagagtataccaatatcttccttaagtttggctctgggtacgtgtcggggtggggcagagttttccacaaggggcgttcagccctggtgttgcagtacctccgcgtgcctctggtcgatcgggcaacatgcctaagaagcactaagttcaccatttacaataatatgttctgcgcggggttccacgaagggggacgcgatagctgccaaggggattccgggggaccacatgtgaccgaggtggaaggaacctccttcctcaccgggattataagttggggggaagagtgtgccatgaagggaaagtatggcatatacacgaaggtctcgagatacgtgaactggatcaaggaaaaaaccaagctaact

SEQ ID NO: 2533 - DNA, 1383 bp, Artificial Sequence
  derived and/or modified sequence
atgcagcgcgtcaatatgatcatggctgagtctccaggtctgataaccatctgcctccttggatatttattatccgctgagtgtaccgttttcctggaccatgagaatgccaataagattttaaaccgacctaagaggtataacagtggcaaactcgaagaatttgtgcaaggaaacttggaaagagagtgcatggaggaaaaatgttcgttcgaagaagcccgggaggtgtttgaaaatactgagcgaactactgaattctggaaacagtatgtggacggcgatcaatgcgaaagcaacccttgcctgaacggcggctcttgtaaagacgacataaactcttatgagtgttggtgcccctttggcttcgagggcaaaaactgtgagctcgacgtgacttgtaatatcaaaaacggaaggtgcgaacagttttgcaagaatagtgcagacaataaggtggtgtgctcctgcaccgagggttaccggttagccgaaaatcagaagagttgcgaacccgcggtgccctttccttgtggacgcgtcagtgtcagccagaccagcaaactcacccgcgccgagacagtgtttcctgatgtggattatgtgaatagtacggaggctgagacaatacttgacaatatcacacagtcaacccagagcttcaatgactttaccagagtcgtaggcggagaggacgcaaaacccgggcaatttccttggcaggtggtgctcaatggtaaggtcgacgctttctgcggtggctctatagtcaacgaaaagtggatcgtcacagcggcacactgtgtcgaaacaggagtgaaaattacggtggtggccggtgagcacaatattgaagaaacagaacatacagagcaaaagcggaacgtcatacgaatcatcccacatcacaattataacgccgccattaataagtacaatcatgatatagcgctgctcgaacttgacgaacccctcgtcctcaactcatacgtaacacctatctgtattgccgacaaagagtacactaatattttcctgaaattcggaagcggctacgtctctggttgggggagagtctttcataaggggcgatcagccttggtgctccaatacctccgggtccctctcgttgatagagccacctgcttgcgctccaccaagttcacaatctacaataatatgttctgcgcaggattccatgagggaggcagagatagctgccaaggggattctggcgggccccacgtgactgaagtcgaaggaacttcctttttgactggcataattagttggggagaagagtgcgctatgaagggcaaatatggcatctatacgaaggtgagccgctatgtaaattggataaaggagaaaacaaagcttact

SEQ ID NO: 2534 - DNA, 1383 bp, Artificial Sequence
  derived and/or modified sequence
atgcagcgggtcaatatgattatggccgaatctcctgggctgattaccatctgcctgctgggctatctcctcagtgccgaatgcacggttttcctggatcatgaaaacgcgaataagatactgaataggcccaaaagatataatagtggcaagctggaggagttcgttcagggaaacctggagcgcgagtgcatggaggagaaatgctcatttgaagaagccagggaagtttttgagaatacggagaggacgactgaattctggaagcagtacgtggatggagatcaatgtgagagcaacccctgcttgaacggtggatcctgtaaggacgacataaatagctacgagtgctggtgtccctttggattcgagggaaaaaactgtgagcttgacgtcacctgcaacattaagaatgggcgctgtgaacagttttgcaaaaactccgccgacaataaggtggtctgttcatgcacagaaggctacagactcgctgagaatcagaagtcatgtgaaccagccgtcccatttccctgcgggcgcgtgtccgtgtcccagacttccaagctcacccgagcagagaccgtgtttccagacgtggattatgtaaattccactgaggcggagaccatacttgacaatattacccagagcacccagagctttaacgatttcactcgggtagtgggcggtgaggatgctaaaccgggacagttcccgtggcaggttgtcctgaacggcaaagtggatgctttctgtggtggaagtatagtgaatgaaaaatggatcgtcacagccgcgcattgtgtcgaaactggagtcaagataacagttgtcgccggcgagcacaatatcgaagaaaccgaacatacggagcagaagcgaaacgttataagaattataccacaccataattacaacgccgccattaataagtacaatcacgacatcgcccttctggaactcgacgaacctctggtcttgaacagctacgtcactcccatctgcattgcagacaaggagtatacgaacatattcctgaagttcgggtccggatatgtgagcggttgggggcgggtgtttcacaagggaagatctgctctcgtactgcagtacctccgggtgcctctggtggatagagctacttgcctgcgatccacgaagtttacgatttataacaatatgttttgcgcaggattccacgaagggggccgcgactcctgccagggggatagcggtgggccgcatgtgaccgaggtagaagggacctcatttctgactgggattataagttggggggaggaatgtgccatgaagggtaagtacggtatttatacaaaagtcagtcgatatgtgaactggataaaggaaaaaactaaactgaca

SEQ ID NO: 2535 - DNA, 1383 bp, Artificial Sequence
  derived and/or modified sequence
atgcagcgggtgaatatgatcatggctgagtctcccggcctgataacaatctgcctcctgggctatctgctgagcgctgagtgcacagtctttctcgatcacgaaaacgctaataaaatcctgaaccgtcccaagaggtacaacagcgggaagctggaagagttcgtgcaaggaaaccttgagcgagaatgtatggaagaaaagtgttcattcgaggaggctcgtgaggtattcgagaatactgaacggaccaccgaattctggaaacagtacgtggacggcgatcaatgtgaatctaacccatgcctcaatggtggaagttgcaaggatgacattaacagttatgaatgctggtgtccttttggttttgagggaaagaattgcgaacttgatgtgacctgtaatattaagaacgggcggtgtgagcagttctgcaagaattctgcagacaataaagtcgtgtgctcgtgcacagaagggtatagactggctgagaaccagaagtcttgtgagcctgccgttccgttcccatgtggccgcgtgtctgtttcccaaacatcaaaacttacaagagcagaaacggtattccctgatgtagactatgtgaactctaccgaggccgagaccatactggataacattacacagagcacccagagtttcaatgactttacaagggtcgtaggaggagaggatgccaaacctggccagttcccatggcaagtggtactgaacggaaaggtggacgctttctgtggaggaagtatagtgaatgagaaatggatcgtgaccgccgctcactgtgttgagacgggagtcaagataaccgtggtggccggggagcacaatatcgaggagaccgagcacactgaacagaaacgcaatgtgataaggattattcctcaccataactacaacgccgctatcaacaaatacaaccatgacatcgccctgcttgaacttgatgagccattggtactgaactcgtacgttactcctatctgtatcgccgacaaagaatacacaaatatcttcctgaagtttggctccgggtacgtcagcgggtggggaagggtgttccacaaaggacgcagcgcgcttgtgctacagtatctgagagtacccctcgtggaccgggcaacttgcctcaggtctacgaagttcacgatctacaataacatgttctgcgccggttttcatgaggggggtcgggattcctgtcaaggcgatagtgggggacctcacgttactgaggttgagggcacttcctttttgaccgggattatcagttggggcgaggagtgcgccatgaagggtaagtacggcatctacacaaaagtctctcgatatgtcaactggattaaagaaaagacaaagctgacg

SEQ ID NO: 2536 - DNA, 1383 bp, Artificial Sequence
  derived and/or modified sequence
atgcaaagggtgaacatgatcatggctgaatcaccagggctgatcactatctgtctcctgggataccttttaagcgcagaatgtaccgttttccttgaccatgaaaatgctaacaagatactgaatagacctaaaagatataactctggaaaactcgaggaattcgtgcagggcaatctggagcgcgaatgtatggaagagaaatgttcatttgaggaggcacgggaggtattcgagaatacagaaagaaccacggagttctggaagcagtatgtagacggggatcaatgtgagagtaatccatgtctgaacgggggttcctgtaaggatgacattaattcatacgaatgttggtgcccattcggtttcgagggaaagaactgtgaactcgacgtcacctgcaacatcaaaaacggacgctgcgaacaattttgtaaaaacagcgccgataataaagtggtgtgttcttgtaccgaagggtaccggctcgcggagaaccagaaatcttgcgaacccgccgttccgttcccttgcggccgagtgtcagtgagtcagacatccaaactgaccagggctgagacagtattcccggacgtggattacgtaaattccacggaggctgaaacaattcttgacaatatcactcagtctacacagtcttttaacgacttcacacgggtcgtagggggagaggatgccaagcccggacagtttccctggcaggtggtactgaacggaaaggtggacgctttctgcgggggatctatagtgaatgagaaatggatcgtgacagctgcccattgcgtggaaacgggcgtcaagataactgttgtggctggggagcataatatcgaggagacggagcacaccgagcagaagaggaacgtaatacgcatcatccctcaccacaactacaatgctgcgatcaacaaatacaaccatgatattgccctcctggaactggatgaaccgttggtgctgaactcgtacgtgacccctatttgcattgccgacaaggaatacactaatatctttctaaagttcggatccgggtacgtgtccgggtggggtagggtgtttcataaaggtaggagcgccctggtgctccaatacttgagagtgcctctggtagaccgagccacctgcctgcgcagtacaaagtttacaatctataacaatatgttctgcgccggctttcacgaaggcggaagggactcctgccagggagactcaggcgggccgcatgtgacggaagtggaaggcactagcttccttaccgggattatctcatggggagaagagtgcgccatgaaaggcaagtatgggatttataccaaggtttcccgatatgtaaactggattaaagagaagacaaaactcacc

SEQ ID NO: 2537 - DNA, 1383 bp, Artificial Sequence
  derived and/or modified sequence
atgcagcgggtaaatatgataatggccgaaagtccgggcctcatcaccatctgtctcctcggctatcttctaagcgctgagtgcaccgtgttcttggaccatgaaaatgcgaacaaaatccttaaccgtcctaaaaggtataactccggcaagttggaggagttcgtgcagggaaacctggagcgagaatgtatggaggagaagtgctcctttgaggaagctcgggaggtattcgagaatacagaacggacaacggagttttggaaacagtacgtagatggggaccagtgcgaatcgaacccttgcctcaacggggggtcctgcaaggacgacatcaactcgtatgagtgttggtgccctttcggtttcgaaggcaagaactgtgaattggatgtgacatgtaacataaaaaacggcaggtgtgagcaattctgcaagaactccgcagataataaggttgtctgcagctgcactgagggttaccggctcgctgaaaatcagaagagttgcgaacccgctgtccctttcccttgtggccgtgtgtcggtttctcagacaagtaaactgactcgcgctgaaacagtattcccggatgtagactacgttaatagtacggaggccgagacaattttagataacatcacccagtccactcagtctttcaatgacttcaccagggtggttggtggcgaggatgccaagcctgggcagtttccctggcaggtggtcctcaatggtaaggtcgacgcattttgcggcgggtctatcgtgaacgaaaagtggattgtgaccgctgcccactgcgtggagacaggtgtgaagataacagtagtggcaggcgagcacaatattgaggaaacagaacacacagaacaaaagcgcaatgtgatacggattatcccacaccacaactacaatgctgcaatcaataagtataatcatgatattgccctgctggagttggacgagcctctggtccttaattcctacgttacgcccatctgtatagcagacaaagaatatacgaatatattcctcaagttcggctctggctacgtgagcggctggggacgggtttttcacaaaggtcgaagcgctctggtgctacagtatctgcgcgtccctctggtcgatagggccacatgtctacgatctacaaaattcaccatttacaataatatgttctgcgctgggttccacgaaggcggaagagattcctgccagggcgattcggggggacctcatgtgactgaggtagaagggacctcctttctcaccgggatcatctcttggggggaagaatgcgccatgaaaggcaagtatggaatttacacgaaagtctctcgctatgttaactggataaaagagaagaccaagctaacc

SEQ ID NO: 2538 - DNA, 1383 bp, Artificial Sequence
  derived and/or modified sequence
atgcagcgggtaaacatgataatggccgaatcccccgggctaatcactatctgtctcctgggatatttgctgtcagccgagtgcacagttttccttgaccacgagaatgcaaacaagatcctgaaccgccctaaaaggtataactctggtaagctcgaagagttcgttcagggaaatctcgagcgtgaatgcatggaagaaaagtgctcttttgaagaggccagggaagtctttgaaaacacggaaagaaccaccgaattttggaaacagtacgtcgacggagatcagtgcgagtccaatccctgtctcaatggaggaagttgcaaagatgatatcaactcctacgaatgctggtgccctttcggatttgaggggaagaactgtgagctggacgtcacctgtaacatcaaaaatggtcgctgcgagcagttctgcaagaattccgctgacaataaggtcgtctgttcctgcacagaggggtacagactggctgaaaatcagaaaagttgcgagcctgcagtgcctttcccttgtggcagagtgagtgttagccagaccagcaaattgacgcgggccgaaactgtgtttccggacgtcgattacgtgaactcaacggaggctgagacaattctcgacaacatcacacagagcactcaatcatttaacgatttcacgcgagtggtcggcggcgaagacgcaaagcccggccagtttccctggcaggtcgtcctgaacggcaaggtggatgccttctgcggggggtctattgtgaacgagaaatggatcgtgacagccgctcactgtgtagagaccggggtcaagataactgtcgtggcgggagagcacaacatagaggaaaccgagcacactgaacagaaacggaatgtgatacgaatcataccccatcacaattacaacgccgcaattaataaatacaaccacgatattgctttgctggagctggacgaacctttggtactgaactcctacgtgaccccaatctgtatcgcagataaagaatacaccaatatatttttgaagtttggctctggatacgttagcggctgggggcgtgtatttcataaaggtcgtagtgcgttagtactgcagtacctgagggttccactggttgatcgcgcaacctgcttgcgctcgaccaagtttaccatctacaataacatgttttgcgcgggattccatgaaggtggtagggattcttgccagggtgattcaggcggtccgcacgtcaccgaagtagaggggacatcctttcttaccggtatcatcagctggggcgaggagtgtgctatgaaggggaagtacggaatttacaccaaggtgtcaaggtatgttaattggataaaagagaaaacaaagctgacc

SEQ ID NO: 2539 - DNA, 1383 bp, Artificial Sequence
  derived and/or modified sequence
atgcagcgggtgaacatgatcatggccgagtccccgggtctgatcactatttgtctgctggggtacctgcttagcgcggaatgtacggtgtttctcgatcatgagaacgctaacaaaatcctgaacaggccgaagagatacaattcggggaagctggaggagtttgtccaaggaaacctggagcgggaatgcatggaagaaaaatgctcgttcgaagaggcccgcgaagtgttcgaaaataccgaacgtacgaccgaattttggaagcagtacgtggacggagatcagtgcgaatctaacccgtgtctgaacggagggtcatgcaaggatgacatcaactcgtacgaatgctggtgcccgttcggatttgaggggaagaactgcgaactggatgtaacttgtaatatcaaaaacggaaggtgtgagcagttctgcaaaaactccgctgacaataaggtggtctgctcatgcaccgaaggataccgcctcgccgaaaaccagaagtcgtgcgagcctgcggtccctttcccatgcggaagagtctcggtcagccagacctccaagctcactagagcagagactgtgttcccagatgtggactacgtgaactccaccgaagccgaaaccatcttggataacatcacgcagagcacgcagtcctttaatgacttcactcgcgtggtgggaggagaggatgccaaacccggccagttcccgtggcaagtggtgctgaacggaaaagtcgacgcgttctgtggaggatccatcgtcaatgaaaagtggatcgtgactgcagcccactgcgtcgaaaccggagtcaaaatcaccgtggtggccggagaacacaatatcgaggaaaccgagcataccgagcagaaaagaaacgtcatcaggatcatcccgcaccataactacaacgcagcaatcaacaagtacaatcacgatatcgctctgctcgagctggacgagcccctcgtgttgaattcatacgtgaccccgatttgcattgccgataaagaatatacgaatatcttccttaagttcggctctggctacgtgtcggggtggggaagggtctttcataagggacggtccgcactggtgctgcagtaccttcgcgtccccttggtcgaccgcgccacgtgtctcaggagcacgaagtttactatttacaacaacatgttctgtgcgggattccacgaaggagggagagacagctgccagggtgactccggcggaccgcatgtcaccgaagtcgaaggtacctcgtttcttactggaattatcagctggggagaggagtgcgcaatgaagggaaagtacggaatctacaccaaagtgagccgctacgtgaactggatcaaagaaaagactaaactcacc

SEQ ID NO: 2540 - DNA, 1383 bp, Artificial Sequence
  derived and/or modified sequence
atgcagagggtcaatatgatcatggcggagagtcctggtctgatcacaatctgcctcctcggttacctcttgtctgccgagtgcacagtttttctggaccacgagaatgctaacaagattctcaacagaccgaagcgctacaattctggcaaactcgaggagttcgtgcagggcaatctggagagagagtgcatggaagagaaatgctcatttgaggaggcaagggaagtcttcgaaaacactgaaagaaccacggagttttggaagcagtacgtcgatggtgaccagtgcgagtctaacccatgtcttaacggaggatcttgcaaagacgatatcaactcttacgagtgctggtgtccttttggattcgaaggaaagaactgcgagctggacgttacctgcaacatcaaaaacggtagatgcgagcagttttgcaagaacagcgcagataacaaggtggtgtgctcatgcacggagggctacagactcgctgagaaccagaagagctgcgagcctgctgtcccattcccctgcggaagggtcagcgtcagccagaccagtaagcttacccgcgctgagacagtgtttccggacgttgattacgtcaactctactgaagctgagaccatactggataacatcacccaatctactcagagctttaacgattttacaagagtcgtaggcggagaagatgctaagcccggtcaattcccctggcaagtcgttttgaacggaaaagtcgacgccttctgcggtggctctattgtcaatgaaaagtggattgttaccgctgcccactgcgtagagacaggcgtcaagataaccgttgttgccggtgagcacaacattgaagagacggagcacacggaacagaagaggaacgtaatccgcatcatccctcaccacaactacaacgccgcgatcaataagtacaaccacgacatcgcccttctggagctggatgaacccctcgtgctgaactcatacgtgacccctatatgtatcgccgataaggagtacacaaacatctttcttaagtttggaagcggatacgtgtcaggctggggccgcgtgtttcacaaaggcaggagcgctctggttttgcaatacttgagggtgcctctcgttgaccgcgctacctgtctgcgctcaactaagttcacaatctacaacaacatgttctgtgcgggttttcacgagggcggcagggattcctgtcaaggcgattccggcggcccccacgtgacggaggttgaaggaaccagcttcctcacaggaatcatctcttggggtgaggagtgcgcgatgaagggaaaatacggcatttacaccaaggtgtctcgctacgtgaactggatcaaggaaaaaaccaagttgacg

SEQ ID NO: 2541 - DNA, 1383 bp, Artificial Sequence
  derived and/or modified sequence
atgcaaagagtgaacatgataatggcggaatccccgggtctgattactatctgcctgcttggctacctcctttcggcagaatgtaccgtgtttctggatcatgaaaacgctaacaagatcctcaaccgcccgaaacgctacaacagcggaaagctcgaagaatttgtgcaaggaaatctggagcgggagtgcatggaagaaaagtgttcctttgaggaagcaagagaagtgtttgaaaacaccgaacgaactactgaattttggaagcagtatgtggatggtgatcagtgtgaatccaacccgtgtctgaatggagggagctgtaaggatgacattaactcctatgaatgttggtgtcctttcggtttcgaaggaaagaattgcgaactcgacgtgacctgtaatatcaaaaacggaagatgtgaacaattctgcaagaatagcgccgataacaaggtggtctgtagctgcaccgaaggatatagactggcagaaaatcagaaatcgtgcgagcccgccgtgccatttccttgcggtcgcgtctcagtttcacagacttcgaaacttacgagagcggaaactgtctttccagacgtcgactacgtcaacagcacggaagcagaaactattctggacaatatcacgcaatccactcaatcctttaatgatttcaccagagttgtgggtggcgaagatgccaaacctgggcagtttccttggcaagtcgtgctgaatggaaaagtggacgcattttgtggagggagcattgtgaatgaaaagtggattgtcaccgcggcacattgtgtggaaaccggcgtgaagatcaccgtcgtggctggggaacacaatatcgaagaaaccgagcacacggaacaaaagcgtaacgttatccggatcattccccatcacaactacaacgcagcaatcaataagtacaatcatgatattgctttgctcgagctggatgagcccctggttctgaattcgtacgtgactcctatatgtatcgccgacaaggaatacactaacatttttctgaaatttgggagcggttacgtgagcggttggggtcgtgtctttcacaagggcagatccgcacttgtcctccagtacttgcgcgtccctcttgtcgacagagcaacctgcctgcggtccaccaagtttactatctacaacaacatgttttgtgcagggtttcatgagggaggcagggatagctgtcaaggagatagcgggggcccacatgtgaccgaggtcgagggaactagcttcctgaccggaattatctcctggggagaagaatgcgcaatgaagggaaaatacgggatttacaccaaggtatcccggtacgtcaactggattaaagagaaaactaagctgacc

SEQ ID NO: 2542 - DNA, 1383 bp, Artificial Sequence
  derived and/or modified sequence
atgcagcgtgtgaatatgataatggctgaaagtcctggtctgattaccatctgcttactggggtacctgttatccgccgaatgtaccgtctttctcgaccatgagaacgctaataagatcctgaatcggccaaagaggtacaacagcggaaaactggaagagttcgtacagggtaatctggagagggaatgtatggaagagaaatgtagttttgaggaagctagggaagtgttcgagaataccgagcgcaccactgaattttggaaacagtacgtcgacggagaccaatgcgaatctaacccgtgcctgaatggtgggtcctgtaaagacgatattaactcctacgagtgctggtgccccttcggctttgaagggaaaaattgtgaactggacgtgacttgcaatattaagaacgggaggtgtgagcagttttgcaaaaattccgcagacaacaaagtggtctgcagctgcaccgaggggtatcgattggcagagaaccagaagtcatgcgagccagcggtgccatttccttgtggtagggtgagcgtgtcacaaaccagcaaacttacaagggcggagacggtgttcccagacgtggactacgtcaatagcaccgaagctgagacaatccttgataacattacccagtccacacagtcctttaatgattttactagggttgtaggcggagaagatgccaaaccgggccagttcccctggcaagtcgtgctgaacggaaaagtcgatgctttctgcggcggcagcatcgtaaacgagaagtggattgtcaccgcagcccattgtgtggagactggagtaaagattacggtggttgctggtgagcataatatcgaggagacagagcatacagaacaaaagcggaacgtaattcgaatcataccccaccataactataacgcggctattaacaagtacaatcatgatattgcgctgctcgaactggacgagcctctggttctgaacagttacgttacaccaatttgcatcgccgataaggagtataccaacatcttcctgaagtttggctcaggatatgtatctgggtgggggagagtcttccataagggtcgatcagcattagtgctccaatatctgcgagtgccattagtcgaccgagcaacctgcctgcgatctacaaagttcacaatatataacaatatgttctgtgctgggttccacgaaggcggcagggactcctgccagggggacagtggcgggcctcacgttactgaagtagaagggacgtctttcctgaccggaattataagctggggggaggagtgcgcaatgaagggtaagtatggcatttatactaaagtatctaggtacgttaattggataaaggagaagactaagttgacg

SEQ ID NO: 2543 - DNA, 1383 bp, Artificial Sequence
  derived and/or modified sequence
atgcaacgggtgaacatgatcatggcggagagccccggtcttattaccatttgtctgctcggatacctgctttccgcagaatgtaccgtctttctggatcatgagaacgcgaacaaaatcctcaacagaccaaagagatacaactcgggtaagctggaagaatttgtgcaaggcaatctcgagcgggaatgtatggaggagaagtgttcattcgaggaagcaagagaggtgtttgaaaacaccgaacgtacgactgaattttggaaacaatacgtggatggagatcaatgcgaaagcaacccttgcctgaatggcggctcgtgtaaggatgatatcaattcctacgaatgctggtgtccctttggatttgagggcaagaattgtgaactggatgtcacgtgtaacataaagaacggacgctgcgaacaattttgtaagaattcggcagacaataaggtggtgtgttcgtgcaccgaaggatacagattggcagaaaatcaaaagagctgtgagcccgcagtccccttcccctgtggtagggtttccgtgtcgcagactagcaagctcacgcgtgcagaaactgtgttccccgatgtggattacgtgaactccactgaggcggagacgattcttgataacattacccagtcaacccagtcgtttaacgatttcactagggttgtgggaggagaagatgccaaacctggtcagtttccttggcaagtggtcctgaatgggaaggtggatgccttttgcggtggctcaattgttaacgagaaatggattgtgaccgccgcgcattgtgtggaaactggagtcaagattacggtcgtggcaggagaacataacattgaggagactgagcacaccgagcaaaagagaaacgtgatccgcatcattcctcatcataactacaacgcagccatcaacaagtacaatcatgacattgcacttcttgaacttgacgaacccctggtgctgaactcctatgttacgccaatttgtattgccgataaggagtacaccaacatcttcctcaagtttggctcaggatatgtgtctggatggggcagagtgtttcataaggggaggtccgcactggtgcttcaatacctcagagtgccacttgtggaccgggctacttgtctccgttcgaccaagtttaccatctataacaacatgttttgtgcaggatttcatgagggtggtcgggacagctgccagggcgactccgggggacctcacgtgaccgaagtggagggaacttcctttctgaccggaattatctcctggggagaagaatgtgcaatgaaagggaaatacggaatttacactaaggtcagtagatacgtgaactggatcaaagaaaagactaagctgacg

SEQ ID NO: 2544 - DNA, 1383 bp, Artificial Sequence
  derived and/or modified sequence
atgcaacgtgtgaacatgattatggcagaatcgccgggacttataacgatttgcctccttggatacctcttgtccgcagaatgtaccgtctttcttgatcatgagaacgcaaacaagatacttaaccgccctaagagatacaacagcggtaagttggaagaattcgtccaaggtaatctggaacgcgaatgcatggaggagaagtgcagtttcgaagaagcaagggaagtgtttgaaaataccgagagaacgactgaattctggaagcaatatgtggatggtgaccaatgtgaaagcaatccatgtctgaatggtggttcgtgcaaggatgacataaacagttacgaatgttggtgtccattcggattcgaagggaagaattgcgagctcgacgtgacctgtaacattaagaacggtagatgcgagcaattttgtaagaacagcgcagacaataaggtcgtgtgctcgtgcaccgagggataccgtcttgcagaaaaccaaaagtcgtgtgagcccgcagtgcctttcccgtgtggaagagtgtcagtcagccagacgtccaaacttaccagggcagaaaccgtctttcctgacgtcgattacgtgaatagcaccgaagccgaaactatcctggacaatatcacccaatccactcaatcatttaacgattttactcgagtggtgggaggggaagatgccaaacctggtcagtttccatggcaagtggtgctgaacggtaaggtcgacgcattctgcggaggctcgattgtgaatgagaagtggatcgtgaccgcggcacattgcgtcgaaacgggagtgaagattacggtggtggccggtgaacataacattgaggaaactgaacatactgaacagaaaaggaacgtcattcgaattatccctcatcacaactacaacgcagcaataaacaagtacaatcacgatatagccctgcttgaactcgacgaacctcttgtgctcaactcctacgtgaccccaatctgtattgccgacaaggaatacaccaatatctttctgaagttcggttcaggatatgtcagcggctggggtagggtgtttcataagggaagatcggcactcgtcctgcaataccttcgggtccccctggtggacagggccacttgtctgcgtagcaccaagtttactatctacaacaatatgttttgtgctggattccatgaaggtggacgggattcctgccagggagactcgggagggccccacgtcactgaggtggaaggaacttcctttctcaccggaattatctcctggggtgaagagtgtgcgatgaaaggaaagtacgggatttacactaaagtgagcagatatgtgaattggatcaaggaaaagaccaaactcact

SEQ ID NO: 2545 - DNA, 1383 bp, Artificial Sequence
  derived and/or modified sequence
atgcagagggttaatatgatcatggcagagagcccaggactaataaccatctgtctcttgggctatctgctgagcgctgaatgtactgtcttcttagatcatgagaatgccaacaagatcctgaatcggcctaagcgatacaactccgggaagctagaggagttcgtgcaaggtaacctggaaagggaatgtatggaagagaaatgcagctttgaggaagcacgggaagtgtttgagaataccgagaggaccactgaattctggaagcagtacgtggacggtgatcagtgtgagtcgaatccttgcctgaacggcggtagctgtaaagacgatatcaattcctatgagtgttggtgcccctttggctttgaaggcaaaaactgtgaactggatgtcacctgcaacatcaagaacggtaggtgtgagcaattttgtaaaaacagcgcagacaataaagtcgtgtgtagttgcaccgagggctacaggttggccgagaaccagaagtcctgcgagcctgcggttccattcccatgcggtcgcgtctctgtatctcagacttccaaactgacccgagcagaaacagtgtttccagatgtcgactatgttaatagcactgaagctgagactatcctggacaatatcactcagtccacacagtcttttaacgacttcacgcgtgttgtgggcggggaggacgcgaagcctggtcagttcccttggcaagtcgttctcaatggaaaggtggacgctttctgcgggggttccatcgtgaatgaaaagtggattgtgacagcggcccactgcgttgagactggggtcaagattacagtggtggccggggaacataatatagaggagaccgaacataccgagcagaaacgcaatgtgatcaggattatcccccaccacaattataacgccgctatcaataagtacaaccatgacatcgccctattggaactggacgagccgcttgtcctgaacagctatgttactccaatctgtatcgctgataaggaatacaccaacatattcctaaaatttgggtccggttatgtctcaggttggggcagagtcttccacaagggtaggagtgcactggtgctgcaatacctgcgtgtgccactggtagacagggccacctgcctgaggtccactaaattcacgatctacaacaacatgttctgcgccgggttccacgaaggcggaagagatagctgtcagggtgattctggagggccacatgtgaccgaggtcgaagggacaagtttcctcactggcatcatctcttggggcgaagaatgcgcaatgaagggcaagtatgggatatatactaaagtgagccggtatgtgaactggatcaaggagaaaacaaagctgacc

SEQ ID NO: 2546 - DNA, 1383 bp, Artificial Sequence
  derived and/or modified sequence
atgcagcgcgtgaacatgattatggccgaaagcccgggactgatcactatatgtctgctgggctacctgttgagcgcagagtgcaccgtgttcttggaccatgaaaacgctaacaagatcctcaatagacctaagagatacaacagcgggaagctcgaggaatttgtccagggaaatctggaacgcgaatgcatggaggaaaagtgttctttcgaggaggctcgggaggtgttcgaaaacactgaacggaccacggagttttggaagcagtacgtcgatggtgaccagtgcgaatcaaatccatgcctcaacggaggtagctgtaaagacgatatcaacagctacgagtgctggtgtccgttcgggttcgaaggaaagaattgcgaactcgatgtgacttgcaacatcaaaaatgggagatgcgagcagttttgtaagaactctgcagataacaaagtggtgtgctcgtgcactgaaggctacagactcgccgaaaatcaaaagtcgtgcgaaccagcggtgcccttcccttgtggcagagtgtcagtctcccagacttcaaagctcactcgcgctgagactgttttcccggatgtggactacgtcaattcgacggaggcggaaactatccttgacaacatcacgcagtctacccagtcgttcaacgacttcactcgcgtggtgggaggtgaagatgccaagccaggacagttcccttggcaagtcgtgttgaacggtaaggtcgacgccttttgcggcggttccatcgtgaacgagaagtggattgtgaccgccgctcactgcgtggaaaccggagtgaagatcaccgtggtggccggagagcacaatattgaggagactgagcacactgagcaaaaacgaaacgtcatccggattatcccgcaccacaactacaacgcagccatcaacaaatacaatcatgacatcgcccttctcgaactggatgagccactggttctgaattcatatgtcactccgatctgcatcgccgacaaagaatacacgaacatctttctgaagttcggatcgggatacgtgtccggatggggtcgggtgttccacaaaggtcgctccgcgcttgtgctgcagtaccttcgggtcccactggtggaccgggcgacttgcctcagatccacgaagtttacgatctataacaatatgttctgcgctggatttcatgaaggaggcagggactcctgtcaaggagattcgggaggcccgcatgtgaccgaggtggaggggaccagcttcctgactggaatcatctcctggggtgaagagtgtgcgatgaagggcaaatacggcatctacactaaagtctcccgatacgtgaactggatcaaggaaaaaaccaagctgact

SEQ ID NO: 2547 - DNA, 1383 bp, Artificial Sequence
  derived and/or modified sequence
atgcaacgggtgaatatgattatggccgaatcacctgggctgatcactatctgcttgcttggataccttctctcagccgagtgcactgtgtttcttgatcatgaaaacgcgaacaagattcttaaccgccctaagagatacaattccggaaagctggaggagtttgtccaaggcaaccttgagcgagaatgtatggaagaaaagtgtagttttgaggaagcgagagaagtgttcgaaaacaccgaacgcaccactgagttctggaagcaatacgtggacggagatcagtgtgagagtaatccatgtttgaatgggggatcctgcaaggatgacataaactcctacgaatgctggtgtccctttgggttcgaaggtaagaactgtgaactggatgtgacctgtaatatcaaaaatggacgatgcgaacagttctgtaagaatagcgcagacaacaaggtggtgtgctcctgtactgagggatacagactggctgagaatcaaaaatcatgtgaacccgcagtcccatttccctgtggacgggtgtcggtgtcacagacctccaagctgaccagagcagaaaccgtgtttccagacgtggattacgtgaatagcaccgaagcagagactattctggataacatcactcaatctactcaatccttcaatgactttacccgagtcgtgggaggcgaggatgcaaaaccaggtcagttcccatggcaggttgtgctgaatggtaaagtggatgccttctgtggtggaagcattgtcaacgaaaagtggattgtgactgccgcccactgcgtggaaaccggcgtcaagattacggtcgtggcgggcgaacataacattgaagagactgaacataccgaacagaagagaaatgtgatcagaatcattcctcatcataactacaacgcagcaatcaacaagtataaccatgacatagcgctcctcgagctggatgaacccctcgtgctgaattcctacgtgacccctatctgcatagcagataaagaatacactaacattttcctgaagttcggctccggctatgtgtcgggatggggcagggtgtttcataagggaagatcagccctcgtgctccaatacctccgcgtgcctctggtggatcgcgccacttgtctccgttcgaccaaattcactatctacaataacatgttttgtgcaggtttccatgaaggtggacgcgattcatgtcagggcgacagcggtggaccccatgtgactgaagtggaaggtacttcgttcttgacgggaatcataagctggggtgaagaatgcgcaatgaagggaaagtacggtatctacacgaaagtctcaagatacgtgaattggatcaaagaaaagaccaaacttact

SEQ ID NO: 2548 - DNA, 1383 bp, Artificial Sequence
  derived and/or modified sequence
atgcagcgcgtaaacatgatcatggccgagtctccagggctgattacaatctgcctgttgggatatcttctgtccgccgagtgcactgtgttcctcgaccacgagaacgccaataaaatcctgaatcgccccaagagatacaattcaggcaagctagaagagtttgtgcagggcaatttagaacgggagtgtatggaagagaagtgctcttttgaagaagcacgggaagtgtttgagaatacggagaggaccaccgagttttggaagcagtatgttgatggtgaccagtgtgagagcaacccctgccttaacggaggaagttgtaaggacgacatcaacagctacgaatgctggtgcccctttggatttgagggcaagaactgtgaattagacgtcacatgcaacattaagaacggccgctgcgaacaattttgtaagaattcagcagacaacaaggtggtgtgtagctgcacagaaggctaccgtctcgctgagaaccagaagagttgcgagcccgccgttccattcccatgtggtagagtcagcgtatcccagacctctaagctgaccagggctgagaccgtatttcccgacgtggactacgttaactcgactgaagccgagactattcttgataatatcactcagagtacacaaagctttaatgattttaccagagtcgttggcggagaggacgccaagccaggacagttcccctggcaagtcgtgctgaacggtaaagtggacgcattctgcgggggatccatcgtcaatgaaaaatggatcgtgacagctgcccactgtgttgaaacgggcgtgaagatcacggtggtggcgggcgagcacaacatcgaggagacagaacacacagaacaaaaacgaaacgtcatccgcattatcccacatcacaactataacgcagcaatcaataaatataatcatgacatcgcactgctggagcttgacgagcccctggtactgaactcgtacgtcactcccatttgtatcgcagacaaagaatacaccaatatcttcctgaagttcggatccggctatgtgtccgggtggggacgggtgtttcataagggcagatcagcacttgtgctacagtacctgagggtgcctcttgtagatcgggccacctgtctgcggagtaccaagttcactatatacaataatatgttttgtgccggcttccacgagggcgggcgtgattcatgccagggagatagcggcggcccccacgtaacagaggtggaaggaacgtccttcctgaccggtatcattagctggggcgaagaatgtgccatgaaagggaagtatgggatttacacaaaagtgtcccgttatgtcaattggatcaaagaaaaaactaagctcacg

SEQ ID NO: 2549 - DNA, 1383 bp, Artificial Sequence
  derived and/or modified sequence
atgcagcgcgtgaacatgattatggcagaatcgccaggcctcattaccatctgtctcctgggttatctgcttagcgccgaatgtactgtctttttggatcatgagaacgcaaataagattcttaacaggcctaagaggtacaactccggcaagctggaagaatttgtccaggggaatctggagcgggaatgtatggaagaaaagtgctcctttgaggaagctcgcgaagtgtttgaaaacacggagagaactaccgaattctggaaacaatacgtggatggtgaccaatgtgagtcaaacccttgcttgaacggtggatcatgtaaagatgacatcaatagctacgagtgctggtgtccttttggatttgagggtaagaactgtgaactcgacgtgacttgtaacatcaaaaatgggagatgcgaacagttctgtaaaaactccgcagacaataaagtggtctgctcgtgtactgaggggtaccgccttgcagaaaaccagaagtcctgtgaaccagcagtgcctttcccttgcggacgggtatccgtgtcgcagaccagcaagctgacgagggctgaaacggtgtttcccgatgtcgattacgtgaatagcactgaagcagaaaccatcctggataacattactcagtcgacccagtcgtttaatgacttcaccagagtggtgggtggagaggacgctaaaccaggccaatttccctggcaagtggtgcttaatgggaaggtggatgcattttgtgggggcagtattgttaatgaaaagtggatcgtgacggcagcccattgcgtggaaactggcgtgaagatcacggtcgtggctggcgagcacaatatcgaagaaacggagcatactgaacaaaagcggaacgtgatacgcatcattccgcatcataactacaatgccgcgatcaataagtacaaccatgacattgcgctcctggaacttgatgagccactggtgctcaacagctacgtgactcccatatgcatcgccgataaagaatacactaacattttcctgaaattcggaagcggatacgtctccggttggggccgagtctttcacaagggacggtcagcactcgtgctccaatacctgagggtcccactcgtggatcgggccacctgtcttaggagcacgaagtttactatatacaataacatgttttgtgccggattccatgaaggaggacgggactcatgtcaaggagattccggtggaccacacgtgaccgaggtggaaggcacttcatttctcactgggatcatttcctggggagaggaatgcgcaatgaaaggaaaatacggaatctacaccaaggtatctaggtacgttaactggattaaagaaaaaactaaacttact

SEQ ID NO: 2550 - DNA, 1383 bp, Artificial Sequence
  derived and/or modified sequence
atgcagcgtgtcaatatgattatggctgaaagccctggattaataacaatctgtttgttaggataccttttatcggcagagtgtacggtttttcttgaccatgagaacgcaaacaaaatcttaaacagacctaaacgctacaatagtggaaaactcgaagaattcgtccagggcaatttagagcgcgaatgtatggaggagaagtgtagctttgaagaggctcgagaagtttttgaaaacacagagagaaccacagaattttggaaacaatatgtggatggagatcagtgtgagtctaatccttgtctgaacggaggcagttgcaaagacgatattaactcttatgaatgctggtgcccttttggcttcgaaggtaagaactgtgaactagatgtgacgtgcaacatcaaaaatggccgttgtgaacagttttgcaagaactcagcggataacaaagtagtctgttcatgcactgaaggctatcgacttgcggagaaccaaaaatcatgtgaacctgcggtaccgtttccgtgcggtcgagtcagcgtgtctcaaacgtcgaaacttacacgagctgaaacagtctttcctgatgttgattatgtgaatagtactgaggcggaaactattcttgataatatcacgcagagcactcaaagctttaacgattttactcgggtagttggtggtgaagatgccaaacctggccagtttccttggcaagtagttctgaacggcaaggtagatgcgttctgcggcggatcgattgttaacgaaaagtggatagtcacggcagcgcattgtgtagaaacaggggtgaaaatcacggttgtggcaggggaacataatatcgaggagacagaacatacggaacagaaaagaaatgttattcgcatcatcccccatcataattataatgctgccattaacaagtataatcatgatattgctctgctagagttggatgaaccgcttgtcctcaactcatatgtgactccgatctgtattgcagacaaggaatacacaaacatttttcttaaatttggttcaggatatgtgagcggctggggcagagttttccataaaggccgttctgctctggtactgcaataccttagggtcccgttagttgatcgtgcaacgtgcctgcgctcgactaaatttacaatatataataatatgttctgcgcgggtttccatgagggaggtagagatagttgccagggtgattctggtggcccccacgtaacagaagtggaaggaacaagcttcttgacaggaataatcagctggggagaagaatgcgcaatgaaaggaaaatacggaatatatacgaaggtctcgcggtatgtaaattggatcaaagaaaagactaagcttacc

SEQ ID NO: 2551 - DNA, 1383 bp, Artificial Sequence
  derived and/or modified sequence
atgcagcgcgtgaatatgattatggcagaatccccaggattgattacaatttgtctgctgggctatctgctttctgccgagtgtactgtatttctggatcatgagaatgcaaacaagatactgaatcgtcccaaacgctataatagcggtaaactagaggagttcgtccaaggcaatctggaaagagaatgcatggaggagaagtgcagcttcgaagaagcgagggaggtctttgaaaacacagagcgtactaccgagttttggaagcaatacgtggacggggatcagtgcgaatccaacccctgtcttaacggaggttcttgcaaggacgacattaactcttacgagtgttggtgtccgttcgggttcgagggtaaaaactgtgaacttgacgtgacctgcaatatcaagaatgggagatgtgaacagttttgcaagaactcagcagacaacaaagttgtctgttcatgcactgagggttacagactggctgagaatcagaaaagctgcgagccagccgtcccattcccttgtggccgcgtttcagtgtcccaaacaagtaagctcactcgcgcagaaaccgtgttccctgatgtcgactatgtgaattctacagaggcagagacaattctagataacatcacgcagtctacccagtcgtttaacgacttcactagagtcgtgggcggcgaggacgcaaagcctggccagtttccgtggcaggtggtgctgaacggcaaagtcgacgccttctgcgggggcagcattgttaatgaaaagtggattgtaacggctgcgcactgtgtcgagactggcgtgaagatcacagtggtggcaggagagcacaacattgaggagaccgaacacactgaacagaagaggaatgttatacggattattcctcatcataattacaatgctgccatcaacaaatataatcacgatatcgcgctactcgagctggacgagcctttggtgctgaacagctatgtcacccccatttgcattgcagacaaggaatataccaatattttccttaagttcgggtcgggctacgttagcggttggggtcgcgtcttccacaagggaaggagcgcgctggttctgcagtaccttagagtgccactggtggatcgggcaacttgtctcaggagcacgaaattcactatttacaataacatgttttgtgccggctttcacgagggcggtcgtgatagctgccagggcgatagcggcggtccacacgtcaccgaggtcgagggcacaagttttctaaccgggattatttcctggggagaggagtgcgccatgaaaggaaagtacggaatctatacaaaagtatctcggtatgtcaattggattaaggagaagaccaaacttaca

SEQ ID NO: 2552 - DNA, 1383 bp, Artificial Sequence
  derived and/or modified sequence
atgcagcgtgtaaatatgattatggctgagtctcctggccttattaccatttgcttacttggatatctgctgtccgctgaatgtaccgtctttctggaccacgagaatgcaaataaaattcttaataggcctaaaagatataattctggcaaattagaggaattcgtgcaagggaatctggaacgagagtgtatggaggaaaaatgcagtttcgaagaggctcgagaagtattcgagaacacagaacgtacaacggaattctggaagcagtacgttgatggagaccagtgcgagtccaatccgtgtctcaacggagggtcctgtaaagatgatatcaactcgtatgaatgttggtgcccctttgggtttgagggcaaaaactgtgaattggatgtaacatgtaacatcaaaaatggcagatgcgagcagttttgcaaaaacagcgccgacaataaagttgtgtgctcgtgtactgaggggtataggcttgctgagaaccaaaaatcatgcgagcccgccgtgcctttcccttgtgggcgggtgagtgtctcccagaccagcaagctgactagggcggagactgtgttccccgatgtggactatgttaactccaccgaggctgagacgatactggataatatcactcagtctactcagagtttcaatgactttactcgcgttgtgggcggggaggacgccaagcctggccagttcccatggcaggtggtcctcaacggcaaagttgacgcattctgcggagggtctatcgtgaacgagaagtggatcgtcaccgcagcccactgtgtggagaccggggttaagattacggttgtggccggggagcataacatagaggaaaccgaacacaccgaacagaaaaggaacgtcattcgcataattcctcatcacaactacaatgccgctataaacaaatacaatcatgacatcgccctgcttgaactggatgagcccctcgttctcaattcatacgttactcctatatgtattgcagacaaggagtacaccaacatattcctgaaattcggttctgggtatgtaagcggttggggccgggtgtttcataagggtagaagcgcattagtgcttcaataccttagggttccactggtggatcgcgcgacgtgcttgcgctcaactaaatttaccatttataacaatatgttctgcgcaggcttccacgagggaggccgggattcctgccagggcgacagcggggggcctcacgtaaccgaggtggagggcacatcattccttactggaattattagctggggggaggagtgtgccatgaaagggaagtacggaatatatactaaagtctcccgttatgtgaactggattaaagagaaaaccaaactcacc

SEQ ID NO: 2553 - DNA, 1383 bp, Artificial Sequence
  derived and/or modified sequence
atgcagagagtcaatatgatcatggctgagtcgccgggcttgatcactatctgtctgcttggctatctactttctgccgaatgtaccgtgttcctggaccacgagaatgccaataagatattgaatagacccaaacggtataattccgggaagctcgaggaattcgtgcagggcaatctggaacgcgagtgcatggaggagaagtgttcattcgaggaggctcgagaggtcttcgagaacacagagcgcaccacagagttctggaaacaatatgtggatggggatcagtgtgagagtaatccttgcctcaacgggggatcctgcaaagatgacatcaattcctacgagtgttggtgcccattcggctttgagggaaagaactgtgaacttgacgtgacctgtaacataaagaacggtcgctgcgaacagttttgtaaaaacagcgccgacaacaaagtggtttgctcatgtactgaagggtatcgactggcagaaaatcagaagagctgtgagcctgcagtgccgtttccatgtggtcgggtcagcgtgtcacagaccagcaaattgacaagagcagagactgtatttccagacgtggactacgttaactcaacagaagctgagacgatcctggacaatataactcagtcaactcagtcatttaacgatttcactagggtagtgggaggggaggatgctaagccggggcaattcccctggcaggtagtcctgaacggtaaagtggatgccttctgcggtgggagtatagtgaacgagaaatggatcgttacagccgctcactgtgtagaaacgggggtgaaaataacagtcgttgcgggggagcacaacattgaggaaactgaacatacagagcagaaacgaaatgttatccgaatcatccctcatcataactataacgctgcaattaataaatacaaccacgatatcgcgctgcttgagttagatgagcctctcgtgctcaactcctacgttacccccatctgtatcgccgataaagagtataccaatattttccttaagttcgggtcaggctacgtctccggatggggacgagtgttccacaagggccgcagcgcacttgtcctgcagtacctgagagtgccattagtcgacagggcaacctgcctgcggtccactaaattcacgatctacaataacatgttctgcgccggttttcatgagggcggacgagatagctgtcaaggcgatagtggtggccctcatgtaaccgaagtggagggaacatccttcctgacaggcattattagctggggggaggagtgtgctatgaaggggaagtacggcatctacacaaaggttagtaggtacgtaaattggatcaaggagaagactaaactcact

SEQ ID NO: 2554 - DNA, 1383 bp, Artificial Sequence
  derived and/or modified sequence
atgcagagagtgaatatgatcatggccgagtccccgggcctgattaccatctgtctgcttggttacctgctgtcggcggagtgtactgtctttcttgatcacgaaaacgcaaacaagattcttaaccgaccaaagagatacaactccggcaaacttgaagaatttgtccaaggaaatctcgagcgagagtgtatggaagagaagtgctccttcgaagaggcaagagaagtctttgaaaacaccgagaggactaccgaattctggaagcaatacgtggatggagatcaatgcgagtcaaatccttgccttaacggaggttcgtgcaaggatgacatcaactcgtatgaatgttggtgcccttttggctttgagggcaagaattgcgagcttgacgtgacttgtaacattaagaacggacgttgtgagcaattttgtaaaaactcggcagacaataaagtggtgtgttcgtgtacggagggttacaggcttgcagagaatcaaaagtcctgtgaacccgcagtgccatttccctgtggccgcgtgtcagtctcgcaaacgtccaaacttactcgcgcagaaactgtgtttcctgacgtggattatgtgaatagtaccgaagcggaaaccattcttgataacatcacccagtccacccaatcctttaatgattttaccagggttgtcggaggtgaggatgcaaaaccaggacagtttccgtggcaggtggtgttgaatggaaaggtggatgccttctgcggggggtcaatcgtgaacgaaaagtggatagtgactgcagcacattgtgtggaaaccggagtcaagataaccgtggtggccggagaacacaacatcgaggagactgagcacaccgagcagaaaagaaacgtcatacgaatcatacctcatcataactacaacgcagccataaacaagtacaaccatgatatagccttgctggaactggatgaaccgttggtgctcaactcatacgtgactcctatctgcatcgcagacaaggaatacaccaacatattcctgaaattcggatccgggtacgtgtccggctggggtagagtgttccataagggccggtctgcactggtgcttcaatacctgagagtgcctcttgtggatagggcaacttgtctgagatccaccaagtttaccatttacaacaatatgttctgcgcgggattccacgagggtgggcgggatagctgtcagggagattcaggcggaccccatgtgacggaagtggaaggaacttcctttctcactggcatcatttcatggggcgaggagtgtgcgatgaagggaaaatacggtatttacaccaaggtgtcgcggtacgtcaactggattaaggaaaagaccaaacttacc

SEQ ID NO: 2555 - DNA, 1383 bp, Artificial Sequence
  derived and/or modified sequence
atgcagagagtcaatatgataatggcggaatcacctgggctcattaccatctgcctgctgggttacctgctttcggcagagtgtactgtctttctggatcatgaaaacgccaacaagatcttgaaccgccctaaaagatacaatagcggtaagctggaggaattcgtgcaaggaaatttggaacgcgaatgcatggaagaaaaatgttcatttgaagaagcgcgtgaggtgtttgaaaacactgagagaacgacggagttctggaagcagtacgtggatggtgaccaatgcgaaagcaatccttgtctcaatggaggctcatgtaaagatgatatcaactcgtacgaatgctggtgtccttttggattcgaaggtaagaactgtgaacttgacgtcacctgcaacatcaaaaacggtcgttgtgagcagttttgtaagaattccgcagataacaaggtcgtgtgttcatgtactgaaggataccggctcgcagagaaccaaaagtcttgcgagcctgcagtcccttttccctgtggacgagttagcgtgtcccaaaccagcaagctgacccgtgccgaaactgtgtttccggacgtggactacgtgaactccactgaagcggaaaccatcttggataacatcactcaatccacccaatcgttcaacgattttactagggtggtcggtggtgaagatgcaaaacctggccagtttccctggcaagtggtgttgaacggcaaggtggacgcgttttgtggcggttccatagtgaatgagaagtggatcgtgacggctgcacattgtgtcgaaaccggcgttaagataacggtcgtggcaggcgagcacaacattgaagagactgaacataccgaacagaagcgaaacgtgataaggattattcctcaccataactacaacgcagcaataaacaagtacaatcacgacatcgcccttctcgaattggatgagccgcttgtgcttaatagctacgtcactcctatctgtatagcagacaaagagtacactaacattttcctgaagtttggctccggatacgtgagcggctgggggcgggttttccataaggggagatctgcactggtcctgcagtaccttagggtgccgcttgtcgatcgggccacctgtctccgctccaccaaattcaccatatacaacaacatgttttgtgctgggtttcatgagggcggaagagattcctgtcagggcgattccggaggacctcacgtgactgaggtagaaggtacttcgttcctgaccgggattatctcctggggagaagaatgcgcgatgaagggaaagtacggaatctacacgaaggtgtcaaggtacgtgaattggataaaggaaaagaccaagctgacc

SEQ ID NO: 2556 - DNA, 1383 bp, Artificial Sequence
  derived and/or modified sequence
atgcaacgcgtgaacatgatcatggcggagtccccgggactgatcaccatctgcctgctcggatacctcctgagcgcggagtgtactgtgttcttggaccacgaaaatgccaacaaaatcctcaaccgcccgaaaagatacaactctggaaagctggaggaattcgtgcaaggaaacttggaacgagagtgcatggaagagaagtgctcattcgaagaggcccgggaggtttttgagaataccgagaggacgaccgagttttggaagcaatacgtggacggtgaccaatgcgagtcgaacccgtgcctcaacggaggatcatgcaaagatgacatcaattcgtatgagtgctggtgcccgtttggatttgaggggaagaattgcgaactggacgtcacttgcaacatcaaaaatggtcgatgcgagcagttctgcaagaattccgccgacaacaaagtggtgtgttcgtgtactgagggatacagactggccgaaaaccaaaagtcatgtgagccagcagtcccttttccgtgcgggcgcgtgtccgtgagccaaacctcaaagctgacgagggcggagactgtgttccctgatgtggactacgtcaattccaccgaggctgaaactattctcgacaacattacccagtcgactcagtcgttcaacgatttcactcgggtggtgggcggagaggacgccaagccaggacagttcccctggcaggtcgtgttgaacggaaaagtggacgcattctgcggcggctcgatcgtgaacgagaaatggattgtgactgccgcccactgcgtggaaacgggtgttaagatcaccgtcgtggcgggcgaacacaacatcgaagaaaccgagcacactgaacaaaagaggaatgtgatccgcatcatcccccatcataactacaatgctgccatcaacaaatacaatcacgatatcgcactcctggaactcgatgaaccgctcgtgctgaactcgtatgtcactccgatctgtattgcagacaaggaatacactaatatctttctgaagttcggatcgggctacgtctcgggatggggacgggtgtttcataagggaagaagcgccctggtgctgcaatacctccgggtgccgttggtggatcgtgcgacttgcctcaggtcaaccaagtttaccatttacaacaacatgttctgcgcgggtttccatgagggagggcgcgactcatgccagggcgattcgggtggaccccacgtcaccgaagtcgaggggactagcttcctgaccggaatcatctcttggggagaagaatgcgccatgaagggaaagtacggcatttacactaaggtgtccagatatgtgaactggatcaaggagaaaacgaaacttact

SEQ ID NO: 2557 - DNA, 1383 bp, Artificial Sequence
  derived and/or modified sequence
atgcagcgcgtcaatatgatcatggctgaatcccccggcctgatcactatctgcctgctcggatacctgctgtctgccgagtgcactgtgttcctggaccacgagaacgcgaacaaaatcctgaatcggccaaagagatacaactcaggaaagttggaggagtttgtgcaggggaacttggaaagagaatgcatggaagagaagtgcagcttcgaggaggcacgcgaggtattcgagaacaccgaacgcactacggagttttggaagcaatacgtggacggcgaccagtgcgaatcaaacccgtgcctgaacggaggatcgtgcaaggacgacataaacagctacgaatgttggtgcccattcgggttcgaaggaaagaactgcgaactggatgtgacctgcaacattaagaacggtcgctgtgaacagttctgcaaaaacagcgcagataacaaggtcgtctgcagttgcactgaaggataccgcctggccgagaatcaaaagtcttgtgaaccggcggtgccttttccgtgcggccgggtgtcggtgtcccagacctcgaaacttacgcgggctgagactgtattccctgacgtggactacgtcaactcgacggaggcggaaactatcctcgacaatatcacccagtccacccaatcctttaatgatttcaccagggtggtgggaggagaggatgccaagccaggacagttcccatggcaagtcgtcctgaacggaaaagtggacgccttctgtggtggatcgatcgtgaacgaaaaatggatcgtgaccgcggcgcattgtgtggagacgggagtgaagatcactgtcgtggctggcgagcataacatcgaagaaaccgagcacactgaacaaaagcgcaatgtgatccgcatcatcccgcaccacaactacaatgccgcaataaacaagtataaccatgatatcgccctgcttgagctggacgagccactggtcctcaactcctacgtgactccgatctgcatcgcagacaaggagtacacgaatatctttctgaagttcggctcgggttacgtctcgggatggggtagagtctttcacaagggcagatcggccctggtgctccagtatctgcgcgtcccgcttgttgatcgggcgacctgcctcagatccaccaaattcaccatttacaacaacatgttctgcgctggatttcatgaaggaggaagggactcctgccaaggagactccggtggtccgcacgtgaccgaggtggagggcacttccttcctgaccggaatcatctcgtggggagaagagtgcgccatgaagggaaaatacggtatctacaccaaggtttccagatacgtgaactggattaaggaaaaaaccaaactgact

SEQ ID NO: 2558 - DNA, 1383 bp, Artificial Sequence
  derived and/or modified sequence
atgcaacgagttaatatgataatggcggaatcgccgggtttaataacgatatgtctattaggttatttactatcggcggaatgtacggtatttctagatcatgaaaatgcgaataaaatattaaatcgaccgaaacgttataattcgggtaaactagaagaatttgtacaaggtaatttagaacgtgaatgtatggaagaaaaatgttcgtttgaagaagcgcgtgaagtatttgaaaatacggaacgaacgacggaattttggaaacaatatgtagatggtgatcaatgtgaatcgaatccgtgtttaaatggtggttcgtgtaaagatgatataaattcgtatgaatgttggtgtccgtttggttttgaaggtaaaaattgtgaactagatgttacgtgtaatataaaaaatggtcgttgtgaacaattttgtaaaaattcggcggataataaagtagtttgttcgtgtacggaaggttatcgtctagcggaaaatcaaaaatcgtgtgaaccggcggttccgtttccgtgtggtcgtgtatcggtatcgcaaacgtcgaaattaacgcgtgcggaaacggtttttccggatgtagattatgttaattcgacggaagcggaaacgatactagataatataacgcaatcgacgcaatcgtttaatgattttacgcgtgttgtaggtggtgaagatgcgaaaccgggtcaatttccgtggcaagttgtactaaatggtaaagtagatgcgttttgtggtggttcgatagtaaatgaaaaatggatagttacggcggcgcattgtgttgaaacgggtgtaaaaataacggtagtagcgggtgaacataatatagaagaaacggaacatacggaacaaaaacgaaatgtaatacgaataataccgcatcataattataatgcggcgataaataaatataatcatgatatagcgttattagaattagatgaaccgttagttttaaattcgtatgtaacgccgatatgtatagcggataaagaatatacgaatatatttttaaaatttggttcgggttatgtatcgggttggggtcgagtttttcataaaggtcgttcggcgctagtattacaatatttacgagtaccgttagtagatcgtgcgacgtgtttacgttcgacgaaatttacgatatataataatatgttttgtgcgggttttcatgaaggtggtcgagattcgtgtcaaggtgattcgggtggtccgcatgtaacggaagtagaaggtacgtcgtttctaacgggtataatatcgtggggtgaagaatgtgcgatgaaaggtaaatatggtatatatacgaaagtatcgcgttatgtaaattggataaaagaaaaaacgaaattaacg

SEQ ID NO: 2559 - DNA, 1383 bp, Artificial Sequence
  derived and/or modified sequence
atgcagagggtgaatatgatcatggccgagtcccccggcttgatcactatctgtctgttgggatatctgctgtcagccgagtgtactgtgttccttgaccacgaaaacgccaacaagattctgaaccggcctaagcggtacaacagcggaaaactggaggaatttgtgcagggaaatctggaacgggagtgcatggaagaaaagtgctccttcgaggaggcccgggaagtgttcgaaaacactgagcggactacggaattctggaagcaatacgtggatggagatcaatgtgagtcaaatccgtgccttaatggcgggtcctgcaaggacgatatcaacagctatgagtgctggtgtcccttcggttttgagggcaaaaactgcgagcttgacgtgacctgcaacatcaaaaatggccgctgtgaacagttctgcaagaattcggccgacaacaaggtggtgtgctcatgcaccgagggatacagactcgcggagaatcaaaaatcttgcgaaccggccgtgccgttcccttgcggacgcgtgtcagtctcacagacctcgaagctcacgagagcagaaactgtgttcccggacgtcgattatgtgaattccactgaggcggaaaccattctggacaacattacccagtcgactcagagctttaatgatttcacccgggttgtgggaggagaagatgccaagccgggacaattcccatggcaggtcgtactgaacggcaaggtcgacgctttttgtggcggatcaatcgtgaacgaaaagtggatagtgaccgccgctcattgtgtggaaaccggcgtgaagatcactgtggtggcaggagagcacaatatcgaagaaacggagcataccgaacagaaacgcaatgtcatcagaatcatcccgcaccataactacaatgcagccatcaataagtacaatcacgatatcgccctgctcgaactggacgaaccgctcgtcctgaattcatacgtgactccaatctgcatcgccgacaaagaatacaccaatatcttcctgaaatttgggagcgggtacgtgtcgggatggggaagagtattccacaaggggaggtctgccctggtgctgcagtatctccgcgtcccccttgtggacagagctacctgccttcggtccacgaaattcaccatctacaacaacatgttttgcgcaggattccacgagggaggtagagactcgtgtcaaggagactccgggggtccccatgtgaccgaagtggaaggcacctccttcctcactggaatcatttcctggggcgaagaatgcgctatgaaggggaagtacgggatctacactaaggtgtcgcggtacgttaactggatcaaggagaaaacgaaactcact

SEQ ID NO: 2560 - DNA, 1383 bp, Artificial Sequence
  derived and/or modified sequence
atgcagcgcgtgaacatgatcatggcagagtcgccaggtttgatcactatctgcttgctcggatacttgctttcggccgaatgtactgtctttttggaccatgaaaacgcgaataagatcctgaaccgtccgaagcgctacaacagcggaaagctcgaggaattcgtccaaggcaatctggaacgggagtgcatggaggagaagtgtagcttcgaggaagcaagagaagtgtttgaaaacaccgaaagaaccactgaattttggaagcagtacgtggatggtgaccaatgcgaatcgaacccatgcctcaacggcggatcctgcaaagatgacattaactcctacgagtgttggtgccccttcggatttgaaggcaagaattgcgaactcgatgttacttgcaacattaagaatggacgctgcgagcagttctgtaagaattccgcggataacaaggtagtgtgtagctgcactgagggataccggctggccgaaaatcaaaaatcctgcgaacctgctgtgccgttcccctgcggtcgggtttctgtgtcccaaacttccaaactgaccagggccgagactgtgtttccggacgtggactatgtgaactcgactgaagccgaaaccatcctggacaatatcactcagtcgactcagtcgttcaatgacttcacgagggtcgtgggtggagaagacgctaagccaggacagttcccgtggcaggtggtgctgaacggtaaagtcgatgcattttgcggtggatcaatcgtgaacgaaaaatggatcgtcaccgcagcccactgcgtggagactggcgtgaaaatcacggtggttgccggagagcacaacatcgaagagactgaacacaccgagcagaaacggaacgtgatcagaatcatcccacaccataactataacgccgccatcaacaaatacaaccacgacattgccctgctcgagctggacgaaccgctggtgctgaatagttacgttactccgatctgcatcgcggacaaagagtacaccaatatctttctcaagttcggatcaggatacgtctccgggtgggggcgtgtgtttcataagggccggtccgcacttgtgctccagtaccttagggtcccgctggttgatcgggcaacgtgtttgagaagcactaagttcactatatacaataacatgttctgcgctggcttccatgaaggcggacgcgacagctgccagggagattcaggaggaccacacgtcaccgaggtcgaaggcacttccttcctcactggaattatctcctggggagaggagtgcgccatgaaaggaaaatacggaatctataccaaggtttccagatacgtgaactggattaaggagaagacgaagctgact

SEQ ID NO: 2561 - DNA, 1383 bp, Artificial Sequence
  derived and/or modified sequence
atgcagcgcgtgaacatgatcatggcggagtcccctggactgatcactatctgcctgctgggatacctgctgtccgcggagtgcaccgtgttccttgaccacgagaacgcgaacaagatcctgaaccgcccaaagagatacaactcgggtaaactggaagaattcgtccaggggaacctcgagagagagtgcatggaagaaaaatgctccttcgaggaggcccgggaagtgttcgaaaatactgaacggaccactgagttctggaaacaatacgtggacggggatcagtgcgagtccaacccttgcctgaacgggggatcgtgcaaggatgacatcaattcatacgaatgctggtgtccattcggtttcgaaggaaagaactgcgaattggatgtgacttgcaatatcaagaatgggcggtgcgaacagttctgcaagaactccgccgacaacaaggtcgtgtgctcctgcacggaaggctacaggctggccgaaaaccagaagagctgtgagccagcagtgccgttcccgtgcggtcgcgtctccgtgtcacagaccagcaaattgacgagagcggagactgtgttcccggacgtggattacgtgaattccactgaagccgaaaccatcctggacaacatcacccagtcaacgcaatcgttcaatgatttcaccagagtcgtcggtggggaagatgcaaagccgggacaattcccgtggcaagtggttctgaatggcaaggtggacgccttctgtggagggtctatcgtgaacgagaagtggatcgtcactgctgcacattgtgtggaaactggcgtgaagatcactgtcgtggcaggggaacacaacatcgaggaaactgagcacactgaacagaagcgaaatgtgattcgcattatcccgcatcacaactacaatgcagccatcaataagtacaatcacgacatcgcgctccttgaactcgacgagccactcgtgctcaactcctacgtcactcctatttgtatcgccgacaaagagtacacgaacatctttcttaagttcggatccggatacgtgtcaggctggggtcgggtgtttcacaagggacgaagcgctctggtgctgcaataccttagggtgcccctggtcgacagagcgacgtgccttcgaagcaccaagtttactatctacaacaatatgttctgtgcgggatttcatgagggcggacgggacagctgccagggagactcaggcggcccgcacgtgactgaggtggagggcacctcattcctgactggaattatctcttggggggaggagtgcgctatgaagggaaagtacggaatctacaccaaagtctcccgatacgtcaactggatcaaggaaaaaactaagctgacc

SEQ ID NO: 2562 - DNA, 1383 bp, Artificial Sequence
  derived and/or modified sequence
atgcaacgagtgaacatgataatggctgagagcccaggtctgattacgatttgcctgttgggctacctgctgtcagccgaatgtaccgtatttctcgatcacgagaacgcgaacaagatccttaatcggcccaagaggtataattctgggaagctggaggaatttgtccaggggaacctggagcgggagtgtatggaagagaagtgctcctttgaggaggcacgcgaggttttcgagaacaccgaaaggaccaccgaattctggaaacaatatgtagacggagatcagtgtgagtcaaacccatgcctgaatggagggagctgtaaggatgacatcaatagttacgaatgctggtgcccatttggatttgaggggaagaattgcgaattggacgtgacatgcaatattaagaatgggcgatgcgaacaattctgtaagaattcagctgataacaaagtggtctgttcctgcactgaaggctaccgcttggccgagaatcaaaagtcctgtgagcctgccgtgcctttcccctgtggacgggtgtctgtctcccagacttccaagctgactagagcggagaccgtgttccccgacgtggattacgtgaattctaccgaagcggaaaccattttggataacattacgcagtccactcaatcttttaacgactttactagagttgtggggggagaagatgcaaaacccggccaattcccttggcaagtggtcctgaacggcaaggtggacgccttctgcggcggatccatcgtgaatgagaaatggatagtgaccgctgcccattgcgtagaaaccggggtcaagatcaccgtggtggccggcgagcataacattgaagaaaccgagcacaccgagcagaagcggaatgtcatacggatcatcccacatcacaactacaatgcagccatcaacaagtataaccatgacatcgccctccttgagctggacgagccacttgtgctgaatagttatgtgacccctatctgtatcgccgataaggaatacacgaacattttcctcaagttcggttcaggatacgtgagcggttgggggcgcgtgtttcacaaaggaagaagcgcactggtgctgcagtatctgcgggtgccactggtggatagagctacttgccttagaagtaccaaattcaccatttacaacaacatgttctgtgctggcttccacgagggagggcgcgattcatgccagggggacagcggaggccctcatgtcacagaagttgaagggactagtttcttgaccggtatcattagctggggggaagaatgtgccatgaaaggcaagtacggtatctatactaaggtgagtcgctacgttaattggataaaggagaagactaagctgaca

SEQ ID NO: 2563 - DNA, 1383 bp, Artificial Sequence
  derived and/or modified sequence
atgcagcgtgtcaacatgatcatggcggagtctcccggactcatcacaatttgcctgctgggatacctgctgtctgccgagtgtactgtgttcttagaccatgaaaacgctaataagattctgaataggcctaagcgctacaattctgggaagttggaggaatttgtgcaaggaaaccttgagcgtgaatgcatggaagaaaaatgcagctttgaagaggcgagggaggtattcgagaacaccgagaggaccactgagttctggaagcaatacgttgatggagatcagtgtgagagtaatccttgtttgaacggcggtagttgcaaggatgacatcaatagttacgagtgttggtgtccttttggtttcgagggcaaaaactgcgagcttgatgtgacttgtaatattaaaaacggccgatgtgagcagttctgtaaaaactctgctgataataaagtggtgtgctcttgcaccgagggatatcgcttggctgagaaccagaaaagctgcgaaccagccgtcccctttccctgcggcagagtcagcgtctctcagaccagcaaactgacaagggctgagacagtgtttcccgatgtggattacgtcaactctaccgaggctgaaacgatactcgacaacataacccaatccacccagagcttcaacgatttcacccgagtggtgggaggagaagacgcaaagccaggacagtttccctggcaggtcgtcctcaatggaaaggttgacgcattttgcggcggatcaatcgtgaatgagaaatggatcgtcaccgctgcccactgtgtggagacgggagtgaagatcaccgttgtcgctggagagcacaacatcgaagagactgagcacactgaacagaagagaaacgttataaggataattccacaccataactacaacgcagccatcaataaatacaaccacgatatagcactcctggagctggatgaaccccttgtgcttaactcttacgtcaccccaatctgcatcgcagataaagagtacacaaatatctttctcaaatttggatcaggctacgtctctggctggggcagagtgttccacaaagggaggtctgctctggttctccagtatttaagggtgccccttgtggacagggccacttgcctccggtctacaaagttcacaatctataacaacatgttttgcgcaggattccatgaggggggcagagactcctgtcagggagattccggcggccctcatgtgaccgaagttgagggcactagttttctgactggcatcattagctggggagaggaatgcgctatgaaaggaaaatatgggatctacacaaaagtcagccgctacgtgaactggattaaggagaaaaccaaactgaca

SEQ ID NO: 2564 - DNA, 1383 bp, Artificial Sequence
  derived and/or modified sequence
atgcagcgcgttaatatgatcatggccgaatcaccaggactgatcactatatgcttactggggtacctgttgtcagctgagtgtactgtgttcctcgaccacgaaaatgcaaacaagatcctgaaccgccccaaaaggtataacagtggcaagctggaagaatttgtccaaggcaatctggaaagggagtgtatggaagagaagtgcagcttcgaagaggcccgggaggtctttgaaaataccgagagaaccacagaattttggaagcagtacgtggacggcgaccagtgcgagtccaatccctgtctcaacgggggttcctgtaaagatgacatcaatagctatgagtgttggtgtcctttcgggtttgaaggcaagaactgtgaactggacgtaacatgcaatatcaaaaatgggaggtgcgagcagttctgtaagaatagcgcagacaataaggtcgtgtgttcatgcaccgaaggttataggctcgccgagaatcagaagtcatgcgaacccgctgtgccatttccttgtgggagagtgtctgtttcacagacctccaaactgacccgtgcagagaccgtctttccggatgttgattatgtaaatagcacggaagcagagactatcctggataacattactcagagcactcagtccttcaatgatttcacccgggtggttggcggcgaggacgccaagccagggcaattcccttggcaggttgtcctcaatggaaaggtagatgccttctgtggcgggagcatcgtcaatgagaagtggatcgttactgctgcacactgcgtggaaacaggtgttaagatcacggtagtagctggggaacacaacattgaggaaaccgaacacacagagcagaaacgcaacgtgatccgaattattcctcaccacaattacaacgccgcaatcaacaaatataatcacgacatcgctctgctcgaactggacgaaccactggttcttaactcttatgtgacacctatctgcatcgccgacaaggagtatacgaacatatttttgaaattcggaagcggctatgtcagcggatggggacgcgtgttccataagggccggagtgcacttgtcctgcaatacctgagagtgccgttggtcgacagagccacttgtctgcggtccaccaagttcactatttataataacatgttttgtgcaggattccacgaaggtggacgggattcttgtcagggggacagcggtgggccccacgtcacagaggttgaaggcacttctttcctaactgggatcatcagttggggcgaagagtgtgctatgaaaggtaagtatgggatatatacgaaagtttcccggtacgtgaattggataaaggaaaagacaaagcttact

SEQ ID NO: 2565 - DNA, 1383 bp, Artificial Sequence
  derived and/or modified sequence
atgcagagagtcaacatgataatggcggaatcacctggcctcatcactatctgtctgctgggataccttctgtcggcggaatgcaccgtctttctcgatcatgagaatgcaaacaagatactgaataggccaaagcgctacaactccggaaaacttgaggagttcgtccaaggcaaccttgaaagggaatgtatggaagagaagtgcagctttgaagaggcgagagaggtgtttgaaaataccgagcgtactaccgaattctggaagcagtacgttgatggggaccagtgtgaatcgaacccttgtcttaatggaggatcatgcaaggatgacattaacagttatgagtgttggtgtcccttcggctttgaaggcaagaactgtgagcttgacgtgacttgcaacatcaagaatggtagatgtgaacagttctgtaagaattcggcagataacaaagtagtgtgtagctgtacggagggctatagactcgccgaaaaccaaaagtcatgtgaaccagccgtcccgttcccgtgtggtcgcgtgtccgtttcgcaaacctcgaagttgactagggcggagactgtctttcccgacgtggattacgtgaatagtaccgaagcagaaactattctcgacaacataacccaatcgactcagagcttcaacgattttacgcgtgtagtgggcggagaggatgctaagcctggacagtttccgtggcaggtcgtgttgaatggaaaagtggatgcattctgtggaggatcgatcgtgaacgaaaaatggatcgtgaccgcagcccattgtgtggaaaccggtgtcaagattacggtggtggccggggaacataacattgaagaaactgaacacacggagcaaaagcgcaacgtgattcggattatcccacaccataactacaatgcagccatcaataagtacaatcatgacattgcacttctggaacttgatgagccactggtgttgaattcttacgtgacgcctatttgcattgcagacaaggagtacactaacatctttctgaaatttggctcagggtatgtgtccggctggggccgagtctttcacaaaggaaggtcagcacttgtgttgcaatacctgcgggtaccactggtcgaccgtgccacttgcttgcggtccactaaattcaccatctacaacaacatgttttgcgctggattccacgaaggggggagagattcctgccaaggagattcaggtggacctcatgtgaccgaagtcgagggtaccagctttcttaccggtatcatttcctggggtgaagaatgcgcaatgaaaggaaaatacggtatatacaccaaggtgagcaggtacgtgaattggattaaggaaaaaactaaactcacc

SEQ ID NO: 2566 - DNA, 1383 bp, Artificial Sequence
  derived and/or modified sequence
atgcagcgggtcaatatgattatggccgagtcgccaggtctgatcactatctgcctgctgggatacctgctctccgcggaatgtaccgtctttctggatcacgaaaacgcaaataagatcctgaatcgccccaagagatataacagcgggaagctggaggagttcgtgcaaggcaatctggaaagggagtgcatggaagaaaagtgttcctttgaggaggcccgcgaagtgtttgaaaacactgaacgcaccaccgaattttggaagcagtacgtggacggtgatcagtgcgaatcgaatccgtgcctcaacgggggctcttgcaaggacgatatcaactcctacgagtgctggtgtccgttcggcttcgaggggaaaaactgcgaactcgatgtgacttgtaacatcaagaacggtagatgcgaacaattttgcaagaactcagcagataacaaggtggtctgcagctgcactgagggctacaggctggcggagaaccagaagtcatgtgaacctgcggtgcctttcccatgcggtcgggtgtccgtgtcccagacgtcaaagctgacccgagccgaaaccgtctttccggacgtggactacgtgaactcgacggaagccgaaaccatcctcgacaacatcactcaatcgactcagtcgtttaacgacttcacccgggtggttggaggagaagatgccaagccgggtcagtttccatggcaggtggtcttgaacgggaaggtagacgccttctgtggaggatccattgtcaatgaaaagtggatcgtcactgccgcccattgcgtggaaaccggagtgaaaatcaccgtcgtggccggagaacataacatcgaggaaactgaacacactgagcaaaaacgcaacgtgatccgcatcatcccccatcacaactacaacgcggcaatcaacaagtacaaccatgacatcgcattgctggaactggacgagccactggtcttgaactcctacgtcacgccgatctgcatcgcggacaaggaatatactaacatcttcctgaaattcggttccggatacgtgagcgggtggggaagagttttccataagggacggtcagccttggtgttgcagtacctgcgggtgcccctcgttgacagggccacctgtctgcgctccactaagtttaccatctacaacaacatgttttgcgccggttttcacgagggaggccgcgatagctgccagggcgacagcggcggaccgcacgtgactgaggttgaaggaacttcgttcctcactgggattatctcgtggggagaagagtgcgcgatgaaaggcaagtatggaatttacacgaaagtcagcagatacgttaactggatcaaggagaaaaccaagctgact

SEQ ID NO: 2567 - DNA, 1383 bp, Artificial Sequence
  derived and/or modified sequence
atgcagcgtgtcaatatgattatggcggagagtcctggtctcataacaatctgcctgctcggatatttgcttagcgccgagtgcacggtattcctggaccacgagaatgccaacaagattcttaataggccaaaacgttataatagtggaaagctcgaggagtttgttcaaggtaatctggaacgagaatgcatggaagagaaatgttctttcgaagaagcgagggaggtgtttgagaatacggagagaacaacggagttctggaagcaatacgtcgacggggatcaatgcgagtctaacccctgcttgaacggcgggtcttgcaaagatgatattaacagctatgaatgttggtgcccgttcggatttgaagggaagaattgtgaactcgacgtgacttgcaacataaagaacgggcggtgcgaacaattctgcaaaaattcagccgataacaaggtcgtttgttcctgtaccgagggctaccggcttgcagaaaaccagaaatcatgtgagccggccgtgccatttccgtgtgggcgtgtttccgtgtcgcagacttccaaactgactagggctgagaccgtattccccgacgtggactatgtgaacagtacagaagccgagacaatcctagataatatcactcaaagcacccagtcgttcaacgacttcactcgggttgtcggtggggaagacgctaagccagggcagtttccgtggcaggtggtcctcaacggcaaggtcgacgccttttgtggggggtccatcgtcaacgagaagtggatcgtaaccgccgcacattgtgtcgagacgggcgttaaaatcacggtcgtcgccggagagcataacattgaggagacagagcatacagagcaaaaacgaaatgtcatccgcatcatcccccatcacaattacaacgctgcaattaataagtacaaccacgatattgcactgcttgaattggacgaacctctggttctcaatagctatgttactcctatctgcatagcggacaaagaatacactaatatcttcctgaagttcggctccgggtatgtctccggttggggcagggtctttcataaggggcgatctgccttagttctgcagtatctgagggtcccactcgtggatagggcgacttgcttgagaagtacgaaattcactatttacaataatatgttttgtgcaggatttcatgagggcggacgtgatagctgccagggcgacagtggaggccctcacgtgaccgaagtcgagggcacaagcttccttactggcatcatctcctggggcgaagaatgtgctatgaaaggcaagtatggcatttataccaaggtctctcgatatgtgaactggataaaagaaaaaaccaagcttacc

SEQ ID NO: 2568 - DNA, 1383 bp, Artificial Sequence
  derived and/or modified sequence
atgcagcgcgtgaacatgattatggccgagtcccctggacttattaccatctgtctcctcgggtacctgctgtcggccgaatgcaccgtgttcctggatcatgaaaacgcaaacaaaattcttaaccgaccgaaaagatacaattcgggaaagttggaagaatttgtgcagggtaatcttgaacgggagtgcatggaggaaaaatgtagctttgaagaagcccgtgaagtgttcgagaatacggagcgcactaccgaattctggaaacaatacgtcgatggtgaccagtgcgaatccaacccatgtttgaatggagggtcgtgtaaggatgatatcaattcgtatgagtgttggtgccctttcggtttcgagggtaagaactgtgaacttgacgtgacctgcaacataaagaacggaagatgtgaacaattttgcaagaactccgcagataacaaagttgtgtgttcctgtaccgaaggatacagacttgctgagaatcaaaaaagctgcgagccggcagtcccttttccctgtggacgggtatccgtgtcgcagacgtctaaacttaccagggcggagactgtgtttcccgacgtggattacgtcaacagcactgaagcggaaaccatccttgacaacatcactcagtcgacgcaatcctttaacgactttaccagggtggtcggcggagaagatgccaagccgggacagttcccatggcaagtggttctcaacggaaaggtcgatgccttttgtggaggaagcattgttaacgagaagtggatagtgaccgcagcacattgtgtggagacgggtgtcaaaatcactgtcgtggcgggagaacataacattgaagaaaccgaacataccgaacaaaagagaaatgttattcgcattatcccacatcacaattacaacgcagcgatcaacaagtataatcatgatatcgcccttctggaacttgatgaacctctcgtgctgaactcctacgtcacgcccatctgcatcgcagataaagagtacactaacattttcttgaagttcggttcagggtacgtgtcaggctggggtcgcgtgtttcacaagggtcggtctgcacttgtgctgcagtatctccgcgtgcctctcgtggacagagcgacttgtcttaggtcgactaagttcactatttacaacaacatgttctgtgcagggtttcatgaaggaggtcgcgattcctgtcagggagattccggaggacctcacgtcactgaggtggaagggacctcgtttctgactgggatcattagctggggtgaagaatgtgcaatgaaaggaaagtacgggatttacactaaggtgtcgcgatacgtcaattggattaaagaaaagactaagctcact

SEQ ID NO: 2569 - DNA, 1383 bp, Artificial Sequence
  derived and/or modified sequence
atgcagagagtgaacatgattatggccgagtctccagggctaatcacaatttgtctcctggggtatctcctctcagccgagtgcactgtgtttcttgaccatgaaaacgccaataaaatcctgaacaggcccaaaaggtacaactcggggaaacttgaggaattcgtgcaggggaatctggaacgcgagtgtatggaggagaaatgctcttttgaggaggctagggaggtgttcgagaataccgagagaactactgagttttggaaacagtacgtggacggagatcaatgtgagtctaacccgtgcctgaatggaggcagctgcaaagatgacattaacagctatgaatgctggtgccccttcggattcgaaggcaagaactgtgagcttgatgtaacgtgtaatataaagaatggacggtgtgaacagttttgcaaaaacagtgcagacaataaagtcgtttgtagttgtactgaagggtatcgtttggccgagaaccagaagtcatgtgaacccgccgtccctttcccatgcggacgagtatcggtttcccagactagtaagttaacccgtgccgagactgtgtttccagacgttgactacgttaattcgacagaggcagaaaccattctcgataacattacccaatctacccagtcctttaatgactttacacgcgtggtgggcggtgaggacgccaaaccaggacaatttccctggcaggttgtgctcaacggaaaagtcgatgctttttgtgggggatctatcgtcaatgagaaatggattgttaccgcagcccattgtgtagaaaccggtgttaaaattaccgtggtggctggggagcataacattgaggagactgaacacacggagcagaagcggaatgtaatcaggatcataccccaccacaattacaatgcagcgattaataaatacaatcacgatattgcattactggagttagatgaaccactggtgcttaattcctatgtgactcctatttgcatagctgacaaggagtacaccaatatcttcctgaagttcgggtctggatacgtgagtgggtggggacgtgtgttccataagggacgttctgctctggtcctgcaatacctaagggtccccctggtggatagagccacttgcctgcgaagcaccaagtttacaatctataataatatgttctgcgcaggatttcacgaggggggcagggactcatgccagggcgattccggcgggccccatgtgaccgaggtcgagggcacttcctttctgaccggtatcatttcttggggggaagaatgcgcaatgaaaggaaagtacgggatctacactaaagtgagcaggtacgtcaattggataaaagaaaagacaaagcttaca

SEQ ID NO: 2570 - DNA, 1383 bp, Artificial Sequence
  derived and/or modified sequence
atgcagcgtgttaacatgataatggcggagtctcccggtttgattacaatctgcctgctcggctacctgctgtccgccgaatgtactgtgttcctggaccacgagaacgccaataagatcctaaaccggcccaagaggtacaacagtgggaagctggaagagttcgtgcagggcaatttggaacgcgagtgtatggaggagaagtgttctttcgaagaggctagagaggtgttcgagaacactgaaagaacaacagaattctggaagcagtatgttgatggtgatcagtgtgaatccaatccctgcttgaacggtgggtcttgtaaggacgacataaattcctacgagtgctggtgccccttcggttttgagggtaagaactgcgagttggacgttacgtgcaacatcaaaaacggccggtgcgagcagttctgcaagaatagcgccgataacaaagtggtgtgctcctgcaccgaggggtatcgactggcagaaaatcagaagtcttgcgagccggctgtgcccttcccctgcggtagggtgagtgtcagccagactagtaagctgaccagagccgagacggttttccctgacgtcgactatgtgaactccactgaagctgagaccattctggacaacataactcagtctacgcaatctttcaatgatttcaccagagtggttggaggcgaagacgccaaacccggacaattcccctggcaggtcgttcttaacggaaaggtggatgcgttttgcgggggctctatagtgaacgaaaaatggattgttaccgccgctcactgtgtggagactggagtcaagattacagtcgtggctggggaacacaatatcgaggagactgaacataccgagcaaaagcgaaacgtcatccggatcatccctcaccataattacaatgctgctattaataagtacaaccatgatattgccttgttggagcttgatgaacccttggtcttgaattcttacgtgacaccaatctgcattgccgacaaagagtataccaacattttcctgaagttcggtagcggctacgtgagcggctgggggagggtgttccacaaaggaagatcagctctggtgctccagtacctaagggtccctctggtagatagagcaacgtgcctccgaagcactaaatttaccatctacaataacatgttttgcgctggattccatgaggggggtcgggattcatgtcagggcgattcgggcggcccccacgtgacggaagtagaggggacgagcttcctgacaggaataatcagttggggagaagagtgcgccatgaaaggtaaatatggcatctacactaaggtcagtaggtatgtgaactggatcaaggagaaaaccaaactgacg

SEQ ID NO: 2571 - DNA, 1383 bp, Artificial Sequence
  derived and/or modified sequence
atgcaacgggtaaacatgatcatggctgaaagcccgggactcatcaccatctgcctccttggatacctcctgagcgctgaatgtaccgtgtttctcgatcatgaaaacgccaacaagatcttgaatcgccctaaaagatataacagtggaaagctcgaggaattcgtccagggaaacctcgaaagagaatgcatggaggaaaagtgcagcttcgaagaggcacgggaggtgtttgagaataccgagcgcactaccgagttctggaagcagtacgtggacggagatcaatgcgagtcgaatccgtgtctcaacggaggatcttgtaaggacgatatcaactcctacgaatgttggtgcccgttcggcttcgaggggaagaattgcgagctggacgtgacttgcaacataaagaatggccgctgcgagcagttctgcaagaattcggcggacaacaaggtcgtgtgttcttgcactgaaggctatcgcctggccgaaaatcaaaaatcatgcgagccggccgtgcctttcccatgtgggagggtgtcagtgtcgcagaccagcaagctcactcgggcggaaaccgtttttcctgacgtggattacgttaattcaaccgaggctgaaactatcctggataacataacccaatccactcaatcattcaacgatttcactcgcgtcgtggggggagaagatgcaaagcctggccaatttccgtggcaggttgtgcttaatgggaaggttgacgccttctgtggcggaagcattgtgaatgagaagtggatcgtgaccgcggcccactgcgtggaaactggtgtcaaaatcacggtggtggcgggagaacacaacatcgaggaaactgagcacactgaacagaagaggaacgtcattagaattatcccacatcacaattacaacgcggcaatcaataagtacaaccacgatatcgcactgctggagctcgacgagcccttggtgctgaacagctacgtgacccctatctgcattgccgacaaggagtacaccaacatcttccttaagttcggatccggatacgtgtctggatggggtcgggtctttcataaaggtcgctcagcattggtcctccagtacctgcgcgtcccgctggtggaccgggcaacttgcctgagatcaaccaagttcactatctacaataacatgttctgcgccggatttcacgagggagggagggactcgtgccagggagattcgggaggaccgcacgtgacggaagtagaggggacttccttcctgaccggtatcatcagctggggggaagagtgcgcaatgaagggaaaatacggtatctacacgaaagtctccagatacgtgaactggatcaaagaaaaaacgaaactgacc

SEQ ID NO: 2572 - DNA, 1383 bp, Artificial Sequence
  derived and/or modified sequence
atgcagcgcgtgaacatgattatggctgaaagcccggggctgatcaccatttgtctgctgggttatcttctctccgctgagtgtaccgtgttcctggaccatgaaaatgcgaataagatcttaaaccggcctaaacgctacaactcgggcaaactggaggagttcgtccaaggcaacctggagcgcgagtgtatggaggagaagtgttcctttgaggaagcccgcgaagtgtttgaaaacacggaacgcactacggagttttggaagcagtacgttgacggagaccagtgcgaatctaatccgtgtctgaacggtggtagctgtaaggatgacattaatagctatgagtgctggtgtccatttggtttcgaaggcaaaaattgcgagctggacgtcacctgcaatatcaagaacggccgatgcgaacaattttgtaaaaactcagcagacaacaaagtggtctgttcctgtactgaaggctaccgcttggccgaaaaccagaaatcttgcgagccggcggtgcccttcccatgcggcagggtcagcgtctctcagaccagcaagctaactagagccgaaacggtttttccggatgttgattacgtcaatagtacggaggccgaaacgattctggacaatattacgcagtcgacgcaaagctttaatgatttcacgcgcgttgtcggcggagaggatgctaagccaggccaatttccgtggcaggtcgttttgaacggtaaggtcgatgcattttgcggcggctccatcgtgaatgaaaagtggatagtgacggcggcacactgcgtggagactggtgtgaaaatcacagtcgtcgctggagaacacaatattgaagagacggaacacaccgaacagaagcggaatgtgattcgcattattccacaccacaattataatgcagccattaataaatataaccacgacattgctttgctggagctcgatgagcctctggtcttgaactcttacgtgacgccaatttgtatcgccgataaagagtacacaaacatcttcctcaagttcggctcgggctacgtcagcggctggggccgggttttccacaaaggccgcagcgccctggtcctacagtatctgcgtgttccgctcgtggatcgcgccacttgtttgcggagcacgaaatttaccatttataataacatgttttgcgcgggtttccatgagggcgggagggatagctgccagggcgactccgggggtccacacgttactgaggtggaaggcacaagcttcctcacgggtattatcagctggggtgaggaatgcgcgatgaaaggcaagtacggcatttatacgaaagttagccgctacgtaaattggattaaggagaagacgaaactcaca

SEQ ID NO: 2573 - DNA, 1383 bp, Artificial Sequence
  derived and/or modified sequence
atgcaacgggttaacatgatcatggcagaatcaccaggtttaatcaccatctgccttcttggttatttattgtctgccgaatgcactgtgttcctagatcatgaaaatgcaaataagatccttaataggcccaagcgttataactccgggaagctcgaggagttcgtccagggtaatttggaaagggaatgtatggaagaaaagtgctcattcgaagaggctcgtgaagttttcgaaaatacagagcgaacaactgaattctggaaacagtacgtggacggtgatcaatgcgaatcaaacccttgccttaacggtgggagctgtaaagacgatatcaattcctacgaatgttggtgcccttttggttttgagggaaaaaattgcgaactcgacgtgacttgtaatatcaaaaacggtagatgcgaacagttttgtaaaaactcagctgataataaggttgtctgtagttgtactgaaggatataggttggcggagaaccagaaaagttgcgaaccagccgttcccttcccatgcggtagagtttctgtgtcccaaactagtaagcttacaagggctgagaccgtctttccagatgtcgattacgtgaattccacagaggctgaaactattctcgacaatattactcaatcaacccagagtttcaatgatttcacgcgggtggttggaggcgaagatgctaaacctgggcagttcccttggcaagttgtactaaatggaaaggtcgacgctttttgcggaggatcaattgtgaatgagaagtggattgttactgctgctcactgcgtggagaccggtgttaaaatcaccgttgtcgctggcgaacataacattgaagagaccgagcacactgaacaaaagcgaaatgtgattcgaataattccacaccataactacaatgctgctattaataagtacaaccatgacatcgctcttttagagctagatgaacccttggtgttgaactcatatgttacgccaatctgcattgctgacaaagaatataccaacatctttttgaaatttggaagtggctatgtttcaggttggggtagggtgtttcataagggccgatccgctcttgttttacaataccttagggttcctcttgtcgatagagctacttgcctaaggagtacgaaattcaccatatacaataacatgttttgcgctggttttcatgaaggtggacgggacagctgtcaaggcgattcgggaggtccacatgttaccgaggttgaaggcacgtccttcttgacaggcatcatcagctggggagaagagtgcgccatgaagggaaaatatggtatctatactaaagtctctcgatacgtaaattggattaaggaaaagaccaaactgact

SEQ ID NO: 2574 - DNA, 1383 bp, Artificial Sequence
  derived and/or modified sequence
atgcagcgcgttaacatgatcatggctgaaagcccaggattaatcaccatttgcctgttaggctacctcctgagtgctgagtgcacagtcttcctggaccatgaaaacgccaacaagatattgaacagacctaagcgatacaattcggggaaactggaagagttcgtgcaaggcaatctggaacgtgagtgcatggaagagaagtgtagcttcgaagaggccagggaggtattcgaaaataccgaacggactactgagttctggaaacagtacgttgacggtgatcagtgtgaatccaatccatgcctgaatggtggcagttgcaaagacgatattaattcttacgaatgctggtgcccattcggtttcgaaggaaagaattgcgagctggatgtgacttgcaacatcaaaaacggccggtgtgaacaattttgtaaaaatagcgctgataacaaagtggtttgttcttgcacagaggggtaccgtctggccgagaaccaaaagagctgcgagccagccgtcccattcccatgtggcagggtttctgtgagccaaacatctaaactaacacgcgcggagacggtcttcccagatgtggactacgtcaatagtacagaggccgagaccatcctggacaatatcactcaatctacacaaagttttaacgatttcactagggtggtcgggggagaggacgccaaaccaggtcagttcccgtggcaagtggtcctgaatggaaaagtagatgctttttgcgggggaagcattgtgaacgaaaaatggatcgtgactgccgctcactgcgtagaaacgggcgtcaagataacagtggtggcaggagagcacaacatcgaggagaccgagcacaccgaacagaagcgtaacgtgatcaggatcattccacaccacaactataacgccgcaataaataaatataaccatgatatcgctctgctggagcttgatgagcccctcgtgcttaacagctacgtgacccctatttgcatcgctgacaaagagtacaccaatatcttcttgaagttcggatctggctatgtgtccggctggggccgcgtcttccataagggtcgcagcgctctggtcctgcagtacctccgagtgcctcttgtggaccgagccacatgcctccgttcaactaagtttactatctataacaatatgttctgtgcggggttccatgagggaggcagggattcatgtcaaggtgactcaggtggcccgcatgtgaccgaggtggaaggcacaagctttctgaccggaattatttcctggggcgaggagtgcgctatgaagggtaaatacggcatctataccaaagtctctaggtacgtgaattggatcaaggagaagacaaaactgacc

SEQ ID NO: 2575 - DNA, 1383 bp, Artificial Sequence
  derived and/or modified sequence
atgcagagggtgaacatgataatggcagaatcccctggtctgatcactatctgtctgctggggtatctgctgtccgctgagtgcaccgtgttcctagaccacgagaatgcaaataagatcttgaaccgcccaaaaaggtacaactctggcaagttggaggagttcgttcagggaaatttggaaagagaatgtatggaagagaagtgttccttcgaagaagctagggaggttttcgaaaataccgagcgcaccaccgagttttggaagcagtacgtagacggcgaccagtgtgaatccaacccctgcctgaacggcgggtcgtgtaaggacgatattaattcttacgagtgttggtgtcctttcgggttcgaaggaaagaattgtgagcttgacgttacctgcaatataaagaatgggcgttgtgagcagttttgcaagaatagcgcggacaacaaggtagtgtgtagttgtacagagggatacaggttagcagaaaaccagaagagctgcgagccagccgtgccatttccttgcgggcgggtatctgtcagtcagacttccaaactcacacgcgcagagactgtgtttcccgatgtcgactacgttaattccaccgaagccgaaacaatccttgacaacatcacccagtctactcaatctttcaatgactttaccagagtcgtaggtggcgaggatgcaaaacccgggcaattcccgtggcaagtggttctgaatggaaaggttgacgcattttgtggagggtcgattgtgaatgagaagtggattgtgacagctgcgcactgcgtagagactggtgtgaaaatcactgtcgtcgccggggagcacaacatcgaagagaccgagcacaccgaacaaaaacggaacgttatccggattattccccaccacaattataatgctgccatcaataagtacaaccatgacatcgcactgctggaactcgatgagcccctggtactgaatagctatgtcacaccaatttgcatcgcggacaaggagtacacgaatatcttccttaagttcggatcaggctatgtgtcgggctggggcagggtgttccataagggacgcagtgcattggtcctgcagtatctgcgtgtgccactcgtagatagggccacctgcttgaggagcactaaatttaccatatacaataacatgttttgcgcgggtttccacgaggggggaagagacagttgccagggagactcaggcggcccacacgtgacggaggttgaagggacaagttttcttacaggcataatttcatggggcgaagagtgcgctatgaaaggaaagtatgggatctacaccaaagtgtcgaggtacgtgaactggattaaggagaaaacaaaactcacc

SEQ ID NO: 2576 - DNA, 1383 bp, Artificial Sequence
  derived and/or modified sequence
atgcaacgagtgaacatgattatggcagagagccctgggctgatcactatctgtctcctgggttatctcctttccgcagagtgtaccgttttcttggaccacgaaaacgcgaacaagattcttaacaggcctaagcgatacaatagcggtaagctcgaggaatttgtccaaggcaacctggaacgcgagtgcatggaggagaaatgttcctttgaggaagcccgcgaagtgttcgaaaatactgaaaggactacggaattctggaaacaatacgtggacggcgatcagtgtgagtcgaatccctgccttaacggaggaagctgtaaagatgacataaactcgtatgaatgctggtgtcccttcggctttgaaggtaagaactgtgaacttgacgtcacctgtaacatcaagaacggtcgatgcgaacaattttgcaagaattcagcagacaataaggtcgtctgttcgtgtactgagggctaccggctggcagagaaccagaaatcatgcgaaccagcagtcccttttccgtgtggcagagtctccgtgtcccaaacctctaagttgacgcgggcagaaaccgtctttcctgacgtggattacgtcaattccaccgaagccgagactatccttgataacattacccagtcgactcaatcatttaacgatttcaccagagtggttggtggggaagatgcgaaaccaggacagtttccttggcaggtggttctgaacggtaaagtggatgccttctgcggaggctcgatcgtgaacgaaaagtggattgtgaccgcagcacactgtgtggaaactggggtcaaaatcaccgtcgtggctggagaacacaatattgaagaaactgagcacaccgagcagaagcgcaacgttattaggatcataccacatcacaattacaacgcggccattaacaagtacaaccacgatattgcacttctcgagcttgacgaaccgctggtgctgaattcctacgtgacgccaatatgcattgccgataaggaatacaccaacatatttctcaaatttggcagcggatatgtgtcgggctggggaagagtgttccataagggtcgaagcgctttggtgctgcaatatctgcgggtgccgcttgtggaccgcgcgacctgtttgcgctccaccaaattcacgatttacaataacatgttctgtgcaggatttcacgaaggtggacgcgattcgtgtcagggggactccggtggaccccatgtgacggaggtggaaggtactagcttcctgacggggatcatctcgtggggagaagaatgtgctatgaagggaaaatacggaatttacactaaggtgagcagatacgtgaattggataaaggaaaagaccaaacttact

SEQ ID NO: 2577 - DNA, 1383 bp, Artificial Sequence
  derived and/or modified sequence
atgcaaagggtgaacatgatcatggcagaaagcccaggtttgattactatttgtcttttgggctaccttctttctgcagaatgtactgtgttccttgatcatgaaaatgcaaacaagattcttaatagacctaaaaggtacaatagcgggaagttggaagaattcgtgcaaggtaatctggaaagggaatgtatggaagagaagtgctcgtttgaggaggcacgcgaagtctttgagaacactgaaagaactactgagttctggaagcagtacgtcgacggcgatcagtgtgaatccaacccttgtttgaatggaggttcctgcaaagacgacataaactcctatgagtgttggtgcccttttggatttgaagggaagaactgcgaacttgatgtgacttgcaacataaagaacggacgatgcgagcagttctgcaaaaacagcgctgacaacaaagtcgtctgctcatgcaccgaggggtaccgcctcgcagagaaccagaaatcgtgtgagcccgccgtgccattcccatgtgggcgggtgtcggtgtcgcaaacgtcgaaacttactcgcgcagaaaccgtgttccctgatgtcgattacgtgaactccactgaagcagaaaccattcttgacaacatcactcaaagcactcagtccttcaacgacttcacgagagtcgtgggcggcgaggatgccaagccgggacagtttccttggcaagtcgtgttgaacggtaaggtggacgcgttttgtggaggaagcatagtgaacgaaaaatggattgtgactgctgcacactgtgtggagactggcgtcaagattacggtggtggcaggagaacataacattgaggaaaccgaacatactgaacagaaacgtaatgtcatacgcataattccacaccataactacaacgcggcaattaacaagtacaaccatgatattgccctcctcgaacttgatgaaccccttgtcctgaactcgtacgttaccccaatttgtatcgcggataaagaatacaccaacatatttctgaagtttggatccggttatgtctccgggtggggacgggtctttcacaaaggtcgctcggcccttgtgctccaataccttagagtcccacttgtggatcgggcaacttgtctgaggagcactaaattcaccatttacaacaatatgttttgtgcaggatttcacgaagggggtcgcgattcctgccaaggtgattcaggaggaccccacgtgaccgaggtcgaaggaacttcctttctcactggtatcatttcctggggtgaagaatgcgccatgaagggtaagtacggtatctacaccaaggtcagccggtacgtgaattggattaaagaaaagaccaagctcacc

SEQ ID NO: 2578 - DNA, 1383 bp, Artificial Sequence
  derived and/or modified sequence
atgcagcgcgttaatatgattatggccgagtctcctggattgatcactatctgcctgctgggctacctgctctctgctgagtgcactgtttttctggatcacgaaaacgctaataagatcctgaatcgccctaagcgctacaatagcggcaaactggaggagttcgtccaaggcaacctcgaacgcgaatgcatggaagagaaatgctcctttgaagaagcgcgggaagttttcgagaacacggagaggaccaccgagttttggaaacagtacgttgatggcgaccagtgtgagtccaacccttgcttaaatggcggcagctgcaaggatgatatcaactcgtacgaatgctggtgtccgttcggcttcgaggggaagaactgtgagctcgacgtcacttgcaacatcaaaaacggccgatgcgagcagttctgtaaaaacagtgccgataacaaggtcgtgtgttcctgcaccgaaggttaccgtctcgcagagaaccagaagtcctgcgagcccgcagtcccgtttccctgtggtcgcgtcagtgtctctcagacctctaaactgacccgagcggagaccgtcttcccggacgtcgactatgttaactccaccgaggccgagacgatcctcgataacatcacccagagtacccagtcatttaacgacttcaccagagtcgtcggaggcgaggatgccaagcccggtcaattcccctggcaggtcgtgctgaacggtaaggttgatgcattctgtggtggtagtatcgtgaacgaaaagtggatcgtcacggcggctcattgtgtcgagacaggcgtcaagatcaccgtggttgccggcgagcacaatatagaggaaacggaacacacggagcagaagaggaatgtcattcgcattatcccacaccacaactacaacgccgccatcaataagtacaatcatgacatcgccctgctcgagctggacgaaccgcttgtgctgaactcatatgtcacccccatttgtatcgctgataaggagtatacaaatattttccttaagtttggctcaggttacgtctccggctggggtcgtgtcttccacaagggccgcagcgcactggtccttcagtacctacgcgtgcccctcgtcgatcgagcgacatgcctgaggagcacgaagtttacgatctacaacaacatgttttgtgctggattccacgaggggggacgcgatagttgtcagggagacagcggcggacctcacgtcactgaggtggagggtactagcttccttaccggaattatctcgtggggtgaggaatgcgccatgaagggtaagtacggaatttataccaaggtaagccggtacgtcaactggatcaaggaaaaaacaaagctaact

SEQ ID NO: 2579 - DNA, 1383 bp, Artificial Sequence
  derived and/or modified sequence
atgcagagggtgaacatgatcatggccgagagtccaggcctgattacaatctgcttactgggctatctcctctccgctgaatgtacagtgttcctggaccacgagaacgccaataaaatactgaaccgacccaaacgctacaactccggcaagcttgaggaattcgtgcagggcaatctggagcgagagtgtatggaagagaagtgctccttcgaagaggctcgtgaggtttttgaaaacactgagagaacaactgaattctggaaacaatacgtggacggggaccagtgcgagtctaacccctgtctgaacggcgggtcttgtaaggacgacattaattcctatgagtgctggtgtcctttcggctttgaaggcaaaaactgcgagctggacgtgacctgtaatataaagaacggcaggtgtgaacagttttgtaaaaatagtgctgataacaaggtggtctgttcttgcacagaggggtataggctggcagagaatcagaaaagctgcgagcctgcagtgcctttcccatgcggtcgagttagcgtctcccagacctccaaactgactcgggctgaaactgtgtttcctgatgtcgactatgtgaactccaccgaggccgagactattctcgacaatattacacaatccacacagagtttcaacgattttactcgagtggtgggcggcgaggatgccaagcccggccaattcccctggcaggtggttttaaatgggaaagttgacgcattttgtggtgggtcaattgtgaacgaaaagtggatagtcaccgcagcccattgcgtggagacaggcgtgaaaatcactgttgtcgcaggggaacataatattgaagagactgagcatactgagcaaaagcggaatgtgatacggatcattccccatcataactacaacgctgccataaacaagtacaaccatgacatcgcattactagagttagatgagcccctggttctgaacagttacgtgacccccatatgcatcgctgataaggaatatacaaacatctttctcaagtttggctctggctatgtttccggctggggcagagttttccataagggccgctccgcccttgtgcttcaatacctgcgcgtgcctctagtggatagggctacctgcctgcgctccactaagtttactatttacaacaatatgttctgtgctggattccacgagggcggccgggactcatgtcagggagactctggcgggccacatgtcacagaagtagaggggacctcttttctgaccggcatcatatcctggggcgaagaatgtgcaatgaaagggaagtatggcatctacactaaagtttcccggtatgtgaattggatcaaggagaaaactaagctcacc

SEQ ID NO: 2580 - DNA, 1383 bp, Artificial Sequence
  derived and/or modified sequence
atgcagagggttaatatgattatggcagagtcccctggccttataactatttgcctcttgggataccttctttcagcagagtgcactgtgtttctggaccatgagaacgcaaataagatcttaaataggcccaagcgttataactcgggaaaattggaagagttcgtacaaggcaacctggagcgagagtgcatggaggagaagtgctccttcgaggaagctagggaggtttttgaaaatactgaaagaacgactgagttctggaaacagtacgtggatggagatcaatgcgagtctaacccatgtttgaatggtggcagttgtaaggatgatataaatagctacgaatgctggtgtcccttcggcttcgaagggaagaactgtgagctggatgtcacgtgcaatattaagaatggccggtgcgagcagttctgtaaaaactccgccgataacaaagtggtgtgttcctgtaccgagggatacagactggccgagaaccagaagtcctgtgagcctgccgtcccctttccttgcgggagggtgtccgtttcccaaacaagtaaactcaccagggccgaaacagtcttccccgatgtggactacgttaactccacggaagcagaaaccatattagataatataacccaatcaacccaaagctttaacgactttacacgcgtggtcggaggcgaggatgcgaagccgggacaattcccttggcaggtggtgctgaatggaaaagtggatgcattctgcgggggatccattgttaacgaaaagtggattgtgacagccgcccactgtgtggagacaggcgtgaagatcactgtcgtggctggggagcacaacatagaagagacagaacacaccgagcaaaaacggaacgtcattcgcataattccacaccataactacaatgccgccattaataagtataatcacgacatagccctgttggaactagatgagccccttgtgctgaatagttatgttacacctatttgtatcgccgataaagaatataccaacatatttcttaaattcggcagcgggtacgtttccggatggggcagggtcttccacaagggacgcagtgccttggttctgcaatacctgcgagtacctctggtggaccgagcaacatgcctcagaagcactaagttcaccatttacaacaacatgttttgtgctgggttccacgaggggggccgagactcttgccagggggacagtggggggccacatgtgaccgaggttgagggcacatcattcctgacagggattattagctggggggaagagtgcgccatgaagggtaagtatgggatttatactaaggttagtcgttatgtgaattggataaaggagaaaaccaaacttacc

SEQ ID NO: 2581 - DNA, 1383 bp, Artificial Sequence
  derived and/or modified sequence
atgcaaagggtgaatatgattatggctgaatcacctggactgatcaccatttgtctcctcggttacctcctctccgcggaatgcaccgtctttctggatcacgagaatgccaataagatcctgaatcggccgaagagatacaattcagggaagctggaagaattcgtgcagggaaaccttgagcgggagtgtatggaggagaaatgctccttcgaggaggcgcgggaggtgttcgaaaataccgaacggaccactgagttctggaagcaatacgtcgacggggatcagtgcgaatcaaatccgtgcttgaatggcgggagctgtaaggatgatatcaatagctacgaatgctggtgcccgtttggattcgaaggaaagaactgtgagctggacgtgacttgtaacattaagaatggacgctgcgagcaattctgtaagaattccgccgacaacaaagtggtctgctcatgcaccgagggctaccggctcgcggaaaaccagaagtcatgcgagccagcagtgcctttcccttgtggccgcgtgtcggtgtcgcaaactagcaagttgactcgggcggaaaccgtgttcccagacgtggactacgtgaactcaaccgaagcagaaacgatcctggacaacatcactcagtcgacccagagctttaacgatttcacccgggtggtgggaggtgaggacgctaaaccgggacagtttccatggcaagtggtcctgaatggcaaggtggacgcgttctgcggaggatcgatcgtgaatgaaaagtggatcgtcaccgcggctcattgtgtggagactggagtgaaaatcaccgtggtggcgggcgaacacaacatcgaggaaaccgaacacactgaacagaaaagaaacgtgattcggatcatcccacaccacaactacaatgcagcaatcaataagtacaaccatgatatcgccctgctggagctggatgagcccctggttctgaactcgtacgtgacccctatttgcatcgccgataaggagtataccaatatctttctgaagttcggctcaggctacgtgtcgggatggggacgggtgttccataaaggccggtccgcacttgtcctgcagtacctccgcgtgccgttggtggaccgcgccacttgcctgctgagcaccaaattcactatctataacaacatgttctgcgcaggctttcacgaaggaggccgggacagctgccaaggagactccggtgggccgcacgtgacggaagtggagggcactagcttcctgactggcatcatctcgtggggggaggaatgcgcaatgaaaggcaagtacggaatctacaccaaggtgtccaggtacgtgaattggatcaaggaaaagaccaaactcact

SEQ ID NO: 2582 - DNA, 1383 bp, Artificial Sequence
  derived and/or modified sequence
atgcagcgggtgaacatgattatggccgagtctcctggtctaattacgatatgtctgctcggatatctgctctcggctgaatgcactgtgttcctcgaccacgagaacgctaacaagatcttaaatcgcccaaaacgttacaactccgggaagctagaggagttcgtgcaggggaacctggaaagagaatgtatggaggagaagtgctcctttgaagaggcacgcgaggtgttcgaaaatacagaaagaacgaccgaattctggaagcaatacgtcgacggagaccaatgtgaaagcaatccctgtctaaacggcggtagctgtaaggacgacattaactcttatgagtgttggtgcccttttgggtttgagggcaaaaattgcgagcttgacgtcacatgtaacatcaagaacgggcgctgtgaacagttctgcaaaaacagtgccgacaacaaagtagtttgttcctgtaccgaggggtaccgactcgctgagaatcagaagtcctgcgagcctgcggttcctttcccatgtggcagagtgtccgtttcccagactagtaagttgaccagggccgagacggtcttcccagacgtggactacgtcaacagcactgaggccgagaccatcttggacaatattacacagagcactcagtcgttcaacgactttactagggttgttggtggtgaggatgcaaaaccggggcaatttccatggcaggtggtccttaacggcaaagtggatgccttttgcggcgggagcattgtgaatgaaaagtggatagtcacggcagcccactgcgtggagactggagtgaagattactgtagtcgccggcgagcataatatcgaggagactgaacatacggaacagaaaaggaacgtgatcagaattattcctcatcataattacaacgccgccattaataagtataaccatgacattgcactgcttgaactcgatgagcccctagtgctcaacagctacgtgaccccgatttgcatcgccgataaggaatacacaaatatttttctcaagtttggtagtggctacgtctctggctgggggcgcgtgttccacaagggtcggtctgcgctcgtgctgcagtatttgcgcgtgccccttgtggaccgtgccacttgcttgctctctacaaagttcaccatttacaataatatgttctgtgccgggtttcatgaaggagggcgggattcttgccagggcgacagcggcggccctcacgtcaccgaagtagaaggcacaagctttctcaccggtataatttcgtggggcgaggagtgcgctatgaaggggaagtacgggatctacaccaaagtcagccgctatgtcaactggatcaaggagaagaccaagctcact

SEQ ID NO: 2583 - DNA, 1383 bp, Artificial Sequence
  derived and/or modified sequence
atgcaaagggtcaacatgatcatggccgaatccccaggactgattactatttgcctgctgggatacctcctgagcgccgagtgcaccgtgttcctggaccacgaaaacgccaacaagatcctcaaccgcccgaagcggtacaactcgggaaagctggaggaattcgtgcaaggaaatctggaaagagagtgcatggaagagaagtgctcgttcgaagaggcacgggaagtgttcgaaaacaccgaaagaaccaccgagttctggaaacaatacgtggatggcgatcagtgtgaatcaaacccctgcctgaatggtggctcgtgcaaagatgatatcaatagctacgaatgttggtgcccattcggatttgagggaaagaactgcgagttggatgtgacttgcaacatcaagaatggacgctgtgaacagttctgtaagaatagcgcagacaataaggtcgtctgctcctgtactgaaggctacagactggcagaaaatcagaagtcctgcgagccagccgtgccctttccgtgcggacgcgtgtccgtctcccagacttcaaagctgaccagggcggaaactgtgttcccagatgtggactacgtgaactctactgaagcggagactattctcgataacattactcagtcgactcagtccttcaacgactttactagggtcgtgggcggagaggacgctaagccaggacaattcccttggcaggtggtcctgaacggaaaagtggacgccttctgtggtggatcaatcgtcaacgagaaatggatcgtgaccgccgcccattgcgtcgaaaccggcgtgaagatcaccgtggtcgcaggcgaacataacatcgaagagactgaacacaccgaacagaagcgcaatgtcatccgcatcatcccgcatcataactataatgcagcgatcaataagtacaatcatgacattgcactcctcgagctggatgagcccttggtcctcaattcatacgtgaccccgatctgcatcgcggacaaagagtacaccaatatcttcctgaaatttgggtccggatacgtgagcggctggggtcgcgtgtttcataaaggcaggagcgccctcgtgctgcagtacctgcgggtgcctctggtggaccgagcaacgtgtcttttgtcaactaagtttactatctacaacaacatgttctgcgcgggcttccacgaaggcggacgggactcgtgtcagggagactcgggagggccgcatgtcaccgaggtggaaggtacctccttcctgactggtatcatcagctggggagaggaatgtgcgatgaagggaaagtacggaatctacaccaaggtttcgcgatacgtgaactggatcaaagagaaaactaagctgact

SEQ ID NO: 2584 - DNA, 1383 bp, Artificial Sequence
  derived and/or modified sequence
atgcagcgggtgaatatgatcatggccgaatcgccaggactgatcactatctgtctgctgggctacctcctgtcagctgagtgcaccgtgttccttgatcatgaaaatgcgaacaagatcctcaacaggcccaagcgatacaactctggcaagctggaagagttcgtccagggaaatttggaacgcgaatgcatggaggaaaaatgctcattcgaggaggcccgcgaggtgttcgagaatactgaaagaaccactgagttctggaaacaatacgtggatggggaccaatgtgaatccaatccgtgcctgaacggaggctcgtgtaaggacgacatcaattcttatgagtgctggtgcccattcggttttgaaggaaagaactgtgagctcgatgtcacctgtaacatcaagaatggaaggtgcgagcagttctgtaaaaactcggccgataacaaggtcgtctgttcatgcactgagggctaccgcctggccgagaaccagaagagctgcgaaccggccgtgccattcccgtgcggtcgcgtctcggtgtcgcagacttcgaagctcacccgggctgagactgtgttccccgacgtcgattacgttaattcaaccgaggcagaaaccatcctcgacaacatcactcagagcacccaatccttcaacgattttactcgggtcgtcggcggggaagatgctaaaccaggccagttcccttggcaggtcgtcctgaatgggaaggtggacgcgttctgcggaggatccatcgtgaacgaaaagtggattgtgaccgcggcgcactgtgtggaaacgggagtgaagatcactgtggtggctggggagcacaatatcgaagaaaccgaacacaccgagcaaaagagaaatgtcatcagaatcatcccgcaccacaattacaatgcagctatcaacaaatacaatcacgatatcgcattgctggagctcgatgagccgctggtgcttaacagctacgtgactccgatctgtatcgctgacaaggaatacaccaacattttcctgaagttcggttccggctacgtgtccggttggggccgcgtctttcacaagggacgctcagcactcgtgctgcagtatctgagagtccctctcgtggaccgagcgacctgccttctcagcaccaagttcactatctacaacaatatgttttgtgcaggattccatgaaggcgggcgggactcctgccaaggcgacagcggaggaccacacgtcaccgaggtcgaaggaaccagctttctgactggaatcatttcctggggcgaagagtgcgccatgaaaggaaaatacggaatttacactaaagtctcccgctacgtgaactggatcaaagaaaagacgaagctgacc

SEQ ID NO: 2585 - DNA, 1383 bp, Artificial Sequence
  derived and/or modified sequence
atgcagcgtgtgaacatgattatggccgagtcccccgggctgattacaatctgccttctggggtatctcctgtccgctgaatgcactgtttttctcgatcacgagaacgctaacaagattcttaaccgtcccaaacgttataatagcggcaagctcgaggagttcgtacagggtaacctcgaacgggagtgtatggaggagaagtgtagctttgaagaggcccgagaggtctttgagaacacagaacgcaccaccgagttctggaagcagtacgtggatggggaccagtgcgagtccaatccctgtctcaatggaggcagttgcaaggacgatataaactcatacgagtgctggtgccctttcggttttgagggcaagaattgtgaactggacgtcacctgtaacatcaagaatgggcgttgtgagcagttctgtaagaatagcgcagataacaaagtggtgtgtagttgcacagaagggtacagactagctgaaaatcagaaatcgtgtgaacctgcagtgccttttccttgcggccgggtatccgtttcccagaccagtaagttgactcgggcagaaactgtcttcccggacgtggattacgtgaacagtacagaggccgagactatccttgacaatatcacccagtcgacccagtcttttaacgatttcacgcgcgtggtcggcggcgaagatgccaagccaggccagttcccttggcaggtcgtgctgaacgggaaggtggacgccttttgtggagggtcgattgtcaacgaaaagtggattgtgactgcagctcattgtgtggagacaggtgtgaaaattacagtggtcgcaggcgaacacaatatcgaggagaccgagcacactgagcagaaacgaaacgttattcggattattccacatcataattataacgcggctatcaataaatacaaccatgacattgctcttctcgaacttgacgaacctctggtgctgaactcttacgtgactcccatttgcatcgcagacaaggaatatacaaacatattcctcaagttcggaagcgggtacgtctccggttggggcagggtatttcacaaggggaggtctgccctggtgttacaatacctccgagttccactggtcgatcgagccacatgcctactcagcaccaagtttacaatttacaataatatgttttgcgctggatttcacgagggtgggcgggattcttgtcaaggtgactcaggcggaccacacgtcacagaagtggaaggtacttctttcctgactggcatcatttcgtggggcgaggaatgcgccatgaaaggaaagtacggaatttatacaaaagtgagccgatacgttaactggataaaggaaaaaaccaagctcact

SEQ ID NO: 2586 - DNA, 1383 bp, Artificial Sequence
  derived and/or modified sequence
atgcagagggttaacatgattatggccgaatctcctggtctcataacaatttgcctcctcggatacctcctctcagcagagtgcaccgtctttctggaccacgaaaatgccaacaagatcctgaacagaccaaaaaggtacaacagcggtaaattggaagagtttgtgcagggaaatctggagagggagtgcatggaagaaaagtgttctttcgaggaggcacgggaggtctttgaaaacaccgagcgcacaactgagttctggaagcaatatgttgacggcgaccagtgtgaaagcaatccttgtctgaatggagggtcctgcaaggatgacattaactcttatgagtgctggtgtccatttgggtttgaggggaaaaattgcgagctcgatgtcacctgtaatatcaaaaacggcaggtgcgagcagttctgcaagaattctgcagataataaagtggtgtgctcctgcacggagggttaccggctcgcggaaaatcagaagagctgtgaaccggccgtgccattcccctgcggtagagttagcgtatcacaaaccagcaagctgaccagggccgagacagtcttcccagacgtggactacgtgaacagtactgaagctgagacgattctggataatattacccagagtacacagtccttcaatgacttcaccagagtggtaggcggcgaagatgcaaaaccaggacaattcccgtggcaggtcgtgctgaatggaaaagttgacgctttttgcgggggaagtatcgtcaatgagaagtggatcgtgacagctgcgcactgcgtggagactggggtaaagatcacagtggtcgctggcgagcataacattgaggaaaccgagcatactgagcagaagaggaacgttattcgaataatcccgcaccataactataacgccgccattaacaagtacaatcacgacatagcactgctggagctcgatgagcccctggttctgaatagttatgtgacacctatttgtatcgctgacaaagagtacacaaacatcttcttgaagtttggatctggttacgttagtgggtgggggcgagtgtttcataagggtagatctgcccttgtgctccaatatctgagggttccactggtggaccgggccacgtgcctgctgagcacaaaattcacgatctacaacaatatgttctgcgccgggttccacgagggtggccgggacagttgccagggtgatagcggagggccccatgtgacagaagtcgagggcaccagcttcctgacaggtattatctcttggggagaagaatgcgcgatgaagggcaagtacggtatatacactaaggtctccaggtatgttaattggattaaggagaaaactaagctgacg

SEQ ID NO: 2587 - DNA, 1383 bp, Artificial Sequence
  derived and/or modified sequence
atgcagagagtgaatatgatcatggccgaatcgccgggcctgattactatttgccttctgggatatctcctctcggcagagtgcactgtattcctggaccacgaaaacgccaacaagatcctcaatcgcccgaagcggtacaactcgggtaagctcgaagaatttgttcaaggtaatttggagagagaatgcatggaagagaagtgctcgtttgaagaggcgcgcgaggtgttcgagaatacggaacgtacgacggaattttggaaacagtacgtggatggagatcagtgcgagtcaaatccgtgccttaacggaggatcatgtaaagacgacatcaactcctacgagtgttggtgcccattcggatttgaaggcaagaactgcgagctcgacgtgacctgtaacatcaagaatggcagatgcgagcagttctgcaagaactcagccgataacaaggtggtgtgctcctgcactgagggatacaggctcgcggagaaccagaaaagctgtgagccagcagtccccttcccatgcggaagggtgtccgtctcacagacttcgaagctgacccgggccgaaaccgtgttccctgacgtggactacgtcaactctaccgaagctgaaactatcctggacaacatcactcagagtacgcagtctttcaacgactttaccagggtcgttggaggcgaggatgcgaagccgggccagttcccgtggcaggtcgtcctcaatggcaaagtggatgccttctgcggtggttcgatagtgaatgaaaaatggatcgtgaccgcggcgcattgcgtggaaaccggagtgaagatcactgtggtggcgggggaacacaacatcgaagagacggagcataccgagcagaagcgaaacgtgatccgcatcatcccacaccacaactacaacgctgcgatcaacaagtacaatcatgatatcgcactccttgaactggacgagccactggtcctcaactcgtacgtaactccgatctgtatcgcagacaaagaatacactaatatcttcctgaagtttggctcggggtacgttagcggctggggtcgtgtgttccacaagggccggtcagccctggtgctccagtacttgcgggtcccgctggtcgatcgggcaacctgtctgctgtccaccaaattcaccatttacaataacatgttctgcgccggctttcatgaagggggaagagactcgtgccagggtgactcaggtggccctcacgtcactgaagtcgaaggaactagctttttgaccggaatcatttcgtggggagaggagtgcgcaatgaaaggaaagtacgggatctacactaaggtgagccggtatgtgaattggattaaggagaaaactaaattgacc

SEQ ID NO: 2588 - DNA, 1383 bp, Artificial Sequence
  derived and/or modified sequence
atgcagcgggtgaacatgattatggccgaatccccggggctcatcactatttgcctcctgggatacctgttgtcagcagaatgcaccgtgtttctggatcatgaaaacgcaaataagattctgaacaggccaaaacggtacaactctggtaagctggaggaattcgttcaagggaacctggaacgggagtgtatggaagagaaatgctcgtttgaagaggcccgtgaggtgttcgagaacaccgaacgcaccaccgagttctggaaacaatatgtcgatggagatcagtgcgagtcgaatccgtgtctcaacggcggcagctgtaaggacgatatcaatagctacgagtgctggtgtccgttcggcttcgaggggaagaattgtgaactcgacgtcacctgcaatatcaagaacggacggtgcgaacagttctgcaagaactcggccgacaacaaggttgtgtgctcatgtactgagggatacaggttggcggaaaaccaaaagtcgtgtgaaccagctgtgccgttcccgtgcggacgcgtctcagtgagccagacctcgaagctcacgcgcgcggaaaccgtgttccctgacgtcgattatgtcaattccacggaagcagagactatcctggacaacatcacccagtcaactcagtcgtttaacgattttacgagggtggtgggaggcgaagatgctaagccaggtcaatttccctggcaagtcgtcttgaacggaaaagtagacgcattctgcggaggcagcatcgtgaatgaaaaatggatcgtgaccgccgcgcactgcgtggagactggagtgaaaatcactgtagttgcgggagaacataacatcgaagaaactgaacataccgaacaaaagcgtaacgtgattagaattatcccacaccacaattacaacgccgcgatcaacaagtataatcacgacatcgctctcctggagctcgacgaacccctggtgctcaactcgtacgtgaccccgatctgcatcgcagacaaggagtacacgaatatcttcttgaagttcggaagcggatacgtgtccgggtggggtcgcgtctttcacaagggacggtctgctctcgtgttgcagtacctgcgcgtgcctctggtggatagagccacttgtctcctgtccaccaaattcactatttacaacaatatgttctgcgcgggcttccacgaaggcggcagggactcctgtcagggagacagcggcggaccgcacgtgaccgaagtggaaggaacgtcctttctgactggcatcatctcatggggagaagaatgtgcgatgaagggaaagtacggaatctacacgaaggtgtcacggtatgtcaactggataaaggaaaagaccaagctcacg

SEQ ID NO: 2589 - DNA, 1383 bp, Artificial Sequence
  derived and/or modified sequence
atgcagcgagtgaacatgatcatggctgaatcaccgggccttatcactatatgtctcctgggataccttctgtcggcggaatgcactgtctttctggaccatgaaaatgccaacaaaattctgaatcgccctaagaggtacaactcaggaaaacttgaggaatttgtgcaaggaaatttggaacgggaatgtatggaggaaaagtgttcgttcgaggaagcaagagaggtgtttgagaataccgaaaggaccaccgaattttggaagcaatacgtcgatggagatcaatgtgaatcgaacccatgtcttaacggtggcagctgtaaagacgacataaactcctacgaatgttggtgcccattcggatttgaaggaaagaactgtgagcttgatgtcacctgcaacatcaaaaacggacgttgtgaacagttctgtaagaacagcgcagataacaaagtggtgtgttcctgtactgaaggttatcgtttggcagaaaaccaaaagtcatgtgaaccggcagtcccttttccttgtggccgcgtctcagtgagtcaaacgagcaagctgacccgcgccgaaaccgtgtttccggacgtcgattacgtcaattcgacggaagcagagacgattctggataacatcacccagagcacccagtcatttaacgattttacgcgcgtggtgggcggagaggatgctaagcctggacagttcccttggcaggtcgtcctgaatggcaaggtggacgcattttgtggcggatcgattgtcaacgaaaaatggatcgtgacggcagctcattgcgtcgaaaccggagtcaagatcactgttgtcgccggtgaacataacattgaagagactgagcacaccgaacagaagagaaatgtgattagaatcattcctcaccataactacaacgcagccattaacaaatacaatcacgacattgcacttcttgagctggatgagcccctcgtgctcaactcgtacgtgactccaatttgcatagcagataaggaatacaccaacatcttcctgaaatttggttccggatacgtgtcgggttggggacgggtgttccataaaggacgctccgccctggtcctgcagtaccttcgtgttccactggttgatagagcaacttgcctgctttcgacgaagttcactatatacaacaatatgttttgtgcagggtttcatgaaggaggcagagactcctgccaaggcgattcaggaggacctcatgttaccgaggtggagggtacttcattcctgaccggaatcatttcgtggggtgaggaatgcgcaatgaaaggaaagtacggaatttacactaaagtgtcccgctacgtgaattggattaaagagaaaaccaaacttact

SEQ ID NO: 2590 - DNA, 1383 bp, Artificial Sequence
  derived and/or modified sequence
atgcagcgagtgaatatgatcatggcggagtccccaggactgatcactatctgtctgttgggatacctgttatccgccgagtgtaccgtcttcctggaccacgagaacgccaataaaatactcaaccggccaaagcggtataattcggggaagctggaggagtttgtccagggcaatcttgagagagaatgtatggaggagaaatgctcgtttgaggaagctcgagaggttttcgagaatactgagcgtactactgaattttggaaacagtatgtcgatggcgatcagtgtgagtctaatccttgcttaaatggcggaagttgtaaagatgatatcaacagttatgaatgctggtgccccttcggctttgagggcaagaattgtgagctggacgtgacatgtaatataaaaaacgggcgatgcgaacagttttgcaaaaactctgctgacaacaaggttgtgtgttcctgtacagaggggtacagactggccgagaaccaaaagtcatgtgaacctgcggtgccatttccgtgcggacgggtctcggtttcacaaacaagtaagctgacaagagccgagaccgtgttcccagacgtcgattatgttaactccactgaagccgaaactatactggacaatatcactcagagcacacaaagcttcaatgactttactagggttgtgggaggagaggatgcaaaacctgggcagtttccctggcaggttgtgcttaatggtaaagtggacgctttctgcggtggaagtatcgtgaatgaaaaatggatcgtgacggctgcacactgtgtggagacgggtgtcaaaattaccgtggtggcgggagagcacaacatcgaggagacagagcataccgaacagaagaggaatgtcatccgtatcataccccaccacaactacaacgctgcgattaataaatacaaccatgacatcgctcttctcgagttggatgaacccctcgtgcttaatagctatgtcaccccaatatgcatcgccgacaaagagtacacgaacatcttcctaaagttcggttcagggtacgtctccggctgggggcgggtgttccataaaggtcggagtgccctagtgctgcagtatcttcgagttcctctggtcgatagagccacttgtttgctgtccacgaagtttactatttacaataacatgttttgcgctggtttccacgaggggggtagggactcctgccagggggacagcggcggacctcatgtgacagaggtggaaggcacgtcctttctgactggtataatatcttggggagaagaatgcgccatgaaggggaagtatggcatttacacgaaagtgtcccgctatgtgaactggattaaggaaaagactaagctgacc

SEQ ID NO: 2591 - DNA, 1383 bp, Artificial Sequence
  derived and/or modified sequence
atgcagcgggtcaacatgatcatggcagaaagtcctggacttatcacaatctgcctgctaggatacctactgtctgcagagtgcactgtgttcctggaccatgagaatgccaataaaatcttaaaccgcccaaaacggtacaattccggtaagcttgaggagttcgtccagggcaatctagaacgagaatgtatggaggagaagtgcagctttgaagaagctagagaggtatttgagaacaccgaacgtactacagagttctggaagcagtacgttgatggcgaccagtgtgaaagcaacccatgtctgaatggtggctcttgtaaagacgacattaactcctacgagtgttggtgtcctttcggtttcgagggcaaaaattgtgagctggacgtcacgtgcaatattaagaatggcagatgcgagcagttttgcaaaaacagtgccgacaacaaagtagtgtgtagctgcacagaagggtataggctggccgaaaaccagaaatcatgcgagccagctgtgccattcccatgcggtagagtttcggtgagtcagacctctaagttgacccgggctgagaccgtgttcccagatgtagactacgtgaactccacagaggcggaaaccatactcgataacattacccagagcacccagagcttcaacgacttcaccagagtagttggcggggaggacgcaaaacccggccagttcccctggcaggtcgtgctgaacgggaaggttgatgcattttgcgggggaagcattgtgaacgagaaatggatcgtcaccgccgcccactgcgtagaaacaggggtgaagattacggttgtggctggagagcataatattgaagagaccgagcacactgaacagaagaggaacgtgatcagaattatcccccaccataattacaacgctgcaataaacaagtataatcacgatattgcattgctcgagctggacgagcccttagtgttgaattcctatgtcactcctatttgtatagccgacaaggagtacacgaacatctttctgaaatttggctctggttacgtcagcggctggggccgggtgtttcacaaaggtcgaagcgcactagtattgcagtatctcagggtcccgctagtcgatcgggcaacatgcctcctcagcacgaagttcaccatctacaataatatgttttgtgcaggttttcatgaagggggcagggatagttgccaaggggactctggaggacctcatgtgaccgaggtggagggcacatcatttttaactggaatcatatcttggggcgaagaatgcgcaatgaaaggcaaatatggtatatataccaaagtctcgaggtacgtgaactggatcaaggagaagacaaagctcact

SEQ ID NO: 2592 - DNA, 1383 bp, Artificial Sequence
  derived and/or modified sequence
atgcagcgagtcaatatgatcatggccgagagccccggattgataaccatctgcctgctcggttacctgttgtcggctgagtgcacggtctttctggaccatgagaacgccaacaaaatcctgaatagacccaaacgttataactcgggaaagctcgaagaattcgtccaggggaacctcgaacgggagtgcatggaggagaagtgctcattcgaggaagcgagagaagtctttgaaaacaccgagcgcaccactgaattctggaagcagtacgtggatggggatcagtgcgaatcgaacccatgtttgaacggcgggagctgtaaagacgatatcaattcgtacgagtgctggtgtccgtttggatttgagggaaagaattgcgaactggatgtgacctgtaacatcaagaacggacgatgcgaacaattctgcaagaactctgcagacaataaggtcgtctgctcctgcactgagggatacagactggctgaaaatcaaaaaagctgtgaaccggctgtgccatttccgtgtgggcgcgtgtcagtgtcccaaacgtcaaaactgactagggccgaaaccgtctttccagacgtcgactacgtgaactccaccgaagctgaaaccattctggacaacatcactcagagcacgcagtcgttcaacgattttacccgggttgtgggcggggaggatgcaaagccaggacaattcccctggcaagtggtgctgaacggcaaggtggacgcattctgcggaggatccatcgtgaatgagaaatggatcgtgaccgccgctcactgtgtggaaaccggagtgaagattaccgtggtggccggggagcacaacatcgaggaaactgaacacaccgaacagaagagaaacgtgatccgtatcatccctcaccataactacaacgccgcaattaacaagtacaaccatgatatcgcgcttcttgagctggacgagcccctggtgctgaattcctatgttaccccgatctgcatcgccgataaagaatacactaatatcttcctgaaatttggctccggctacgtcagcggatgggggagagtttttcacaaaggaaggtcggcgcttgtgctgcagtacctgcgcgtcccgcttgtggaccgcgctacctgcctgctcagcacgaaattcaccatctacaacaatatgttttgcgccggatttcatgagggcggacgcgattcgtgtcagggagactccggcggtccgcacgtcactgaagtggagggaacctcattcctgaccggtatcatctcctggggggaagagtgtgctatgaagggcaagtacggcatctacactaaggtgtctcggtatgtgaattggatcaaggaaaagaccaagttgacg

SEQ ID NO: 2593 - DNA, 1383 bp, Artificial Sequence
  derived and/or modified sequence
atgcagcgagtgaacatgatcatggcagagagtccgggactgataactatttgcctgctcggttatctgctgtccgcggaatgtacggtgtttctggatcatgaaaacgccaacaaaattctcaacaggcctaagcgttataactcaggcaaattggaggagtttgtccaaggtaacctcgagagggagtgcatggaagagaaatgcagttttgaggaagctcgtgaggtttttgagaacaccgagaggaccactgaattttggaaacagtatgtcgatggggaccaatgtgagtcaaatccctgtctgaacggagggtcatgcaaagatgatatcaactcttacgagtgctggtgccccttcggatttgagggcaagaattgtgagctggacgtcacatgtaacattaaaaatggaaggtgtgagcagttctgtaagaacagtgccgacaacaaagtcgtgtgctcttgtactgaagggtaccgtctggctgaaaaccagaaatcttgcgaaccagccgtaccattcccctgcggtcgggtctcagttagccagacatcaaaattgacccgcgcagagactgtctttcccgatgtggattatgtgaacagcacggaggccgaaaccattctggacaacatcacgcagagcacccaaagttttaacgactttaccagggtcgtcggaggagaagacgcgaagccaggccagtttccatggcaggtagtgttaaacggaaaggtagacgccttttgcggcggctcgatcgtgaatgaaaaatggattgttactgcagctcactgtgttgagacaggcgtgaagattacagtcgttgccggcgagcacaatatcgaggaaaccgagcatacagagcaaaaacggaacgtgatccggatcatcccacatcacaactataacgccgcgataaacaagtacaatcatgacatcgctctgctggagctggacgaacctctggttctgaattcctatgtaaccccaatttgcatagccgataaggaatacactaacatctttctcaaatttggatctgggtacgtgtccggctggggcagggtctttcacaaaggaaggtccgctctggtgctgcagtatctcagggttccgctggtggaccgagctacgtgccttctgagtacgaaattcacaatatacaataatatgttttgtgctggctttcacgaagggggccgtgactcctgtcagggagattcaggtggacctcacgttacggaggtggaaggtacatctttcctcaccgggattatttcctggggcgaggagtgcgcaatgaagggcaagtatggtatttataccaaagtatccagatatgtgaattggatcaaggagaagactaagcttacc

SEQ ID NO: 2594 - DNA, 1383 bp, Artificial Sequence
  derived and/or modified sequence
atgcagagagtgaatatgataatggccgaaagccctggtctcatcacaatctgtcttctaggctatctcttatctgccgagtgcacagtctttctagatcatgagaatgcaaacaagatcctaaatcgacccaagaggtacaactcagggaagcttgaggagtttgtgcagggcaatctggagcgggagtgcatggaagagaaatgtagcttcgaggaagctagggaagtcttcgagaacacagagcgaacaaccgagttctggaagcaatacgtggatggcgatcagtgcgagtcaaatccatgtttgaatggggggtcctgtaaggacgacatcaattcctacgaatgctggtgtccatttggctttgaaggaaaaaattgcgaactggacgtcacttgtaacataaagaacggcaggtgtgaacaattttgcaagaattctgccgacaacaaagtcgtatgctcctgcactgaaggctataggctcgctgagaaccaaaagagctgcgagcccgcagtgccgttcccctgcggcagagtatccgtgagccagacttcgaaattgacacgggcagagaccgtctttccagatgtagattatgtaaactcaacagaagcagagaccatcttagataacataacacagagtacacagtcttttaatgacttcactcgcgttgttggaggcgaagacgctaagccaggacagtttccgtggcaagtagtactcaatggaaaggtggatgcattttgtggaggcagtatagtcaatgagaagtggatcgtcacagccgcccactgtgtcgaaactggcgtcaaaattactgttgtggccggcgaacacaatatcgaagagaccgaacatactgaacagaaacgcaatgtgatcagaatcattccacatcataattacaatgccgctatcaacaagtacaatcatgatatcgcgctcctggaactagacgaacccctggtgctcaacagttacgttacacctatctgcatcgccgacaaagagtatacaaatatctttctgaaatttggttcgggttacgtgtcggggtggggccgcgtgttccacaaaggtcgaagcgcgttggtcctacaatacttaagggtacccctggtcgaccgcgcaacttgtttgctctcaacaaagtttactatatataacaacatgttctgcgccggcttccatgaaggaggcagggattcttgccagggcgacagtggaggccctcacgtcacagaagtagaggggacgtcttttttgacaggtataatctcttggggagaggagtgcgcaatgaaaggaaagtatgggatttatactaaagtaagtcgctatgtcaattggatcaaggaaaaaaccaaactgacc

SEQ ID NO: 2595 - DNA, 1383 bp, Artificial Sequence
  derived and/or modified sequence
atgcaacgtgtcaacatgataatggcggaatctcctggccttatcacgatttgcctactcggatacctgctgagtgccgagtgcaccgtgtttctggatcacgaaaacgccaacaagatactgaatagaccaaagcggtacaactctggcaagcttgaggagttcgtacagggaaacctggagagggagtgcatggaagagaaatgtagtttcgaagaagcaagagaagtgtttgaaaacacagaaagaaccaccgagttctggaagcagtacgtcgatggcgatcagtgtgaatcgaacccttgtctcaacggtggatcttgtaaagacgacattaattcttacgaatgttggtgccccttcgggtttgaagggaaaaactgtgaactggatgttacatgcaacatcaagaacggccggtgcgagcagttctgcaagaactctgccgacaacaaggtggtctgcagctgcaccgagggctatagactggcagaaaaccagaaatcttgcgaaccggctgtgccatttccgtgtggaagggtgagcgtgagccagacctctaaactgacacgcgcggagaccgtgtttcctgatgttgactacgttaacagcaccgaagccgagacgattcttgataacattacacaatcaacacagtcattcaatgacttcacgagggtggtgggaggcgaggacgcgaaacccgggcagtttccgtggcaagtggtgctaaatggtaaagtggatgctttctgcggcggatctatcgtgaacgagaagtggatcgttacagcagctcattgcgtagaaacaggggtaaaaatcacagttgtcgcaggagaacacaacattgaggaaactgaacacacagagcagaaaaggaacgtaattaggattatcccacaccacaactacaacgcagcgatcaacaagtacaatcacgatatcgcccttctggagctggatgaacctttggtgctgaacagttacgtcaccccaatttgtatcgccgacaaagaatatacaaacatcttcctcaaattcggaagcggatatgtgagtggctggggaagggtgttccataaaggcaggagtgctctcgtgctgcagtatctgagggtccccctggtggatcgggctacatgcttgctcagcactaaattcaccatttacaacaatatgttctgcgcggggttccatgaaggcggacgagactcgtgtcaaggcgactccggtggaccacacgttaccgaggtggaggggacatcttttctgactgggattatttcctggggtgaagagtgtgctatgaaaggaaaatacggcatctacacgaaggtttcccgatatgtgaattggatcaaagagaaaaccaaattaaca

SEQ ID NO: 2596 - DNA, 1383 bp, Artificial Sequence
  derived and/or modified sequence
atgcaacgagttaacatgattatggccgaatccccgggattgatcaccatctgtctcctggggtacctgctgtcggcagaatgtaccgtgtttctggatcacgagaacgcaaacaagatcctgaaccgtccaaagaggtataacagcgggaagctggaagaattcgtgcaaggaaatctggagcgcgaatgcatggaagagaaatgttcattcgaagaggcaagggaggtgtttgagaatactgaacgtaccacggaattttggaagcaatacgttgacggtgaccaatgcgaatcgaacccatgtcttaatggtggaagctgcaaggatgacattaactcctacgaatgctggtgcccctttggttttgaaggaaaaaactgtgaactcgatgtgacctgcaacataaagaacggtaggtgcgagcagttttgtaagaattcagcggataacaaggtggtctgctcgtgtacggaaggatatcgcttggccgagaatcagaagtcctgtgaaccagcagtccctttcccatgtggtcgcgtgagcgtaagccagaccagcaagttgaccagggccgaaactgtctttccggatgtcgattacgtgaactcgactgaggctgaaactattctggataacatcacccagtccacgcaatcgtttaatgactttaccagagttgtgggaggagaagatgctaagccgggtcagttcccgtggcaggtggtccttaacgggaaggtcgatgcgttctgcggaggatccattgtcaatgaaaagtggatcgtcaccgctgcccattgcgtggaaaccggcgtgaagattactgtggtggcaggagagcataacatagaggaaaccgaacacactgagcagaagcgtaatgtgatcaggatcatacctcatcacaactacaatgccgcaattaacaagtacaaccatgacatcgccctcctcgagctggacgaacctcttgtcctcaattcttatgtgactcccatctgcatcgcagacaaagaatacactaacatattccttaagtttggctcggggtacgtgtcgggatggggacgcgtgtttcataagggacggtctgcactggtgctgcaatacctgagagtccctcttgtggaccgagctacttgtcttttgtcaactaagtttactatctacaacaatatgttttgcgcaggtttccacgaaggcgggcgtgatagctgtcaaggggattctggaggacctcatgtgactgaagtcgagggaacttctttccttactggcatcatttcgtggggcgaggagtgtgccatgaagggtaagtacggtatttacactaaagtgtcccgatacgtcaattggattaaagaaaaaacgaaacttacc

SEQ ID NO: 2597 - DNA, 1383 bp, Artificial Sequence
  derived and/or modified sequence
atgcagagggtcaatatgataatggcggagtcacccggattgattacaatctgtttactgggctacttgctgtcggccgaatgtactgtgtttttggaccacgagaacgcaaacaaaatcctgaacaggcctaaacggtacaattccggtaagctggaagaatttgtccaggggaacttagagagggagtgtatggaggagaagtgctcattcgaggaggcacgcgaggtcttcgaaaacaccgagaggaccacagagttttggaaacagtatgtggacggggaccagtgtgaatccaacccttgccttaacggcggtagttgtaaggatgatattaacagctacgagtgttggtgccctttcggtttcgagggcaaaaattgtgagctagatgtcacttgcaacatcaaaaacggtcgatgcgaacagttctgcaaaaattctgccgataacaaggtggtgtgttcttgcacagaagggtacagactcgcggagaaccaaaaaagttgtgaaccagccgttccttttccctgcgggcgcgtgtccgtttcacagaccagtaaattaacccgcgcagaaacggtgttccccgacgtggattatgtaaactctacagaagccgaaacgatcctggacaatataactcagtcaacccaaagctttaacgattttacacgggtggtgggcggagaagacgctaaaccaggtcagtttccctggcaggtggtcttgaatgggaaagtggacgccttctgtgggggatccatcgtgaatgagaagtggattgtcacggccgctcattgtgtggagacaggcgtgaagatcactgtcgtcgctggtgagcataacatcgaggaaacggaacacacggagcagaagagaaatgtaatccgcataatcccacatcataattacaacgccgctatcaacaaatataaccatgacattgccctgctggagctggatgagcccctcgtgctgaacagctacgtcacccctatctgcattgcggataaagagtataccaacatatttctcaaatttgggagcggttatgtctccggatgggggagagtgtttcataagggacgttccgccctagtactgcaatacttgcgcgttcccctggtggatcgagctacctgtttactgagtaccaagttcacgatttacaataatatgttctgcgccggattccacgaggggggaagagacagttgtcagggtgactctggtgggccccatgttacagaggttgaggggacaagcttcttgactggaatcatctcctggggcgaggaatgcgccatgaaaggcaaatacggtatctataccaaggtaagcaggtatgtaaattggattaaggagaagaccaaactgaca

SEQ ID NO: 2598 - DNA, 1383 bp, Artificial Sequence
  derived and/or modified sequence
atgcagagagtgaacatgatcatggcagaatcaccaggactcataacgatatgtttgcttggatacctgctctcggcggaatgcactgtctttcttgatcacgagaacgcaaataagatccttaaccgccctaaacggtacaactcaggcaagctggaagaattcgttcaaggcaacttggaacgtgagtgtatggaagagaagtgctcgttcgaagaggcacgcgaggtgtttgaaaacaccgagagaactacggaattctggaagcaatacgtcgacggtgatcaatgtgaaagtaacccctgcttgaacgggggatcatgcaaggatgacattaactcttacgaatgctggtgtccattcggctttgaaggaaagaactgtgagctggatgtgacttgtaatatcaagaacggtcggtgcgagcagttttgcaagaattctgcagacaacaaagtcgtctgttcatgtaccgaaggctaccggctggcagagaatcagaagtcgtgtgaacctgcagtgcccttcccatgcggccgcgtcagcgtgtcccagacttcgaaacttacccgggccgagacggtgtttcctgatgtggactatgtgaacagcaccgaagcagaaactattctcgacaatatcacgcaatccacccaatccttcaacgatttcactagagtggtgggtggtgaagatgccaaaccaggccagtttccttggcaagtggtgctgaacggaaaggtcgacgcattttgcggtggaagtattgtgaacgaaaagtggattgttaccgctgctcattgtgtggaaactggggtcaagattaccgtggtcgccggtgagcacaacattgaagaaaccgaacacactgagcaaaagaggaatgtgattcggatcattccacatcacaattacaacgccgccattaacaaatacaaccacgacatcgcgctgcttgaattggatgagcccctcgtccttaactcctacgtgactcctatctgtatcgcagacaaggaatacaccaatatcttcctcaagtttggttcaggatatgtcagcggatggggccgagtgtttcataagggtagatccgcactggtgctgcagtacctgagggtgccgcttgtggatagggcaacttgtctgctctcgactaagttcaccatttacaacaatatgttttgtgcgggtttccatgagggcggaagagattcgtgtcagggggattctggtggacctcatgtgaccgaggtggaaggaacctcctttttgactggtataatctcttggggagaagagtgtgccatgaagggaaaatacggaatctacacgaaggtcagtcggtacgtcaattggattaaagagaaaaccaaactcacg

SEQ ID NO: 2599 - DNA, 1383 bp, Artificial Sequence
  derived and/or modified sequence
atgcagagggttaacatgataatggccgagagtccaggcttgattaccatctgtcttctcggttatctcctgtccgcggagtgtactgtctttctcgatcatgagaatgccaataagatcctgaatagacctaagagatataactccggaaagttggaagagttcgtgcagggcaacctggagagagaatgcatggaggagaaatgctcctttgaagaggctagagaggtcttcgaaaataccgagagaaccacagaattctggaagcagtatgtcgatggcgaccagtgtgagtcaaacccgtgtcttaacggcgggtcatgcaaagatgatatcaattcctacgaatgttggtgtcctttcggcttcgaggggaaaaattgcgagctggacgtgacatgcaacattaaaaacgggagatgtgagcagttctgcaaaaactccgcagataataaagtggtgtgtagctgtactgagggatacagactagcagaaaatcaaaagagctgcgagcctgccgtgccctttccgtgcggaagagtgagcgtctctcagacctctaagctgaccagagccgaaaccgtgtttccggacgtagactacgtgaacagcacggaggccgagaccatccttgacaatatcacacagtccactcaatcattcaatgactttacgcgggtggttggcggagaggatgcaaagccagggcagttcccttggcaggtggttctaaatggcaaggtggatgctttttgtggaggtagcatagtgaatgagaagtggattgtgaccgcagcacactgtgtggagactggcgtgaagataaccgtggtggcgggggaacataatattgaggaaacggagcacactgaacagaagaggaatgtgattaggataattccacaccataactacaatgccgccattaacaagtataatcatgatatcgcccttctcgagctggatgagcctctggtgctaaattcatacgtcacacccatctgtattgcggacaaggagtacaccaacatctttctcaagtttggctcgggctatgttagtggatggggccgcgtgtttcacaagggtagaagtgctctggttctccagtatctacgggtcccgttggtggaccgggccacgtgcctgcttagtacaaagttcactatctacaataacatgttctgcgctggtttccacgagggaggaagggactcatgtcagggggacagcggtggccctcacgtcactgaggttgagggcaccagtttccttaccggcatcattagctggggtgaggagtgcgctatgaagggaaagtacggcatatacacaaaggtatcccggtacgttaactggatcaaagaaaaaacaaaattaaca

SEQ ID NO: 2600 - DNA, 1383 bp, Artificial Sequence
  derived and/or modified sequence
atgcagagggtgaacatgataatggccgaaagccctggactgatcactatctgcctgctcggatacctgttgtctgcagaatgcactgtgtttctggaccacgagaacgcgaacaagatcctgaaccggccaaaacgctacaattcaggcaagctggaagagttcgtgcaaggtaaccttgagcgggaatgcatggaagaaaaatgctcgttcgaagaagcgagggaggtgtttgagaatactgaacgcactaccgagttttggaaacagtatgtcgacggggaccagtgcgaatccaacccgtgcctgaatggcggatcgtgtaaagacgacattaactcctatgagtgttggtgcccatttggatttgaagggaaaaactgtgaattggatgtcacctgtaacatcaagaatggaagatgtgagcagttctgcaagaactcggcagacaacaaagtggtgtgctcctgcactgagggatatagactcgccgagaatcaaaaatcctgtgagcccgcggtcccgttcccctgcgggcgcgtgtccgtctcccagacttcaaagctgaccagagccgaaacggttttcccagacgtcgactacgtgaactccactgaggctgaaactatcttggataacatcacccaaagcacccagtccttcaacgacttcacgagagtggtcggtggagaggacgcgaagccgggccagtttccatggcaagtggtcctgaatggtaaggtcgacgccttctgcgggggatctatcgtgaatgaaaagtggattgtcaccgctgctcactgcgtcgagacgggagtcaaaatcacggtggttgcgggagagcacaatattgaagagactgagcacaccgaacaaaagcgcaacgtcattcggattattccgcaccataactacaacgctgccatcaataagtacaaccacgacattgccctgctggagctcgacgagccactggtgctgaattcgtatgtaaccccgatctgcatcgccgataaggaatacaccaatatcttcctcaagtttggaagcggctacgtgagcgggtggggaagggttttccacaagggacgctcagccctggtgttgcagtacctgagagtgccactggtggacagggctacctgcctgctgtcgactaagttcactatctacaacaacatgttctgcgccgggttccatgaaggaggaagagattcgtgccaaggtgacagcggaggaccacatgtgaccgaggtggaaggcacctcgttcctgacggggatcatctcttggggagaagaatgtgcgatgaaggggaaatacggcatttacaccaaagtgtcccgctacgtgaattggatcaaggaaaagactaagctgact

SEQ ID NO: 2601 - DNA, 1383 bp, Artificial Sequence
  derived and/or modified sequence
atgcagcgggtgaacatgatcatggctgagtccccaggactgattacaatttgtcttctggggtacctcttgtccgctgaatgcacagtgtttctagaccacgaaaatgctaacaaaatcttgaatcgcccgaaacgctacaacagtggaaagctcgaagagttcgttcaagggaatctggagagggagtgcatggaggagaagtgtagtttcgaggaggctcgggaagttttcgagaacacagagagaacgaccgagttctggaagcagtacgtcgatggcgaccagtgtgagagcaacccctgtctcaacggaggctcttgcaaggatgacattaatagttacgaatgctggtgtcctttcggtttcgagggaaagaactgcgagcttgacgttacttgtaatatcaagaacgggcggtgcgaacagttctgcaagaatagtgccgataacaaggtggtgtgcagttgtaccgaaggctacaggctggcagaaaatcaaaagagctgtgagcctgctgtaccttttccatgtggccgcgtgagtgtttcccagacaagtaaactgacacgggctgaaacagtcttccctgacgttgactacgtgaactccacagaagcggaaaccattctggataacataacacagtcgactcagagcttcaatgattttacacgtgtggtgggtggcgaggatgccaaacctggacagttcccttggcaggttgtgctgaatggtaaggtggacgccttctgcggcgggagtatagtgaacgagaagtggatcgttaccgccgctcactgtgtggaaacgggagtaaaaatcacggtggtggccggggaacataatatcgaggagactgagcacaccgaacagaagcggaacgttatccggattattccacaccacaattacaacgctgctattaataagtacaatcacgatatcgctttactcgaattagacgaacccttagttctgaacagttacgtgactcccatatgcatcgctgacaaggagtacaccaatatcttcctaaagttcggatctggctacgtgagtggttggggacgggtgttccataaaggaaggtctgccctggtgctgcagtacctgagggttcctctggtcgatcgggccacgtgcttgctgtccacgaagtttactatctacaataatatgttctgtgcaggctttcacgaaggaggccgagactcctgtcaaggtgactccggcggccctcacgtcacagaagtagaaggcaccagtttcttaaccggtatcatcagctggggggaggaatgtgccatgaaaggaaagtacggtatctacacaaaggtatcccgttacgtgaattggatcaaggagaagactaagcttact

SEQ ID NO: 2602 - DNA, 1383 bp, Artificial Sequence
  derived and/or modified sequence
atgcagcgagtgaacatgattatggctgaatctcccggcttaattacgatctgtttgctggggtatctactctcagcagagtgtacagtgtttctcgaccatgagaatgctaataaaatccttaataggcctaagaggtacaacagcggtaaactagaggagtttgttcagggtaacctcgagagggagtgtatggaagaaaagtgttctttcgaggaggcgagggaagttttcgaaaataccgaacgaacgaccgagttctggaaacaatacgttgacggagatcagtgtgaaagtaatccctgtcttaacggaggctcatgcaaagacgatataaattcatatgagtgctggtgtccatttggcttcgagggtaagaactgtgaattggacgtgacatgtaatatcaagaacggcagatgcgagcagttttgcaagaacagcgcagacaataaagttgtatgttcctgtaccgaggggtataggttggcagagaatcagaagtcctgtgagccagccgttcctttcccttgtggcagagtatccgtgtcacaaacttcaaagcttactagggcagagactgtattcccagacgtcgattacgttaattccacggaagcagaaacaatactggacaatatcacccaaagcacacagtcttttaacgactttactcgagttgttggcggtgaagacgctaaacccggccaatttccttggcaggtggtcttgaacgggaaggtcgacgccttttgtggcggatctattgttaatgagaagtggattgtgactgccgcccactgtgtggaaactggagtaaaaatcacagttgttgcgggagagcataacatagaggaaactgagcatacagagcaaaagcggaacgttatcaggataatacctcaccacaattacaatgcagcgatcaacaagtataatcatgatattgctctccttgagctggacgagcctttggtgcttaattcttatgtcacaccaatttgcatagccgataaggagtacacaaacatttttctcaagtttgggagcgggtatgtgagtggttgggggagagttttccacaaaggtagatctgctctggtccttcaatatttgagggtaccactcgttgacagagctacctgcctcctttcaaccaagttcactatctataacaacatgttttgtgctgggttccatgagggaggacgagatagttgccagggagatagcggaggtccacatgtgactgaggtggaggggacatcttttctgacaggtatcatctcttggggtgaagaatgcgcaatgaagggaaagtacggtatttatacgaaggttagccgatatgtcaattggataaaggagaaaacgaagcttacc

SEQ ID NO: 2603 - DNA, 1383 bp, Artificial Sequence
  derived and/or modified sequence
atgcagcgcgttaacatgattatggcggaatcgccaggcctgattaccatttgtctcctgggttaccttctttccgcagagtgtactgtgttcctggatcacgagaacgctaacaaaatcctgaaccggcctaaaagatacaactcggggaaacttgaagaatttgtgcagggcaaccttgagcgagaatgtatggaggaaaagtgcagcttcgaagaggcaagagaagtgttcgagaataccgaaagaactactgaattttggaaacaatacgtggatggtgatcaatgcgagtcgaacccctgtctcaacggagggtcgtgtaaggatgatatcaattcctacgaatgctggtgtccttttggctttgaaggaaaaaactgcgaactggacgtcacttgcaacattaagaatggacgttgtgaacagttctgtaagaatagcgcggacaataaagtggtttgttcctgtactgaaggataccgccttgcggagaatcaaaagagctgtgagccagcagtcccatttccttgcgggcgggtgtcagtctctcaaacgagcaagctgactcgcgccgaaaccgtctttccagatgtggattacgtgaactccaccgaggcggaaaccattttggataacataactcaatcaactcaatcctttaatgactttactcgcgtggtgggaggggaggatgcaaagcccggacaattcccttggcaggtcgtgcttaatggaaaagtggatgctttttgtggtgggtctattgtcaacgaaaagtggatcgtgaccgcagcacactgtgtcgagactggcgtgaagattaccgtcgtggcaggtgaacacaatattgaagaaaccgaacataccgaacagaagaggaacgtgatcagaatcatcccccaccataactacaatgcagcgattaacaagtacaatcatgacattgcacttctggaacttgatgagcccctcgtccttaacagctacgtgactccaatctgcatagctgacaaggagtacaccaacatttttcttaagttcgggtcaggatacgtcagcgggtggggaagagtgttccataaggggcggtcagcacttgtcctgcaatacttgcgggtgccactggtggatcgcgctacgtgtctcctttcgaccaaattcacgatttacaacaacatgttttgtgcgggctttcatgaaggaggtagagactcgtgtcagggtgacagcggagggccacacgtgactgaagtggaagggacctcgtttctgaccggaattatctcatggggtgaggaatgtgccatgaagggaaagtacggtatttacaccaaggtgtcaaggtacgtgaactggatcaaagagaaaactaagctgacc

SEQ ID NO: 2604 - DNA, 1383 bp, Artificial Sequence
  derived and/or modified sequence
atgcagcgggtcaacatgatcatggctgaatcacccggcttaattacaatctgcctcttaggctatctcctctccgctgaatgcaccgtcttcctggatcacgagaatgcaaacaagatcttgaaccgcccgaagagatataactcaggaaaactggaggagtttgtgcaagggaacctggagcgagagtgcatggaggaaaagtgcagctttgaggaagccagagaggtgtttgagaataccgaacgtaccaccgagttttggaagcaatatgtggatggcgaccaatgcgagtccaacccctgcttgaatggcggttcctgcaaggacgatattaattcttacgagtgttggtgtcccttcgggttcgaggggaagaattgtgaattggatgtcacttgtaatatcaagaacggtcggtgtgaacagttctgcaaaaatagcgccgacaataaggtggtgtgctcctgtacagaaggatatcggctggccgaaaaccagaaaagctgcgaaccagcggtgccgttcccatgcggcagagtgagcgttagtcagacgagcaagctgaccagggccgagacggtattcccagacgttgattatgtgaactccactgaggccgagacaatactcgacaatattacccagtctacgcagtccttcaacgattttacgagagtcgtggggggtgaagatgcgaagccagggcagtttccatggcaggttgtcttgaacggaaaagtggacgccttctgcggtggcagcattgtcaacgaaaagtggatagtgaccgcagcacactgcgtagagacgggagtgaaaatcaccgtcgtggcgggtgagcacaatatagaagaaaccgaacatacagaacagaagcgcaatgtgatcaggattattccgcaccataattataatgccgccatcaacaaatacaaccatgacattgccctcttggagctggacgagccactggttctgaacagttatgtgacccccatatgcattgccgataaggaatatacaaacatttttctgaagtttgggtccggctacgtttccggctgggggcgcgtgtttcacaaggggcgatctgctctggttctgcagtatctgcgagtaccactcgtggacagagccacatgtcttctgagtaccaagtttacaatctataacaacatgttctgtgctgggttccatgaaggcggtcgggactcatgtcaaggtgacagtggcggtccacacgtgacagaggtggaaggtacctctttcctgactgggattatttcctggggtgaagagtgtgccatgaagggtaaatacgggatatacacaaaggtctcccggtatgtgaattggattaaagagaagaccaaactcacc

SEQ ID NO: 2605 - DNA, 1383 bp, Artificial Sequence
  derived and/or modified sequence
atgcagcgtgtgaatatgattatggcggagagtcccggtctgatcaccatctgtctgctgggctatttgctgagcgcagagtgtactgtcttccttgaccacgaaaacgctaacaaaattttaaaccggccaaaaaggtacaatagcggtaaactggaggagtttgttcaaggcaatctggagcgagagtgtatggaagaaaaatgctccttcgaggaagcaagggaagtgttcgaaaatactgagcgcaccacggagttttggaaacagtatgtagacggagatcaatgtgagagcaacccgtgtctgaacggtggcagctgcaaggacgacatcaatagctacgagtgctggtgcccgttcggtttcgaaggtaagaattgtgagttggacgtcacctgtaacattaaaaacggtaggtgtgaacagttctgtaaaaactctgcggataacaaagtggtgtgttcctgcactgagggttaccgcctggcagagaatcagaaaagctgcgaacctgctgttccgttcccgtgcggccgtgtaagcgtgtcgcaaaccagcaaacttactcgggccgagacagtgtttcctgatgtggactacgtgaacagcaccgaagccgagaccattttggacaacatcacgcaatctacccagagcttcaacgactttaccagggttgttggaggagaagacgctaaaccgggccaattcccgtggcaggtcgttctgaacggcaaggtggatgccttctgcggcggcagcatcgtgaacgagaaatggatcgttaccgcagctcactgcgtggaaaccggtgtgaagatcactgtagttgctggtgaacataacattgaggagacagagcacactgaacagaaacgcaacgtcatacgcattatcccgcaccacaactacaacgcagccattaacaagtataaccacgacatcgctctgctggaactcgatgaacccctggtgcttaactcttacgtaacccccatctgtatcgctgataaggaatatacaaatatattcttgaagttcggttccgggtatgtgtcgggttggggccgcgtgttccacaaggggcgttctgcactggttctgcagtatctgagggtgccactcgttgaccgcgctacctgtctgctgtctaccaaattcactatttacaataatatgttctgtgcaggtttccacgaaggcggacgagattcgtgtcagggtgacagcggcggccctcacgtgaccgaggtggaaggcaccagcttcctgacgggtattatttcatggggtgaggaatgtgctatgaagggtaaatacggaatttataccaaagtgagcaggtacgttaactggatcaaagaaaagactaaattaacc

SEQ ID NO: 2606 - DNA, 1383 bp, Artificial Sequence
  derived and/or modified sequence
atgcaacgcgttaacatgatcatggctgagtcgcccggtttgatcactatttgtcttttgggatacctgctgtccgccgaatgcactgtgttcctggatcacgagaacgcaaacaagatcctgaataggccaaagaggtacaattccggaaaactcgaggagtttgtgcaaggaaatttggagcgcgaatgcatggaggaaaaatgctcattcgaagaagcgagagaggtgttcgagaacactgagaggaccacggaattctggaagcagtacgtggacggcgatcagtgcgagagcaacccgtgccttaacggaggatcgtgcaaggatgatatcaacagctatgaatgttggtgcccgttcggattcgagggaaagaactgcgaactggacgtgacctgcaacataaagaacgggcggtgtgaacaattctgcaagaattccgctgacaacaaggtggtgtgctcctgcaccgaaggataccggctggcggaaaatcaaaagtcgtgcgagccggcagttcctttcccatgcggccgcgtgtcagtctcgcaaacctcaaaactgactcgcgccgaaaccgtgtttccggacgtggactacgtgaatagcaccgaagccgaaactatcctggacaatatcacccagtccactcagtcctttaacgactttactcgcgtggtgggaggtgaggacgccaaacccgggcagttcccttggcaggtggtgttgaatggaaaagttgacgcattctgtggcggaagcatcgtcaacgaaaagtggatcgtgaccgcagcgcattgcgtagagacgggagtgaagatcaccgtggtcgccggggaacacaacatcgaagagactgagcacacggagcagaaaagaaacgtgattcgcattatccctcatcacaactacaacgccgccattaacaagtacaatcacgacatagccctcctcgaacttgacgaacctctggtcctgaacagctacgtgactccaatttgcattgccgacaaggagtacactaacattttcctgaagtttggtagtggctacgtgtcgggctggggtcgggtgtttcataagggcaggagcgccctggtgctgcagtaccttcgcgtgccccttgtggatagagcaacctgtctcctctcgaccaagtttaccatctacaataacatgttctgcgctggatttcacgaaggaggacgcgactcttgtcagggagactcgggaggcccacatgttactgaagtggaaggcacctcctttctgaccgggatcatcagctggggtgaagagtgtgcgatgaaggggaagtatggcatatacaccaaagtgtcccggtacgtcaactggatcaaagaaaagaccaagctgacc

SEQ ID NO: 2607 - DNA, 1383 bp, Artificial Sequence
  derived and/or modified sequence
atgcagagagtcaacatgattatggcagagtcgcctggcctgatcaccatttgtctgctgggttacttgctgtccgcggaatgtacggttttcctggatcatgaaaacgccaacaagatcctgaaccgccctaaacgatacaactccggaaaactggaagaattcgttcagggcaacctggagagagaatgtatggaagaaaagtgtagcttcgaggaagcgagagaagtgtttgaaaatactgaaagaactactgagttttggaagcaatacgtcgatggcgaccagtgtgaatcgaatccatgtcttaatggcggaagctgtaaggacgacataaactcttacgagtgttggtgtccatttgggtttgaaggtaagaactgtgagctggacgtgacctgtaacattaagaacggtaggtgtgaacaattttgcaagaattccgcagataacaaagtcgtgtgttcgtgcaccgagggatacagacttgctgaaaaccagaagtcgtgtgagccggctgtgccttttccgtgtgggagagtctcggtgagccaaacctcaaagctgactcgtgccgaaacggtgtttcccgacgtggactacgtgaactcgactgaagcggagactattcttgataacatcacccaatcgactcaatcattcaacgactttacccgcgtggtggggggagaggacgcaaagccaggacaatttccttggcaggtggtccttaacggcaaggtggatgcgttttgtggaggatcgattgtgaacgagaagtggattgtcaccgcggcgcactgcgttgaaaccggcgtgaagattactgtagtggcaggtgagcataacatcgaagaaaccgaacatactgaacaaaaaagaaacgtgatccgaattatcccacatcacaattacaatgccgcaatcaataagtataatcacgatattgcacttcttgaactggatgaaccccttgtgctgaattcctacgtgaccccgatctgtatagccgataaagaatataccaacatttttctcaagtttggttctggatacgtctccggctggggtcgtgtgtttcataaaggtcggtcagcactggtcctgcagtacctccgggtccccctggtggacagagctacttgtctcctgtcgacgaagtttactatatacaacaatatgttctgcgcaggctttcatgagggaggacgcgattcatgtcagggcgatagcggagggccacatgtcactgaggtcgagggtacgtcgtttcttaccgggattatctcttggggagaggaatgtgctatgaagggcaagtatgggatctacaccaaggtgagcagatacgttaattggattaaggaaaaaactaagctgacc

SEQ ID NO: 2608 - DNA, 1383 bp, Artificial Sequence
  derived and/or modified sequence
atgcaacgcgtcaacatgatcatggcagaatccccaggacttattactatttgcctcctggggtacctgctctccgcagaatgtaccgtgtttctggatcatgaaaatgcaaacaaaattcttaacagaccaaagagatacaactcgggaaaactcgaggagtttgtgcaaggcaaccttgagagggagtgtatggaggaaaagtgttcgtttgaggaggcccgcgaagtattcgaaaatacggaacgcactactgaattctggaaacagtacgtcgatggagatcagtgtgagtcgaacccttgccttaacggaggttcatgtaaggatgatatcaacagctacgaatgttggtgtccatttggcttcgagggcaagaattgcgaactggatgtgacttgcaacatcaagaacggaagatgtgaacaattctgtaagaactccgcggacaataaagtggtgtgctcgtgtaccgaaggttaccggctggcagaaaaccaaaagtcctgcgagccggcagtgccatttccgtgtggtagagtctcggtgagccagacctcaaagctcactcgcgcagagactgtgtttccggacgtcgattacgtgaactccaccgaagcagaaactattctggataacatcacccagtcgacccagagctttaacgatttcactcgcgtcgtgggaggggaagatgcgaagcccgggcagtttccttggcaggtggtgctgaatggtaaggtcgatgcattctgtggaggctccattgtgaacgaaaagtggatagtgactgcggcacactgtgtggaaactggagtgaagatcactgtggtggccggcgagcacaacattgaagagacggaacacaccgaacagaaacggaacgtgattaggatcattcctcaccataactacaacgctgcaattaacaaatacaatcatgatattgcactgcttgaactcgatgaacctttggtgctgaattcgtatgtgactcccatttgcattgccgacaaggagtacactaacatatttctgaagttcggatcaggatacgtctccgggtgggggagagtgttccataagggtcgatcagcactggtgcttcagtacctgagggtccctttggtggatagagccacctgtctgctttcaaccaaattcactatttacaacaatatgttttgtgctggctttcatgaaggaggtcgggattcgtgtcagggggattcagggggaccccacgtcaccgaagtcgagggtacttccttcttgaccggcataatctcctggggagaagagtgtgccatgaagggcaagtacggtatttacaccaaggtgtccagatacgtgaactggattaaggagaaaactaagttgacc

SEQ ID NO: 2609 - DNA, 1383 bp, Artificial Sequence
  derived and/or modified sequence
atgcagcgggtaaacatgatcatggctgaaagtcccggactgataacaatatgcctgcttggatatttactaagtgctgagtgtactgtgttcctggatcacgaaaacgcaaacaaaatcctaaaccgacccaaacggtataattctggaaaactagaagaatttgttcagggaaatctcgagagggaatgtatggaagaaaagtgctccttcgaagaagcacgagaggtgttcgaaaatactgagcgaacgacagaattctggaaacaatatgtggatggagaccaatgcgagtccaacccctgtctcaacgggggaagttgtaaagatgacataaattcatatgaatgctggtgtccatttggattcgaagggaaaaattgtgaattagatgtgacatgtaacatcaagaatggaagatgcgaacagttttgtaaaaacagtgccgacaacaaagttgtttgctcatgtactgaagggtatcgactggccgagaatcagaaaagttgcgaaccagcagtgccctttccttgtgggagggtgagtgtatctcagacaagtaaacttactagggcagaaactgtcttccccgacgtcgactatgttaactcaacagaagccgagacgatcctagataacattacacagtctacacaatccttcaacgatttcactcgggtcgtggggggagaagatgccaaacccgggcagttcccctggcaggtagtgcttaatgggaaagtggatgcgttctgcggaggatcaatcgtgaacgagaagtggatagtgactgctgctcactgtgttgaaacaggagttaagatcacagtggtggcaggagaacacaacatcgaagaaactgaacatacagaacagaaacgaaatgtcatcagaataatcccacaccataattacaacgcggccataaacaaatacaaccacgacatcgcactcctagaattggacgaacccttggtgctgaattcatacgtcacacctatctgcatagcggataaagaatatacaaatatcttcctcaagttcggatctgggtatgttagtgggtgggggagggttttccacaaagggagatctgccctggtgcttcagtacctcagggtgccactggtggatagggccacatgtctcttatctacaaaatttacaatctataataatatgttctgtgccggattccacgaaggaggaagagacagttgtcagggagattctggagggccacatgtgacagaggtggaagggacatccttccttacggggataatatcttggggggaagaatgtgctatgaagggaaagtatgggatatatactaaagtctctcggtatgtgaattggatcaaagaaaaaacaaaactcaca

SEQ ID NO: 2610 - DNA, 1383 bp, Artificial Sequence
  derived and/or modified sequence
atgcagcgagtgaacatgatcatggccgagtccccgggcttaattactatctgcctcctgggatatctgctctctgccgaatgtacagtctttctggatcacgagaatgctaacaagatcctgaatagaccaaaaagatataatagtgggaagctcgaagagtttgtgcagggcaacctggagcgggagtgtatggaggaaaaatgcagctttgaagaagcacgggaagtttttgaaaatacagagcggactactgagttctggaagcagtatgtggacggcgaccaatgtgagtccaacccctgtcttaatggagggtcctgtaaagatgacataaactcatatgaatgctggtgtccattcggtttcgagggtaaaaactgcgaattggacgtgacctgtaacattaagaacggtaggtgtgagcagttttgcaagaatagcgccgacaataaggtggtgtgcagttgcactgaaggctatcggctcgccgagaaccagaaaagttgtgaacccgctgtaccctttccctgcggccgcgtgtccgtctcgcagacatccaagctcacaagggccgaaactgtgttccccgacgtggactatgtgaattctaccgaagccgaaacaatcctggataacattactcaatctacccaatcctttaacgatttcaccagggtggtcgggggcgaggacgccaaaccgggtcagtttccatggcaggtggttctgaatggtaaagtcgacgccttctgcggcggcagtattgtgaatgagaaatggattgtaaccgccgcccactgtgtcgagacgggggtgaagataacagtggtcgcaggcgaacacaatattgaggaaacagaacataccgagcagaaacgtaatgtaatccgcatcattcctcaccataactataacgcagccattaataagtataatcatgacatagctttactagaactagatgaacctctggtgttgaatagctacgtgactcccatctgcatcgcagataaagaatacactaacatcttcctcaagttcgggtctggttacgtcagcggctgggggcgggtgttccacaagggcagatcagccctggtgctccaataccttagagtgccactggtggaccgtgctacctgtttactcagtaccaaattcactatttataataatatgttttgtgccgggttccatgaaggtggccgggattcgtgtcagggcgactccggtggaccccacgtgacagaggtcgaaggtaccagttttctgaccggcattatctcctggggcgaagaatgtgccatgaaaggcaagtatggaatatatacaaaggtcagccgctacgtgaactggatcaaggagaagaccaaattgacc

SEQ ID NO: 2611 - DNA, 1383 bp, Artificial Sequence
  derived and/or modified sequence
atgcagcgcgtaaatatgatcatggctgagagcccaggtttgattactatctgtctgttgggttatctgttgtccgcggagtgtaccgtctttctggatcacgaaaacgccaataaaattttgaaccgcccgaagaggtacaacagtggaaagctcgaggaattcgtgcagggaaacctggagagggagtgcatggaggagaaatgctctttcgaggaagctagagaggtgttcgagaacacggagagaacaactgagttctggaagcagtacgtcgacggtgaccagtgtgaaagtaacccgtgtctgaacggtggaagctgtaaggatgatatcaacagttacgagtgctggtgccccttcggttttgaaggaaaaaattgcgagttggacgtgacctgtaacataaagaacggcaggtgtgagcaattctgcaaaaacagtgcggataacaaggtcgtctgctcctgcaccgagggttatcgcctcgctgagaatcagaaatcttgcgaaccggcagtccctttcccatgcggaagagtgtcagtctcacagacctcaaaactgacgagagcggaaacggtctttccagacgtggactatgtgaattccaccgaggccgaaaccattctcgacaacatcacacagtctacccagtcatttaacgacttcaccagggtggtaggtggagaggacgctaagccaggacaattcccgtggcaggtggttctcaacggtaaggttgatgcattttgcggtggttccatcgtcaacgagaaatggattgttacggcagcccattgtgtggagaccggagtgaagatcactgttgtggcgggagagcacaatatcgaggagacagagcatactgaacagaaacgcaacgttatcaggataatccctcaccataactataacgctgcgattaataaatacaaccacgatatagctctgctcgagctcgacgaaccacttgtcttgaattcctacgtgaccccgatatgcatcgcggacaaggagtacaccaatatattcctcaagttcggatctggctacgtatctggatggggacgcgtgttccataagggaagaagcgctcttgtgcttcagtacctgcgcgtgcccttggtggacagagctacttgtctcctttccaccaagtttactatatacaacaatatgttttgcgcgggatttcatgagggcggcagggactcctgtcaaggtgactcaggaggacctcacgtgacggaagtcgaaggtacgtctttcctgaccggcatcatttcttggggagaagagtgtgccatgaagggtaaatacggaatctatacaaaagtatccaggtatgttaactggatcaaggagaaaaccaagctgact

SEQ ID NO: 2612 - DNA, 1383 bp, Artificial Sequence
  derived and/or modified sequence
atgcaacgcgtgaacatgatcatggcggaatccccagggctgataactatctgcctgctgggatacctgctgtcagcggagtgcacggtgtttcttgaccacgaaaacgccaataagattctgaatagaccaaagcgctacaactccggaaagctcgaagagttcgtgcaaggaaacctggagagggagtgcatggaagaaaagtgctcgtttgaagaagccagagaagtctttgagaacactgaacggaccacggaattctggaagcagtacgtggatggggaccagtgcgaatcgaatccatgtctgaatggaggatcgtgcaaggacgacatcaactcctatgagtgctggtgcccgtttggcttcgaaggaaaaaactgtgaactcgacgtgacgtgcaacatcaagaacggacggtgcgaacaattctgcaaaaattcggctgacaacaaggttgtgtgctcctgtactgaaggataccgcctggcagaaaaccagaagtcgtgtgaaccggccgttccattcccgtgtggacgcgtgtccgtgtcgcagaccagcaagctcactcgcgcagagactgtgttcccggatgtcgactatgtgaattcaaccgaggccgaaactatcctggacaacatcactcaatcaactcaatcattcaacgacttcactagagtcgtgggcggcgaagacgccaagccgggccaattcccatggcaggtggtgctgaatgggaaggtggatgcgttctgcgggggtagcattgtcaacgaaaagtggatcgtgacggcggctcactgcgtcgaaaccggagtgaagattacggtcgtcgcgggtgagcacaatatcgaagaaactgagcatacggagcaaaagcggaacgttattcggattattccgcaccacaactacaacgcagccatcaacaaatacaatcatgatatcgccttgctggaactcgatgagccgctggtgctcaattcctacgtgacgccgatctgcatcgccgataaggaatacaccaatatctttttgaagtttgggtccggatacgtcagcgggtggggccgggtgttccataaaggcagatcggcactggtcctgcagtacctgcgggtccctctggtcgaccgggccacctgtcttctgtcaaccaagttcaccatctacaacaatatgttttgtgcgggcttccacgaaggaggaagggactcctgccagggagactccggaggccctcatgtgaccgaggtcgaaggaactagcttcctgaccggaatcatctcatggggagaggaatgcgctatgaaaggcaaatacggaatctacactaaggtgtcacggtacgtgaactggatcaaggaaaaaaccaagctgacc

SEQ ID NO: 2613 - DNA, 1383 bp, Artificial Sequence
  derived and/or modified sequence
atgcagcgagtcaacatgatcatggcagagtcacccgggctaataacaatatgcttactcggatatcttctctctgctgaatgtactgtatttttagatcacgaaaatgccaacaaaatactgaacagaccaaaacggtataactccgggaagttagaagaatttgtgcaggggaatctggaaagggaatgtatggaagagaaatgctcattcgaagaagctagagaagtgtttgaaaatacagaacggactacagaattctggaagcagtacgtggatggagatcagtgcgaatctaatccatgcctcaatgggggaagttgcaaagatgatataaactcatatgaatgctggtgtcccttcggattcgaaggaaaaaactgcgagctcgatgtgacatgcaacatcaaaaacggacgatgcgaacagttctgtaaaaactcggcggataataaggtagtttgttcttgcacagaaggatataggctcgctgaaaaccaaaaatcctgcgaacccgccgtaccttttccctgtgggagggtgtccgtgtctcagacttccaaactgactagggccgaaactgtcttccccgatgtagattatgtgaattccacagaagcggaaacaattctggacaacattactcagtcaacacagtcctttaacgatttcactagagttgttgggggggaggatgctaaaccagggcagtttccttggcaggttgtgctgaatgggaaagttgacgctttttgtgggggatcaatcgtgaatgaaaaatggatcgttacagctgcccattgtgtggaaactggagtcaagatcacagttgttgctggggaacacaacatcgaagaaactgaacatactgaacagaaacggaacgtgattagaatcataccacatcataactataacgcagccatcaataaatacaatcatgacatagctctcttggaactcgatgaacccttagtcctcaactcctatgtgactccaatttgcatagcagacaaggaatatacaaacatatttctaaaatttgggtctggatatgtatccggatggggacgcgtctttcataagggacgaagtgctctcgtgcttcagtatctacgggtgcccctcgtggatagagctacttgccttctttcaactaaattcacaatttataacaatatgttctgtgccgggttccatgaaggagggcgcgactcctgtcagggggactcggggggaccgcatgtaacagaagtcgaggggacgtcttttctaactggaatcatctcctggggagaagagtgtgccatgaagggaaaatatggaatctacactaaagtgagtagatatgtgaattggattaaagaaaaaacaaaactcaca

SEQ ID NO: 2614 - DNA, 1383 bp, Artificial Sequence
  derived and/or modified sequence
atgcagagggtgaatatgataatggccgagtctccaggcttaatcaccatttgtttattgggatacctgttgagcgctgaatgtactgtgtttcttgatcacgaaaatgcgaataagattctgaatcggcctaaaagatataactctggaaagcttgaagagtttgttcagggtaatttggaacgtgaatgtatggaggagaaatgttcttttgaggaggctcgtgaagtcttcgaaaatacagagaggacgactgaattctggaagcagtatgttgatggagatcagtgtgaaagcaatccatgtttaaatggaggctcatgcaaggatgatattaacagttacgaatgttggtgcccattcggttttgaaggtaagaattgtgagctggacgttacatgtaatattaaaaatggacgttgcgaacaattttgtaagaactccgctgataacaaggttgtttgtagctgcacggagggatatagactagccgagaatcaaaaatcgtgtgagccagctgttccgttcccgtgcggacgcgtatcagtgagtcaaacgagcaaacttacacgcgcagagacagtcttcccagacgtggactacgttaatagcacagaagcggagactatactcgataatataactcaaagtacacaatcattcaacgactttacacgagtcgtaggtggtgaagacgcaaagccaggacaatttccgtggcaagttgtgttgaatggtaaggttgatgcattttgcggcggatcaattgttaacgaaaaatggattgtgacagcagcacattgcgtagaaactggtgtgaagattacagttgttgctggcgaacacaacattgaggaaacagaacatactgaacagaaaagaaatgtcatacgtattatcccacatcataattataacgccgcaattaataaatacaatcatgatattgctcttcttgagttggatgaaccactggtcctcaattcttatgtcaccccaatttgcattgccgataaagagtatacaaatatcttccttaaatttggttccggatacgtctctggatgggggagagtgttccacaagggacgtagtgcccttgtcctacaataccttcgagttccactcgttgatagagcgacttgtttgttgtcaacaaaatttaccatttacaataacatgttctgcgcgggttttcatgaaggaggacgggatagttgccagggagattctggaggtccgcacgttaccgaagttgaaggaacttcatttcttacaggtataatctcatggggtgaagaatgtgctatgaaaggcaaatatggtatttataccaaggtctcacgctatgtgaactggatcaaggagaaaactaagctaaca

SEQ ID NO: 2615 - DNA, 1383 bp, Artificial Sequence
  derived and/or modified sequence
atgcagcgtgtgaacatgattatggccgaatctcccggcttaattaccatctgcctgctgggatacctgctctcagcagaatgtacggtcttcctcgatcatgagaacgctaacaaaatactgaataggccgaaacggtataactctggtaagcttgaggagtttgtgcagggaaatctggagcgagaatgtatggaggaaaaatgctcattcgaagaggcccgggaggtctttgagaacaccgagcggactaccgaattttggaagcaatacgtggacggcgatcagtgtgagagtaacccttgtttaaatggaggatcttgtaaggatgacatcaattcctatgaatgttggtgccccttcggttttgagggcaaaaactgtgaattggatgtcacttgtaatatcaagaacggccgttgtgagcagttttgcaaaaattcagcagacaacaaagtagtgtgctcttgtacagaaggatatcgactggcggagaatcaaaagagttgtgagcctgcagtacccttcccatgtggccgcgtctctgtctcacagacaagcaaacttaccagagccgaaactgtcttcccagacgttgactacgtcaattcaaccgaagcagagaccattttggataacataacacagtctacccagtcatttaacgacttcacacgggtggtcggcggagaagacgccaagccaggacagtttccctggcaggtggtgttgaatggaaaagtggatgcgttttgcggagggagcattgtcaacgagaaatggatcgtgactgctgctcactgtgtggagaccggggtgaagattacagttgttgccggagagcataatatagaggagacggagcacacagaacagaaacgtaatgtcatccggattatcccacatcataactacaacgcagctatcaacaaatataaccacgatatcgctttactggagctagacgagccgcttgtcttgaactcatatgtgacaccgatttgcattgcggacaaggaatacactaatatttttctcaagttcggctctggttacgtgtctggctggggccgagtgttccataaagggagaagcgcccttgtgctgcaatatctgcgggtacctctggttgaccgggccacttgcctgttgtccacaaagtttaccatctataataatatgttctgcgcgggcttccatgagggcggccgtgattcatgtcaaggcgattctggaggcccccacgttacggaggtcgaagggacctcctttcttacgggcatcatttcctggggagaagaatgtgccatgaagggcaagtatggcatatacacgaaggtcagcagatacgtgaactggatcaaagaaaagacaaaactaact

SEQ ID NO: 2616 - DNA, 1383 bp, Artificial Sequence
  derived and/or modified sequence
atgcagcgtgtgaacatgataatggccgagtctccggggctaattaccatttgtttgcttgggtatctactatccgctgagtgtacagtgtttctggatcatgagaatgctaacaaaatcctgaaccgcccgaagagatacaatagtggaaaactggaggagtttgtgcagggcaatcttgaacgcgagtgcatggaagaaaagtgcagttttgaagaggccagagaagtcttcgagaacactgaacggacgaccgagttttggaagcaatatgtagatggagaccagtgcgagtctaatccgtgcctgaacggtggctcctgtaaagatgacatcaacagctatgaatgctggtgcccgttcgggttcgaaggcaagaattgcgaactagacgtgacctgtaatatcaagaatgggaggtgtgaacagttttgtaaaaattctgccgataacaaagtggtctgcagctgcactgagggttatcgactcgctgaaaatcagaaaagctgtgagccagcagttcccttcccctgcggcagggtgtctgtgtctcaaacatctaagctgaccagagcggaaacagtcttccctgacgtggactacgtgaactccacggaagccgagacaatccttgacaacatcacccagtcgacacagagcttcaatgatttcacacgagtggtcggaggggaggacgcaaaaccaggacagttcccttggcaggttgtgctcaacgggaaagtggacgctttctgtggtggttccattgtgaatgagaaatggatcgtaacggccgcccattgcgtggaaacaggcgtaaagatcacagtcgtcgctggtgaacacaacattgaggagactgagcacaccgagcaaaagcggaacgtcattaggatcatacctcaccataactataacgcagcaattaacaaatacaaccatgacattgcgttattggagctcgacgagcccctggtgctgaattcatacgtgacccccatttgcattgctgacaaggagtacaccaacatcttcctgaagttcggctctggttacgtgtctggatgggggcgggtatttcacaaaggccgctcagctctcgtgctgcagtatctcagggtgcccctcgttgatagggccacttgcttgctttcgaccaaatttaccatttacaataacatgttctgtgctggattccacgaaggtggacgggactcatgtcagggcgattccggggggccacacgttaccgaagtggagggaactagctttctgaccgggatcatctcgtggggggaggagtgcgccatgaagggcaaatatggcatttataccaaagtgtcgcggtatgtgaattggatcaaggaaaagacgaaactgaca

SEQ ID NO: 2617 - DNA, 1383 bp, Artificial Sequence
  derived and/or modified sequence
atgcagcgcgtcaacatgataatggcagagagtccgggactgattactatctgccttttgggatatctgctctccgcagagtgcaccgtgttcttggaccacgagaacgccaacaagattctgaatcgcccaaagagatataactccggaaaattggaggaattcgttcaaggtaatcttgagcgcgagtgcatggaggaaaagtgctcatttgaagaagcccgggaagtgtttgagaatacagagcgtaccactgagttttggaaacaatacgtggacggagaccagtgcgaaagcaacccctgcctgaacggaggctcttgcaaggatgatatcaatagctacgagtgctggtgccctttcggatttgagggtaaaaattgcgaactcgacgtgacgtgtaacatcaagaacggccgatgcgagcaattctgcaaaaacagtgccgacaacaaggtggtgtgctcctgcacagagggctaccgtctggccgagaatcagaagagctgcgagcccgcggtaccgttcccctgcggccgcgtctccgtgtcacagacatcaaagttgactagggcagagaccgtgttcccagacgtagattatgtcaactctactgaggccgaaaccattctggacaacatcacacaatcgacccagagcttcaatgatttcactcgagtcgttggcggagaggacgccaagcccggtcaattcccctggcaggtggtgctgaacggaaaggtggacgcattttgcggaggctctatcgtgaatgagaagtggattgtgacggctgcgcactgcgtcgagacaggcgtgaagattactgtcgtggccggggagcacaatattgaggagaccgaacacactgagcagaaacgcaatgtaatccgcatcattccccatcacaactataatgcggccatcaataagtacaatcacgacatagcgttgctcgaactcgatgaacctctagtgttgaactcatacgtcaccccgatctgcattgccgacaaagagtatacaaacatctttctgaagttcggtagtggctacgtgtcaggatggggccgtgtatttcacaaagggcgatccgctttggtgctgcagtaccttcgggtcccgctcgtggatcgcgcgacgtgcttgctgagtactaagttcactatctataacaatatgttctgcgcaggattccacgagggaggccgcgattcctgccagggcgattccggcggtccacacgtgaccgaggtcgagggaacatcgtttctcaccggcatcattagctggggagaggagtgcgccatgaagggtaaatatggtatctacaccaaagtcagccgctatgtaaactggattaaggagaagactaagctcacc

SEQ ID NO: 2618 - DNA, 1383 bp, Artificial Sequence
  derived and/or modified sequence
atgcaacgcgtgaacatgattatggcagaaagcccaggtctgattactatttgcctgcttggctacttgctgagcgcagagtgcaccgtgtttcttgatcatgaaaacgctaacaagatcctcaatcgcccgaagaggtacaacagcggaaagctggaagagtttgtgcaaggcaacctggaacgcgaatgtatggaagaaaagtgttccttcgaggaagcacgcgaagtgtttgaaaacacggaaagaaccaccgagttttggaagcaatacgtggatggagatcaatgtgaatcgaacccttgtctgaatggaggttcgtgtaaggacgacataaacagctacgagtgttggtgtccttttggatttgaaggtaagaactgtgaactggatgtcacctgcaacatcaaaaacggaaggtgcgagcagttctgcaaaaacagcgcagacaacaaggtggtctgctcgtgcactgaaggttatcgtcttgccgagaaccagaagagctgtgagcctgcagtgccatttccgtgtggtcgcgtgtccgtctcgcaaacctcaaaacttacccgcgcagagactgtgtttcctgatgtggactatgttaactccacggaggctgagacgattcttgacaacatcacccaatcaactcagtccttcaatgattttactagggtggtcggaggagaggacgccaaaccaggacaatttccatggcaagtcgttttgaatggaaaagtagatgcgttctgtggcggttcgattgtgaatgagaaatggattgtgactgcagcacattgcgtcgagacgggcgtcaagattactgtcgtcgcgggagaacataacatcgaggagactgaacacaccgagcaaaagagaaatgtgatccgaatcattccacaccataactataatgcagcgataaacaaatacaatcatgatattgcactgcttgagcttgacgaacctctggtcctcaatagttacgtgacgcctatctgtattgcagataaagaatacactaatatctttctgaagttcgggtctggttacgtctccggttggggaagggtgtttcataaaggccgatcggcactggtgcttcaatacttgcgggtgcctctggtggatagggcgacctgtctgctgtctactaagttcactatttacaataacatgttttgtgcaggattccacgagggtggtagagactcatgtcaaggcgattccggtggtccacatgtgaccgaggtggaaggaacctcgtttctgaccgggatcatatcgtggggagaggaatgtgcgatgaagggtaagtacggcatttacaccaaggtgtcgagatacgtgaattggatcaaggaaaaaaccaaacttacc

SEQ ID NO: 2619 - DNA, 1383 bp, Artificial Sequence
  derived and/or modified sequence
atgcagcgcgtcaacatgattatggcagagtccccagggctcatcaccatatgtctcctaggctatcttctctccgctgagtgcacagtgttcctcgaccatgagaacgccaacaagattctcaatcggcccaaaaggtacaatagtggtaagcttgaagagttcgtgcaagggaacctggaaagggagtgtatggaagagaaatgctcattcgaggaagcccgcgaggtgtttgaaaataccgaaagaacgacagagttctggaagcaatatgtggatggcgaccagtgcgaatcgaacccatgcctcaatggcggttcctgcaaggatgacatcaatagctacgagtgttggtgtcctttcggctttgagggtaagaactgcgagctcgacgtcacctgtaatattaaaaacgggaggtgcgaacaattctgtaaaaattctgcagacaacaaggtggtttgttcttgtacggagggctaccgtttggcagagaaccaaaaatcttgtgaaccggctgtcccgtttccatgtggacgagtttcggtcagtcaaacttctaagctgacaagggcagaaactgtgtttccagacgtggattacgttaatagcaccgaagcggagactattctcgacaacatcactcagtcaacacagtcttttaatgattttaccagagttgttggcggtgaagatgcaaaaccaggtcagtttccatggcaagtcgtactgaatgggaaagtcgatgctttctgtggcgggagcatcgttaatgagaagtggatcgtcacggccgcccactgcgtggagacaggtgtgaagatcacagtggtcgccggtgagcacaacatcgaagagaccgagcacaccgaacagaagaggaacgtgatacgcatcattccccaccacaattacaacgccgccatcaacaaatacaatcacgatatcgccctgcttgagctcgatgagcccctggtgctaaacagctacgtgacacccatctgtatcgccgataaggagtatactaacatttttctgaagttcggaagcggttatgttagcggctggggccgagtctttcacaagggcagaagcgccttggtcctccagtaccttcgggtgccactcgtggaccgagccacctgccttttgtcgaccaagttcaccatttacaacaatatgttttgtgcaggtttccatgagggcggtagggactcctgtcagggagactccggcgggcctcatgttactgaggtcgagggaacaagttttcttacaggcattatcagctggggtgaggagtgcgctatgaagggcaagtacggcatttataccaaagtctcccggtacgtgaactggataaaggaaaagacaaagctcacc

SEQ ID NO: 2620 - DNA, 1383 bp, Artificial Sequence
  derived and/or modified sequence
atgcagagagtaaatatgattatggccgagtcaccaggtctcatcaccatctgtctacttggttatcttctttctgctgagtgcactgtgtttcttgatcacgagaacgcaaacaagattctgaatcgacctaagcgatataactctggaaaactggaggagtttgtgcaggggaatctggagcgggagtgcatggaggaaaaatgcagtttcgaggaggcacgagaagtgtttgaaaacaccgagcgcactactgaattttggaaacaatatgtggatggagaccagtgcgagtccaacccttgtctcaatggcgggtcatgcaaggacgatatcaattcatacgagtgttggtgcccgtttggctttgaggggaaaaactgtgagctggatgtcacatgtaacataaaaaatggccgctgcgaacagttttgtaagaactcagctgacaacaaagtggtctgttcctgcaccgagggatacaggttggcagaaaatcagaaatcttgtgaacccgccgtccccttcccttgtggaagagtgagcgtgagccagacatcaaaattgacgagagctgagacagtgttccccgatgtggactatgtgaactctacagaggctgagacaatactcgataatatcacacagtctacccaatcattcaatgactttacgagggtcgtaggcggggaggacgccaagcctggccaatttccctggcaagttgtgctgaacggaaaggtcgatgccttctgtggtgggagtattgtgaatgagaaatggatagtgaccgccgctcattgtgtggagacaggagtgaaaattactgtcgtggccggcgagcacaacatagaggaaaccgagcatacagaacagaagagaaacgtcatcagaattatcccccaccacaactataacgcagccattaacaaatacaatcatgatattgctttgttggaactggacgaacctcttgtgctgaatagctacgtcacgccgatctgtatcgcggataaagaatatactaacatattcctcaagttcggttccggttacgtgtcaggctggggcagggtctttcataaggggaggtctgcactggttttgcaatacttgcgggtgccgctggttgacagagcaacctgccttctgtcaactaaattcaccatttacaacaacatgttctgcgctgggttccacgaggggggtcgtgattcgtgccagggcgactcaggcggaccacacgtcaccgaggtggaggggacctcttttcttacaggcatcatctcttggggagaggaatgtgcaatgaaggggaaatacggaatatataccaaggtgtcaaggtatgtgaattggatcaaggagaagaccaaactgacg

SEQ ID NO: 2621 - DNA, 1383 bp, Artificial Sequence
  derived and/or modified sequence
atgcagagggtcaacatgattatggccgagagtcctggcttgataacaatctgtctgctgggctatttacttagcgcagagtgcacggtgtttctggatcacgaaaacgcaaacaagatcctgaaccgaccaaaaaggtacaatagtgggaagctcgaagagttcgtgcagggaaaccttgagcgggaatgcatggaagaaaagtgtagcttcgaggaagcccgcgaggtcttcgaaaatacagagcgcacgaccgaattttggaaacagtacgtagatggggaccagtgtgagtccaacccatgcctgaacggcggctcatgcaaagacgatatcaattcgtacgagtgttggtgtccattcggtttcgagggaaaaaactgcgaattagacgtcacttgcaacattaagaatgggcgttgtgaacagttctgcaagaactccgccgataataaagtggtgtgttcatgtaccgagggctaccggctggcagagaaccagaaaagctgcgagccggcagttccattcccgtgcggtcgagtctctgtgtcccaaacttcaaagttgacacgcgccgaaaccgttttcccagatgtggactatgtgaacagcacagaagcagaaactattctcgataatatcacacagagcacccaatcctttaatgattttacacgggtcgtagggggtgaggatgccaagcccggccagttcccctggcaagtcgtgctgaacggaaaagtagacgcgttctgtggaggcagcattgttaacgagaaatggatagttacagccgcccactgtgtggagacaggagtgaagattacagtcgtggctggggagcataatatagaggaaaccgagcataccgagcagaagcggaacgtgatccgaattattcctcaccataactataacgctgcaattaataagtacaaccacgatatagcactgctggaattggacgagcccttggtgttgaacagctacgtgactccaatctgtatcgcagacaaggaatatacaaatatctttcttaaattcggctcgggctatgtcagtggttggggacgagtattccacaagggacggtcggctctcgtgcttcagtacctccgtgttcctcttgttgaccgcgccacctgtttgttgtcaacaaagttcacaatctataataatatgttttgcgccggctttcatgaggggggaagagactcttgccagggtgactcggggggcccacacgtgacggaggttgaaggaacgtcttttctgaccgggattatcagctggggtgaggagtgtgctatgaagggtaagtatggtatctacactaaagtttctagatacgtcaactggatcaaagaaaagacaaagctgaca

SEQ ID NO: 2622 - DNA, 1383 bp, Artificial Sequence
  derived and/or modified sequence
atgcaacgtgtcaacatgataatggccgaatctccaggtctgatcaccatttgtctcctgggctacctgttgtctgccgaatgtactgtgttccttgaccacgaaaatgcaaacaagatcctcaaccgccccaaacgttataatagcggcaaactggaggaatttgtccagggaaacttggagagagaatgcatggaagaaaagtgctccttcgaggaggcccgtgaggtgtttgaaaataccgaaaggactaccgaattctggaagcagtacgtcgatggtgatcagtgcgagagtaacccttgcctgaatggcggatcttgcaaagatgacattaactcttatgagtgctggtgccctttcggatttgagggcaagaactgtgagcttgatgtgacatgcaatatcaaaaatggaagatgtgaacagttctgtaagaactccgctgataacaaagtggtttgctcctgtaccgagggttatcgtcttgctgagaaccaaaaatcttgcgagcccgctgtgccttttccttgtggacgcgtaagcgtctctcagacatcaaagctgacaagggcagagactgtatttcccgatgtggactatgtgaacagtactgaggccgagactatcctggacaacatcacccagagtacccagagtttcaatgatttcactcgcgtggtcggaggagaagacgcaaagcccggtcagttcccttggcaggttgtcctcaacggtaaagtcgacgcattctgcggcggctctatcgtaaatgagaagtggatcgtgactgctgcccactgcgtagaaaccggcgttaaaataactgtagtagcaggagagcacaacatcgaggagacagaacatacagagcagaagaggaacgtgatccgtatcatccctcatcacaactacaatgcagctatcaataagtacaaccatgatattgctctcctcgagctggacgagcccctggtcctcaatagctatgtcacacccatttgcatagcagacaaggagtacaccaacattttcctgaaattcggttccggatacgtgtctggttggggtcgcgtgtttcacaagggtagatccgcactcgtgttgcagtacctgcgcgtgccactggtagacagggccacttgcttgcttagtacaaagtttactatttacaacaatatgttctgcgccggattccacgagggaggtcgcgacagttgccagggtgattccggtggccctcacgtgaccgaggtggagggaacaagcttccttaccggtattatcagctggggtgaggagtgcgctatgaagggcaagtatggtatctacactaaggtctctcgttatgtgaattggatcaaagagaaaacaaaactgacc

SEQ ID NO: 2623 - DNA, 1383 bp, Artificial Sequence
  derived and/or modified sequence
atgcagagagtgaatatgatcatggccgagtcgcctggtttgattactatctgcctcttggggtacctcctttccgccgaatgtacggtttttttagaccacgagaacgctaataagatcttgaaccggcctaaaaggtacaacagcgggaagcttgaagaattcgtgcaaggaaacctggagagggagtgcatggaggagaaatgttcatttgaggaggcacgggaggtttttgagaatacggaacgcacaaccgagttctggaaacagtatgttgacggtgatcagtgcgagtctaacccctgtctgaatgggggctcttgcaaagatgatatcaacagctatgaatgttggtgcccattcggcttcgaagggaagaactgtgagttagatgtgacatgtaatattaagaatggcagatgcgagcagttttgtaaaaacagcgccgataacaaggtggtctgctcttgtaccgaggggtaccggctggcggagaaccagaaaagctgtgagcctgccgtgcccttcccttgcggaagggtgagcgtatcacagacatctaaattaacaagagccgagaccgtctttccggacgtggattacgtcaactccacagaggcagaaacaattctggacaacatcactcagtcgacacagtcattcaatgactttactagggtggttggcggggaagatgccaaacctggtcagttcccatggcaagtggtgttgaatggtaaggtagacgcattttgtgggggtagcatagtaaatgagaagtggatagtaacggctgcgcactgcgtggagaccggagtgaaaatcactgtagttgcaggcgaacacaacatcgaggagacagagcatactgaacaaaagagaaatgtgattaggataattccacaccacaattacaatgccgctataaacaaatataatcatgatatcgctctgctggagctggatgagcctctggttctcaattcatatgttacacctatctgtattgccgataaggagtacacaaatatattcctgaaatttggaagcggctatgtgagcgggtgggggagggtgtttcacaaggggaggtctgctctcgttctgcagtacctgcgggtccccttggtcgatcgagccacgtgcctgctgtctaccaaattcaccatctataacaacatgttctgtgccggcttccatgaaggcggccgcgattcctgtcagggcgattccgggggaccgcacgtaacagaagtggaaggcacatcatttttgaccggaataatttcttggggtgaagaatgcgccatgaagggaaagtatgggatatatacaaaggtaagcagatacgttaactggattaaagaaaagacaaaactcaca

SEQ ID NO: 2624 - DNA, 1383 bp, Artificial Sequence
  derived and/or modified sequence
atgcagagagtaaatatgatcatggctgaatcccccggcctgatcacaatctgtctactgggttatctgctgtcagccgaatgcacggtttttttggaccacgagaatgcgaacaaaatattaaacaggcccaagaggtacaactctggaaagctggaagagttcgttcagggcaacttagaaagggagtgtatggaggagaagtgtagctttgaggaagcccgggaggtgttcgagaacaccgagcgaactactgaattctggaagcagtacgttgacggcgatcagtgtgagtcgaacccctgcctgaatgggggctcctgcaaagatgacattaacagttatgagtgctggtgtccttttggcttcgagggaaagaactgcgaactcgatgtgacttgcaacatcaaaaacggcaggtgcgagcagttttgcaaaaatagcgccgataacaaagtggtgtgctcatgcaccgaagggtataggctggccgagaatcagaagtcatgtgagcctgctgtgcctttcccttgcggcagagtctctgtttctcagacatccaagctgacaagggcagagactgtgtttcctgatgtggattacgttaactcaaccgaagctgagaccatacttgacaacattacccagtccacccagagcttcaacgactttacacgggtggttggcggcgaggatgctaagcccgggcagtttccttggcaggtcgtcttgaacggtaaagtcgatgctttctgcggagggtccattgtcaacgaaaagtggatcgtgactgccgcacactgcgtggagaccggagtcaaaatcactgtcgtggcaggagaacacaacatcgaagagaccgagcatactgaacagaagagaaatgtcatccgaattattccacatcacaattataatgctgccattaacaaatacaaccacgatatagccctgctggagttagacgagccccttgttctgaacagttacgtgaccccgatctgtatcgctgacaaagagtacaccaatattttcttgaaattcggctctggatacgtttcaggatggggtcgtgtattccataagggcaggtccgcactcgtactccagtacttgcgtgtgcctcttgtggatagggctacctgccttttatccacaaaattcaccatctacaataacatgttctgcgcgggcttccacgaaggggggcgcgatagctgccagggcgattctggtgggccccatgttaccgaggtggaagggacttctttccttacgggcatcatctcttggggggaagagtgtgcgatgaaggggaagtacggcatatacacgaaagtcagccgatacgttaattggataaaggaaaagaccaaactgact

SEQ ID NO: 2625 - DNA, 1383 bp, Artificial Sequence
  derived and/or modified sequence
atgcaaagagtgaacatgataatggccgagtcaccgggccttatcacgatctgccttctgggatatctgctttccgcagaatgcaccgtgttcctggatcacgagaatgcaaacaagattctgaatcgccctaagaggtacaactctgggaagctcgaggaatttgttcaagggaatctggaacgagaatgcatggaggaaaagtgctcgtttgaggaagcgagggaagttttcgaaaatacggaacggaccactgaattttggaagcagtacgtggatggggatcagtgcgaaagcaatccgtgtctcaatggaggatcatgcaaggacgacataaactcctacgagtgttggtgtcctttcgggtttgaagggaagaactgtgagcttgacgtcacctgtaacattaagaacggtagatgtgagcagttttgtaagaattcagcagacaacaaagtcgtgtgttcctgcactgaaggctatcgtctcgcagagaaccagaagtcgtgtgaaccagctgtcccttttccatgtggcagggtgtctgtgtcgcaaacttcaaagctgactagggcggaaactgttttccccgatgtggactacgtcaactccaccgaggcagagactatcctggataacatcacccaatccactcagtcgtttaacgactttacccgggtggtcgggggtgaggacgcaaagcctggtcagtttccttggcaggtggtcctgaatggtaaggtggatgcattttgtggaggatcaattgtgaatgagaaatggatcgttacggcagcccattgcgtcgaaacgggcgtcaaaatcaccgtggtcgccggcgaacacaatattgaagagactgaacacaccgaacagaagcgaaacgtcatcaggattattcctcatcataactacaacgcagcaattaacaagtacaaccatgatattgcccttcttgagctggacgaaccgctggtgcttaacagctacgtgaccccaatatgtattgcggataaggagtataccaatatctttcttaagttcggaagcggttacgtgtcaggctggggtagagtgttccataaaggacgctccgcgctcgtgctgcagtaccttcgcgtgccccttgtggatagagccacttgtctgctgtcgactaagtttaccatttacaataacatgttttgtgcagggttccacgagggaggacgagatagctgtcagggggattctggaggccctcatgtgaccgaagtcgagggaactagctttttgaccggcatcatttcgtggggagaagagtgtgctatgaaaggaaagtacggcatatacactaaggtgtcgagatacgtgaattggattaaggaaaaaaccaagctgacc

SEQ ID NO: 2626 - DNA, 1383 bp, Artificial Sequence
  derived and/or modified sequence
atgcaaagggtgaatatgattatggccgagtcccctggtctgatcactatatgcctgctgggttaccttctttcggcagaatgcaccgtctttctggatcatgagaacgcaaataagatactcaaccgcccaaagagatacaattccggaaaactcgaggaatttgttcaaggaaatctcgaaagggagtgtatggaagaaaagtgctcctttgaagaagcccgggaagtctttgagaacaccgagaggaccactgagttctggaaacaatatgtggacggagatcaatgtgaatcgaatccttgtctgaatggtggtagctgtaaggacgatatcaactcctacgaatgctggtgcccatttgggtttgagggaaaaaactgtgaactggatgtgacgtgcaacatcaagaatggtagatgcgagcagttttgtaaaaacagcgccgacaacaaggtggtgtgcagctgtaccgaagggtaccgccttgctgaaaaccagaagtcatgtgaaccagccgtgcctttcccatgcgggagggtgtcagtgtcgcaaacgtcaaagctgactagagcagaaactgtgttcccagatgtggactacgtgaacagcaccgaagcagagacgattcttgacaatatcacccagtctacccagagcttcaacgattttaccagggtcgtcgggggtgaagatgcaaagcctggacagtttccctggcaggtcgtcctgaacggtaaggtcgacgcattctgcgggggctcgattgtcaacgagaagtggatcgtgacggcagcacactgtgttgaaactggagtcaagatcactgtggtggcaggggaacacaacatcgaggagactgagcacacggagcaaaagagaaatgtcatacggataattccacatcacaattacaacgcagcgattaacaaatacaaccatgatattgcgcttctggaacttgatgaacctttggtcctgaactcgtatgtgactcccatttgcattgcagataaggaatacactaatatcttccttaagtttggatcgggatacgtgagcggttggggacgagtgtttcacaagggacgctcggcactggtcctgcaatacctccgggtgccactggtcgaccgggctacctgtcttttgtccactaagtttactatttacaataacatgttttgtgcaggattccatgaaggcggaagagattcgtgtcaaggcgattcaggaggacctcatgtcaccgaggtcgaagggacctcctttcttaccggtatcatatcgtggggcgaggaatgcgctatgaaggggaaatacgggatctacactaaagtgtcccgttacgtcaattggataaaagaaaaaactaagctgacg

SEQ ID NO: 2627 - DNA, 1383 bp, Artificial Sequence
  derived and/or modified sequence
atgcaaagagtcaacatgattatggctgaatcacctggacttattactatatgtttacttggttatttacttagtgctgaatgtacagtttttcttgatcatgaaaatgcaaataaaatcttaaatagaccaaaaagatataactctggaaaattagaagagtttgtccaaggaaatttagaacgtgaatgtatggaagaaaaatgttcttttgaagaagcaagagaagttttcgagaatactgaaagaactactgaattttggaaacaatatgttgatggagatcaatgtgaatcaaatccatgtttgaatggaggatcatgtaaagatgacattaattcatatgaatgttggtgtccttttggatttgaaggaaagaattgtgagttggatgttacctgcaatattaaaaatggaagatgtgaacaattttgtaaaaactccgctgataataaagtggtatgttcatgtaccgaaggatatagattagctgaaaatcaaaaatcatgtgaaccagcagtgccttttccttgtggaagagtttctgtctctcaaacatcaaagcttactagagcagaaactgtctttccagatgttgattatgttaatagtactgaagctgaaactattttagataatattacacaatcaactcaatcatttaatgattttactcgtgttgttggaggagaagatgcaaagcctggacaattcccatggcaagttgttttaaatggtaaagttgatgcattctgcggaggatctattgtcaatgaaaaatggattgttacagcagctcattgtgtggaaacaggtgttaaaataacagttgttgctggtgaacataatatagaagaaactgaacatacagaacaaaagagaaatgttattaggattattccacatcacaattataatgcagcaattaataaatataatcatgatattgctttattagaattagatgaaccacttgttttaaactcgtatgtaaccccaatatgtattgctgataaagaatatacaaatatatttttgaagttcggatctggatatgtttctggttggggtagagttttccataagggaagatcagcccttgttttacaatatttaagagtgccacttgttgatcgtgcaacatgtttactctcaactaaatttactatttataataatatgttctgtgctggattccatgaaggaggtagagattcctgccaaggagattctggtggacctcatgttacagaagtcgaggggacttcattccttactgggataatttcatggggtgaagaatgtgcaatgaaaggaaaatatggaatttatactaaagtttcaagatatgttaattggattaaagaaaagacaaaacttact

SEQ ID NO: 2628 - DNA, 1383 bp, Artificial Sequence
  derived and/or modified sequence
atgcaaagagtgaatatgatcatggctgaatcacccggtcttattactatttgtctgcttggttaccttctttccgcggaatgcaccgtgtttctggaccacgagaatgcaaacaagatattgaaccggcccaagcgatacaattcaggtaaacttgaagagtttgtccaaggtaacctggaaagagaatgtatggaagagaagtgttcgttcgaagaggcacgggaggtgtttgagaacaccgaacggaccactgaattctggaaacagtacgtcgatggggaccagtgtgaatccaacccttgcctgaatggcggatcgtgcaaggatgacattaactcttatgaatgctggtgcccttttggttttgaaggaaaaaactgcgagctcgatgtgacttgcaatatcaaaaatggacggtgcgaacagttttgcaaaaactcggcagataacaaggtcgtgtgctcatgtaccgaaggatacaggctcgcagaaaaccagaaaagctgcgaaccagccgtgccgtttccttgtggtcgggtgtcggtcagccaaacttccaaactgacccgggcagaaaccgtgttccctgacgtggattacgttaattcaaccgaagcagagactattctcgacaacatcactcagtccactcaatccttcaatgattttaccagagtcgtgggtggtgaggatgccaagccgggacaatttccctggcaagtggtgcttaacggaaaggtggacgcattttgtggtggttcaatcgtgaacgaaaagtggattgtgactgcggcgcattgcgtggagactggcgtgaaaatcactgtcgtcgccggtgagcataacattgaggaaaccgaacataccgaacagaagcggaacgtcattcgcataattcctcatcacaactacaacgcggcaatcaataagtacaaccatgatattgcacttctggagcttgatgaaccgctcgtgcttaactcctacgtgacccctatatgtattgcagataaggagtacactaacatatttctcaagtttggtagcgggtacgtttcaggatggggacgtgtgtttcacaagggaagatccgcgcttgtgcttcaatacctgcgagtcccccttgtggacagagcaacttgcctcttgtccacgaaattcaccatctataacaacatgttttgtgccggttttcatgagggtggtagggactcctgtcagggagactccggcggccctcacgtcaccgaagtggagggcacctcttttctgacgggcatcatttcatggggagaggagtgtgcaatgaaagggaagtacggcatttacacgaaagtgagtcgctacgtgaattggatcaaggagaaaacgaagctgacc

SEQ ID NO: 2629 - DNA, 1383 bp, Artificial Sequence
  derived and/or modified sequence
atgcagcgagtgaacatgatcatggctgagagtcctggactgatcacaatatgcctgctcggctatctcctcagtgccgagtgtacagtgtttctggaccatgagaacgccaacaagattcttaacaggcccaagcgttataattcaggcaaattagaggaattcgtccagggaaacctagagcgggagtgcatggaggagaagtgctcctttgaagaggctagggaggtgttcgagaacaccgagaggacaacggagttctggaaacaatacgtggacggcgatcaatgcgaaagcaacccatgtctcaatggtggcagctgtaaggacgatataaactcctacgaatgctggtgtccattcggatttgaaggtaagaattgcgaactggatgtcacatgcaacatcaaaaacggacgatgcgagcaattttgtaagaactcagcagacaataaagtcgtatgttcttgcacagaggggtaccggctggctgagaaccaaaaaagctgtgagcctgccgtcccgtttccttgtggcagggtgtcggtctcacagacttccaagcttaccagagctgagaccgttttcccagatgtagactatgtgaattctaccgaagccgagactatactggataatatcacccagagtactcagagctttaatgactttacccgggtcgttggaggcgaggacgcaaagcctggacagtttccgtggcaggttgtcttaaatggcaaagtggatgccttttgcgggggatccatcgtgaacgagaaatggattgtgaccgccgctcattgtgtggaaaccggggtaaaaattacagtggtggccggcgagcataacatcgaagagacagagcatacagagcagaaaagaaacgtgatccggatcataccacatcacaattacaacgcggctatcaacaaatacaatcacgacatagctctgctggaattggacgagccactggttctcaacagctacgtcacaccaatctgcatcgctgacaaagagtacaccaatatttttttgaaatttggcagtggttacgtgagcggatggggacgcgtatttcacaagggacgcagcgcgctcgtgctgcaatatcttcgcgtgcctttggtggatcgcgctacctgccttctgtcgacaaagtttaccatttataacaatatgttctgtgctggattccatgaaggaggcagagatagttgtcaaggcgacagcggggggccacacgtgacagaggttgagggcacatccttccttacaggaattataagttggggagaggaatgcgcgatgaaaggaaagtacggtatctacactaaggtgagccggtacgttaactggattaaggagaagacaaaactgaca

SEQ ID NO: 2630 - DNA, 1383 bp, Artificial Sequence
  derived and/or modified sequence
atgcagagagtgaatatgataatggcggagagcccaggcctgatcactatttgcctgctgggctacctacttagcgccgaatgcaccgtgttccttgaccatgagaacgccaataagattctcaataggcccaagcgatacaacagcggaaagctggaagaattcgttcagggtaatctagaaagggagtgcatggaggagaagtgcagtttcgaagaggcaagagaagtgtttgaaaataccgagcggacgaccgaattctggaagcagtacgtcgatggggatcagtgcgaatccaatccctgtctcaatggaggctcctgtaaggatgatattaactcctacgaatgctggtgtccattcggatttgaaggaaagaactgtgaactagacgtgacatgcaacatcaaaaacggaagatgtgagcagttctgtaaaaattctgccgataacaaagtggtgtgcagctgtaccgagggctatcggctggctgagaaccagaagtcatgtgagccggccgttccatttccctgcggacgagtgtccgttagccagacatctaaattaacccgagctgaaactgtgtttcccgacgtcgactatgtgaattctaccgaggccgaaacgatcctggataatatcacccagtccacccaatcttttaatgattttactcgggtcgtcggtggtgaggacgctaagcccggccagttcccatggcaagtggtgctcaacgggaaggtagatgctttttgtggtgggagtatcgtgaatgagaagtggatcgttacagccgctcattgtgtggagactggtgtgaaaataactgtggtggccggcgaacacaacattgaagaaaccgagcatacagaacagaagcgcaacgtcatccgcatcatcccgcaccacaactacaatgccgccatcaacaagtataatcacgacatcgctttgctggagctggatgagcccttagtactgaatagctacgtgactcctatctgcatcgctgacaaggaatacacgaatatctttcttaagtttggaagtgggtacgtttccgggtgggggcgggtgttccacaagggtcgcagcgccctggtgctgcaatacctaagagttccactcgttgaccgggcaacgtgcctgctgtcgacgaaatttaccatctacaacaatatgttctgtgctggatttcacgagggtgggagggattcctgccagggagattccggaggcccacatgtcaccgaggttgaaggaaccagtttcctcacgggtattatttcttggggggaagagtgcgccatgaaaggaaagtacggaatatacacaaaagtgagtagatatgtgaactggataaaagaaaagactaagctgacg

SEQ ID NO: 2631 - DNA, 1383 bp, Artificial Sequence
  derived and/or modified sequence
atgcaaagagtaaatatgatcatggcagaaagccccggtctgattaccatttgcctcctaggctacttacttagcgctgagtgtaccgtgtttctagatcacgaaaacgccaataagatcctgaatcgcccaaagcggtataatagcgggaaactcgaagaattcgtgcagggcaatctagaacgtgaatgcatggaggagaaatgctcattcgaagaggctcgggaggtgtttgaaaataccgagagaactaccgaattttggaagcaatacgtcgacggcgatcagtgtgaatctaacccttgcctgaatggaggaagttgcaaggacgacatcaacagctatgagtgctggtgccccttcggcttcgaaggaaaaaactgcgaacttgatgtaacctgtaacatcaagaatggcaggtgcgagcagttctgcaagaatagcgctgataacaaggtggtgtgcagctgcactgaaggctaccggctggcagagaatcagaagagctgtgaacccgcggtcccctttccatgtggcagggtgtccgtatcccagacctctaagcttactcgagctgaaacagtgtttcccgatgtggactacgtgaattccactgaggccgaaaccatcctggataacatcacccagagcacacaaagcttcaacgatttcaccagggtcgtaggaggagaagatgctaagcccggacagttcccctggcaggtcgtactaaacggaaaagtcgacgccttctgtggaggtagcatagtaaacgagaagtggatagtcactgctgcccattgcgtggaaacgggagtgaagattactgtcgtggccggtgagcataatatcgaggagaccgaacacacagagcagaagcgaaacgttatcagaatcatcccacaccacaactataacgctgccattaacaaatacaatcacgacattgccctgctagagttagatgaaccattggttctcaattcatacgtgacccccatttgcatagcagataaggaatatactaatatcttcttgaagttcggcagcggatatgtttccggatggggacgcgtgttccacaagggccggtccgcccttgtcctccagtatctgcgcgtgccactcgtcgacagggcaacatgcctcctatccaccaagtttactatctataataatatgttctgcgccggattccatgagggaggccgggattcctgtcagggagattccggcggacctcacgtcaccgaggtggaaggaacaagcttcttgacagggatcatctcatggggggaagaatgtgcaatgaaaggaaagtacggtatctacacaaaagtctctcggtatgttaactggataaaagagaagaccaaactgact

SEQ ID NO: 2632 - DNA, 1383 bp, Artificial Sequence
  derived and/or modified sequence
atgcaacgagtgaacatgattatggcagaaagcccaggactcatcactatatgcctgctggggtatctcctgagcgcagagtgtacagtcttcctcgaccacgaaaacgccaataagattctgaaccgacctaagagatacaactctggcaaactggaagagtttgtacaggggaacctcgagcgagaatgcatggaagagaaatgtagttttgaagaagcacgcgaggtgtttgagaataccgagcgaacaacagagttttggaaacaatacgtggatggagatcaatgcgagtcaaatccttgcctgaacggtggatcctgtaaggacgatattaatagctacgaatgctggtgtcccttcgggttcgagggcaagaattgtgagctagacgttacttgcaatataaagaacgggagatgtgaacagttttgcaagaactctgctgataacaaggtcgtgtgttcctgtacagaggggtatcggctggcggaaaaccagaagtcatgtgaacccgccgttccgtttccctgtgggcgcgtttcggtctcacagacatccaagctaacgcgggccgaaacagtgttccctgacgtggattacgtcaactcaacagaagctgaaacaatactggacaatataacccaatccactcaatccttcaacgactttacccgagtggtgggtggcgaagatgccaaacccggtcagttcccatggcaggtcgtcctaaatgggaaggtcgacgccttttgcggaggatctatcgttaacgaaaagtggatcgtgacagccgcgcactgtgtggaaaccggagtgaagattacggtagtggctggcgaacacaatattgaagagactgaacataccgaacagaaaaggaatgttataaggatcattccccatcacaattacaacgccgccattaacaaatacaaccacgatatagctctgctagaactggacgaacccctcgtgctgaattcctatgtcaccccgatttgtatagctgacaaggaatacacaaacatcttcctaaaattcggctctggatacgttagcggttggggcagagtattccacaaagggagatcggcactggtccttcagtatctgcgggtgccccttgtagacagagctacttgtttgctttctactaaatttaccatctacaataacatgttttgtgcaggattccacgaggggggtcgtgatagctgtcaaggggactcgggcggacctcacgtgacggaagtcgaggggacctcgtttttaaccggtatcattagctggggtgaagagtgtgctatgaaagggaagtatggcatatacacgaaggtgtctcgctacgtcaactggataaaggagaagaccaagctgacc

SEQ ID NO: 2633 - DNA, 1383 bp, Artificial Sequence
  derived and/or modified sequence
atgcagagagtgaatatgatcatggccgagtcccctggcctcatcactatttgtctgctgggttacttgctcagcgcagaatgcacggtgttcttggatcacgagaatgccaacaagatcctcaaccggccgaagagatacaactccggaaaactcgaagaattcgtgcaagggaaccttgagcgcgagtgcatggaagagaagtgctcgttcgaagaggcccgcgaagtctttgaaaatactgaacggactactgagttctggaaacagtacgtcgacggtgaccagtgcgaatcaaatccgtgcctcaacggagggtcgtgcaaggacgacattaactcgtacgaatgttggtgcccgttcggttttgaagggaagaattgcgaactggacgtgacttgcaacatcaagaacggacggtgcgagcagttttgtaagaactcggctgacaataaggtggtgtgctcctgcaccgaggggtacagattggcggagaatcaaaagtcatgcgaacccgccgtcccgtttccgtgcggacgtgtttcggtttcgcagacctcaaagctcacgcgtgccgaaactgtgttcccagatgttgattacgtgaactccaccgaggcggaaaccatcctcgacaacattactcaaagcactcagtccttcaacgactttaccagggtggtgggtggggaagatgcgaaaccaggacaattcccttggcaagtcgtgctgaatggaaaggtcgatgccttctgcggcggctcaatcgtgaacgagaaatggatcgtcaccgctgcacactgtgtggagactggagtgaaaatcactgtggtggcaggggagcacaacatagaagaaacggagcataccgaacaaaagaggaacgtcatccggattatcccccaccacaactacaacgcagctattaacaagtacaatcatgacattgcgctcttggaattggatgagccgctggtgctgaatagctacgtcactccaatttgtatcgcagataaggagtatacgaatatctttctgaagttcggctcaggatacgtctctggatggggacgcgtgttccataaaggcaggagcgcactggtcctgcagtacctgcgcgtgcctctcgtggacagggcgacttgcctcctctcaaccaagttcacgatctataacaacatgttctgcgcgggatttcacgaaggcggacgcgattcctgtcagggagatagcggagggccgcatgtcactgaagtcgaaggtacttcgttcttgaccggaatcatctcctggggcgaggagtgtgccatgaagggaaagtacggcatctacaccaaggtgagcaggtatgtcaactggatcaaagaaaaaaccaaactgacc

SEQ ID NO: 2634 - DNA, 1383 bp, Artificial Sequence
  derived and/or modified sequence
atgcaacgggtgaatatgatcatggccgagagccccgggctaattacaatttgtctgctgggttacctgttgagtgctgaatgtaccgtgttcttggatcacgagaacgcaaataagatattgaatcggcctaaacggtacaacagtggaaagttggaagagttcgttcagggaaacctggagcgtgagtgcatggaagagaaatgtagttttgaagaagcccgtgaggtcttcgagaatacagagaggactactgagttctggaagcagtacgtcgacggagaccagtgtgagtctaacccatgtttgaatggaggctcatgtaaagatgacattaactcctacgagtgttggtgtcctttcggcttcgaaggaaagaactgcgagctggatgttacctgcaacattaaaaacggccgttgcgaacagttctgcaaaaattcagcagataataaggtagtgtgctcctgcaccgaaggataccgactcgctgaaaatcagaagagctgtgaacctgcagtccctttcccctgcggaagggtctccgtgagccagaccagcaagctcaccagggccgagactgtctttccggatgtggactatgtcaattcaaccgaggctgagaccattctcgacaacattactcagagtacacagtctttcaatgatttcacacgcgtagtaggtggggaggatgctaaacctggccagtttccctggcaggtagtcctcaacggcaaagttgatgctttttgtggcggatctatagttaacgagaagtggattgtaaccgcagctcactgtgtagagacgggcgtcaaaattacggttgtggccggcgagcacaatattgaggaaactgagcacacagaacaaaaacgaaacgttatccggataatcccacaccacaattataacgctgccattaacaagtataatcatgatatcgctcttctggagcttgatgaacccctggttctaaattcttacgtgacccccatatgcatcgctgataaggaatatacaaacatcttccttaagtttggttcaggatatgtttccggatggggtcgggtgtttcacaagggccgctctgcactcgtcctccagtacctgagggtgccactggtggaccgggccacctgcctgttgtccaccaagttcaccatttacaataatatgttttgcgccgggttccacgagggcgggcgcgacagctgccagggcgattcagggggaccccacgtgaccgaagtcgaaggaacgtcgttcctcaccgggattattagctggggcgaggagtgcgccatgaaggggaaatacggaatttatacaaaggtgtctcggtacgttaactggatcaaagagaagactaagcttaca

SEQ ID NO: 2635 - DNA, 1383 bp, Artificial Sequence
  derived and/or modified sequence
atgcaacgcgtgaatatgatcatggcagagagccccggtctgatcaccatatgcctgctgggatacctgctatccgcagaatgcacagtgtttttagatcacgaaaatgccaacaaaatcctcaacaggcccaaacgatacaattctgggaagctagaagaattcgtgcaaggaaatctggagcgcgaatgcatggaagaaaagtgtagcttcgaggaggcccgcgaggtctttgaaaataccgagcgtacgaccgagttctggaaacagtatgtggacggagaccagtgcgaatctaacccttgcctgaacgggggaagctgcaaagacgatatcaactcttacgagtgttggtgccccttcgggttcgaaggcaaaaattgtgagctcgacgtgacatgtaatattaaaaacgggagatgcgagcagttctgtaaaaactctgcagacaacaaggtcgtgtgctcttgcaccgaagggtatcgtctcgctgagaatcagaagtcatgcgagcctgccgtgccctttccctgtggtcgagtgagtgtcagccaaacctccaaactcacaagagcggagaccgtatttcctgatgtggattacgttaacagcactgaagcagagaccatcctggacaacatcacacagagcacgcagtcatttaatgatttcactagggtcgttgggggggaagacgcaaagcctggccagtttccatggcaagtcgtgcttaacggaaaagtggatgctttttgtgggggctcaatagtcaatgagaagtggattgtgactgccgcccactgtgttgagacaggcgttaagattacggtggtcgccggggagcataatattgaagagacagagcacacggaacaaaaacggaacgtgattcggatcatccctcaccacaactacaacgcggccattaataagtacaaccacgacatagctttgctcgaactggatgaacccctggttctcaactcctatgtgacccccatatgcatagccgacaaagaatataccaacatatttctcaaatttggctccggttacgtctcagggtgggggagagtgtttcacaagggtcggtccgccctggtgctccagtacttgagagtgcctttagtcgacagagcaacatgcctcctctctacaaagttcaccatttacaataacatgttttgtgccggtttccatgagggtgggagagattcctgccagggcgattcaggagggccccacgtcaccgaagtggagggtacctccttcctgactggtatcataagctggggcgaggaatgtgccatgaagggaaaatacggcatctacaccaaagtatctaggtacgtaaattggatcaaggaaaagactaagctaacg

SEQ ID NO: 2636 - DNA, 1383 bp, Artificial Sequence
  derived and/or modified sequence
atgcagcgagtgaacatgattatggccgaatcacctggactcattaccatatgtttgcttggttatctcctgtcagctgagtgcaccgtctttctggatcatgagaacgcgaacaaaatactcaatagacccaagcgatacaactcgggcaagctcgaagagtttgtgcaagggaatctggaaagagaatgcatggaagaaaagtgcagctttgaggaggcacgggaagtctttgagaacacggagcgcacgaccgaattttggaagcaatacgtggatggtgatcagtgtgaatccaacccttgtttgaatggaggctcatgcaaagatgacattaacagctacgaatgctggtgtccatttggctttgaaggtaagaactgtgaacttgatgtaacctgcaacattaagaatggtcgttgtgaacagttctgtaagaactcggcagataacaaggtcgtctgttcatgtactgagggttaccgtctggcagagaatcaaaagagctgtgagccggcagtgccgtttccttgtgggagagtgtcagtgtcccagacctccaagctcacgagagccgaaactgtctttccggatgtggactacgtgaactcgaccgaagctgaaaccatacttgacaatatcacccaaagcactcaatctttcaacgatttcaccagggttgtgggcggagaagatgcaaagccaggccagttcccgtggcaagtcgttctgaatggaaaggtggacgcattctgtggagggtcgatcgtgaatgagaagtggattgtcaccgcggctcattgtgtggagactggggtgaagattactgtggtcgccggagagcacaatatcgaggagactgaacacactgaacagaaacgcaatgtcataaggattatcccacaccataactacaatgcagccatcaacaaatacaaccacgacattgcactgctggagcttgatgagccgctcgtcctgaactcatacgtcactccaatctgtattgcagacaaagaatatactaacattttccttaagtttggatccggttacgtgagcgggtggggacgggtctttcacaagggtcgctcggcccttgtcttgcagtacctgagagtgcctttggtcgatcgggctacttgcctcctcagcaccaagtttactatctacaataacatgttttgtgcaggttttcatgaggggggacgggacagctgtcaaggggattcgggtggaccacatgtcaccgaagtggaaggtacgtccttcctcactgggatcatttcatggggggaagagtgtgccatgaagggaaaatacggtatatacactaaggtatcccgctatgtgaactggatcaaggaaaaaaccaaacttact

SEQ ID NO: 2637 - DNA, 1383 bp, Artificial Sequence
  derived and/or modified sequence
atgcaacgtgtaaatatgataatggcggaatcgccgggtttaataacgatatgtttactaggttatctattatcggcggaatgtacggtatttttagatcatgaaaatgcgaataaaatactaaatcgtccgaaacgatataattcgggtaaattagaagaatttgttcaaggtaatctagaacgagaatgtatggaagaaaaatgttcgtttgaagaagcgcgagaagtatttgaaaatacggaacgtacgacggaattttggaaacaatatgtagatggtgatcaatgtgaatcgaatccgtgtttaaatggtggttcgtgtaaagatgatataaattcgtatgaatgttggtgtccgtttggttttgaaggtaaaaattgtgaattagatgtaacgtgtaatataaaaaatggtcgatgtgaacaattttgtaaaaattcggcggataataaagtagtatgttcgtgtacggaaggttatcgtctagcggaaaatcaaaaatcgtgtgaaccggcggtaccgtttccgtgtggtcgagtatcggtttcgcaaacgtcgaaattaacgcgtgcggaaacggtttttccggatgttgattatgtaaattcgacggaagcggaaacgatattagataatataacgcaatcgacgcaatcgtttaatgattttacgcgagtagttggtggtgaagatgcgaaaccgggtcaatttccgtggcaagttgttttaaatggtaaagttgatgcgttttgtggtggttcgatagtaaatgaaaaatggatagtaacggcggcgcattgtgtagaaacgggtgtaaaaataacggtagttgcgggtgaacataatatagaagaaacggaacatacggaacaaaaacgtaatgtaatacgtataataccgcatcataattataatgcggcgataaataaatataatcatgatatagcgctattagaattagatgaaccgttagtattaaattcgtatgtaacgccgatatgtatagcggataaagaatatacgaatatatttttaaaatttggttcgggttatgtttcgggttggggtcgtgtatttcataaaggtcgttcggcgctagttctacaatatttacgtgtaccgctagttgatcgagcgacgtgtttattatcgacgaaatttacgatatataataatatgttttgtgcgggttttcatgaaggtggtcgtgattcgtgtcaaggtgattcgggtggtccgcatgttacggaagtagaaggtacgtcgtttctaacgggtataatatcgtggggtgaagaatgtgcgatgaaaggtaaatatggtatatatacgaaagtatcgcgttatgtaaattggataaaagaaaaaacgaaactaacg

SEQ ID NO: 2638 - DNA, 1383 bp, Artificial Sequence
  derived and/or modified sequence
atgcagagagtcaatatgataatggccgaatcgcctggccttatcacgatctgccttctgggatacctcctgagtgccgaatgtaccgtgttcttggatcatgagaatgcgaataagatcctgaaccggccaaagaggtacaactcgggaaagctcgaggagtttgtgcaggggaacctggagagagagtgcatggaggaaaagtgctcgtttgaggaagcccgcgaagtgttcgagaacaccgaacgcactaccgagttctggaaacagtacgtcgacggcgatcagtgtgaatccaacccatgcttgaatggtggatcatgtaaggatgatatcaactcatacgaatgctggtgccctttcggcttcgaaggaaagaattgcgaactggacgtaacctgcaacattaagaacgggagatgtgaacagttctgcaaaaattcggcagataacaaagtggtctgttcctgcactgaaggttaccggctggcagaaaatcaaaagagctgcgagccagcggtgcctttcccatgtggacgcgttagcgtcagccaaacttctaagctgactcgagccgaaaccgtgttccccgacgtggactacgtgaactccactgaagctgaaacgatcctcgataatatcactcaatccacccagtccttcaacgatttcacccgcgtggtgggaggagaggacgcaaagccgggtcaatttccgtggcaggtggtgctgaatggaaaagtcgacgcgttttgcggaggatcgatcgtcaacgaaaagtggatcgtgaccgcagcgcactgcgtggagactggcgtgaaaatcaccgtggtggcgggagaacataacatcgaggaaaccgaacatactgaacagaagaggaatgtcattaggattatcccgcaccacaactacaacgccgctatcaacaagtacaaccacgatatcgccctgctggagctcgacgaaccgctcgtcctcaacagctacgtgaccccgatctgcatcgccgacaaggaatacaccaatattttccttaaattcggatccggatacgtgtcgggatggggacgcgtctttcacaaggggcggtcagctctcgtgctccaatacctgcgcgtccccctggtggaccgggccacttgtctgctgagcacgaagttcaccatctataacaacatgttttgcgccggcttccatgagggaggcagagacagctgccagggtgactccgggggtccgcacgtcaccgaggttgagggcacttcgttcttgaccggcattatctcatggggagaagagtgcgctatgaaaggcaagtatgggatctacactaaggtgtcacggtacgtgaattggatcaaagagaaaacgaagctgact

SEQ ID NO: 2639 - DNA, 1383 bp, Artificial Sequence
  derived and/or modified sequence
atgcaacgggtgaacatgataatggccgaatcgccaggacttattactatctgtctgttgggctacctcctgagcgcagaatgtaccgtgttcttggatcatgaaaacgcaaacaagatcctcaatagacctaagaggtacaattccggtaagctggaagagttcgtccagggtaatcttgaaagagaatgtatggaagaaaaatgttctttcgaggaggcacgcgaagtattcgagaacaccgaaagaactaccgaattctggaagcaatacgtggatggcgatcaatgtgagtccaatccatgcctgaatggcggatcgtgtaaagacgatatcaacagctacgaatgttggtgtccatttggatttgagggaaagaactgtgaactcgatgtcacttgcaatatcaagaatggaagatgcgagcaattttgtaagaactccgcagacaataaagttgtgtgttcctgtactgaggggtaccggcttgcagagaatcagaagtcgtgcgagccagctgtgccttttccgtgtggtcgagtgtctgtctcccagaccagcaagttgaccagggccgaaaccgtctttcccgatgtggattacgtgaactcgactgaagccgaaaccattctggataacatcacccagtccacccagtcatttaacgatttcactcgggttgtcggaggagaggacgccaagcctgggcagtttccttggcaggtggtgctcaacggaaaagtggacgccttctgcggaggttccatcgtcaacgaaaagtggatcgtgactgcggcgcactgtgtcgaaactggtgtgaagatcactgtcgtggccggtgaacataacattgaggaaaccgagcataccgaacaaaagcggaacgtcattcggattattccacatcataactacaatgccgctatcaacaagtacaaccatgatatagctctgctcgagcttgatgaacctctcgtcctcaattcctacgtgactcctatttgcattgcagataaggagtacaccaacatatttcttaagtttggttcgggatacgtgtccggatggggacgggtctttcataaagggaggtccgcactcgtgctgcaataccttcgcgtgcccctggtggatcgcgcaacttgtctgctcagcaccaagtttaccatctacaacaacatgttctgtgccggatttcatgaaggggggcgggactcctgccagggtgattcaggtgggccacacgtgactgaggtggaaggcacttcttttttgacggggatcatttcatggggagaagagtgcgcaatgaaggggaagtacggtatatacactaaggtgagccgatatgtgaattggatcaaggaaaaaactaagctgacc

SEQ ID NO: 2640 - DNA, 1383 bp, Artificial Sequence
  derived and/or modified sequence
atgcaaagagtgaatatgatcatggcggagtcgccgggtttgatcactatttgtctgctcggatacctgctttcagcggagtgcaccgtctttctggatcacgaaaacgcaaacaaaatcctcaatcggccgaaacgctacaattccggaaagctggaggaattcgtgcaagggaaccttgagcgggaatgtatggaggaaaagtgctcgttcgaggaagcacgggaagtctttgagaacactgaacggactaccgaattctggaagcaatacgtcgacggtgatcagtgcgaatccaacccgtgcctcaacggtggttcgtgtaaggacgatatcaactcatacgagtgctggtgcccattcggattcgaaggaaagaattgcgaactggacgtgacctgtaacatcaagaatggacggtgcgagcagttctgcaaaaactccgcagacaacaaggtggtgtgctcctgtactgaaggctaccgcctcgcagaaaaccagaagagctgcgagcccgctgtgccctttccgtgtggacgcgtgagcgtgagccagacctccaagctgacgcgcgcggagactgtgtttccggatgttgattacgtcaactcgaccgaagcagaaaccattctggataacattacccagtcgacccagtccttcaatgatttcacccgcgtggtgggaggagaggacgcgaaaccaggacaattcccctggcaggtggtcctcaatggaaaggtggacgccttctgtggcggatcgatcgtgaacgagaaatggattgtgactgctgctcactgcgtcgaaaccggcgtcaaaatcaccgttgtggcgggagagcacaacatcgaagaaactgaacacaccgagcagaagcgaaacgtgatcagaatcattccgcatcataactataatgcggcgatcaacaagtataatcatgatattgcccttttggaactcgatgaaccgctggtgctgaattcatatgtgactccgatatgcatcgccgacaaggaatacactaacatcttcctgaagttcgggtcaggatacgtgtcaggctgggggcgggtctttcataagggccggtcagcgttggttctgcaatacctccgcgtgccactggtggaccgggctacctgcctgctgtcaactaagttcactatctacaacaacatgttttgcgcagggttccatgaaggagggcgggactcgtgccaaggtgactcgggaggaccgcatgtgaccgaagtggaggggacctcatttctcaccggaattatctcctggggcgaagagtgtgccatgaaaggcaaatatggaatctacactaaggtatcacggtacgtgaattggatcaaggaaaagaccaagctcacg

SEQ ID NO: 2641 - DNA, 1383 bp, Artificial Sequence
  derived and/or modified sequence
atgcagcgggtgaacatgataatggccgagtcgccaggccttatcactatctgcctcctgggatacctgctttcagccgaatgtaccgttttcctcgatcatgaaaacgcaaacaagattctgaaccgacctaagcgatacaattcggggaagctcgaagaattcgtgcagggaaatctggagcgggagtgtatggaagagaaatgctcattcgaggaagcacgcgaagtctttgaaaataccgaaagaactactgagttttggaagcaatacgtcgatggcgatcagtgcgagtccaacccgtgtctcaatggaggctcctgtaaggacgatatcaacagttatgaatgttggtgtccctttggttttgaaggtaagaactgtgaactggacgtgacctgcaatatcaagaacggtagatgtgaacaattctgtaagaactccgcggataacaaagtagtgtgcagctgtactgagggttataggctggccgaaaatcaaaagtcctgtgaacccgcagtgccttttccatgcggacgcgtgtcagtgagccaaactagcaagctgactcgcgcagaaacggtctttcccgatgtggattacgtcaactcgaccgaagcagaaaccatactggataacatcactcaatcaacccaaagtttcaacgactttaccagggtggtgggaggtgaagatgcaaagccaggccagtttccctggcaagtggtgcttaacgggaaagtagatgcattttgtgggggttctatagtcaatgagaaatggattgtgaccgctgcgcactgcgtcgaaacgggggtcaagatcactgtggtcgcaggagaacataacattgaagaaaccgaacataccgagcaaaaacgcaacgttattcgtattatccctcaccacaactacaatgcagcaatcaacaagtacaatcacgacattgcccttcttgaacttgacgagcctctggtgctcaattcgtacgtgactccaatttgtatagcggacaaggagtacacgaacatttttcttaagtttggaagtggatacgtctccgggtggggacgcgtctttcataaaggtcggagcgccctcgtgttgcagtacctgagagtgcctctggtcgacagagctacctgtctgctgagcaccaagtttactatttacaataacatgttctgcgcgggattccatgagggtggtcgcgatagctgtcagggagattcaggaggtccacatgtcaccgaagtggaggggacttccttcctgacgggtatcatctcatggggagaagagtgcgccatgaaggggaaatacggcatttacactaaggtgtcccgatacgttaattggattaaagaaaagactaaacttacc

SEQ ID NO: 2642 - DNA, 1383 bp, Artificial Sequence
  derived and/or modified sequence
atgcaaagggtgaatatgattatggctgaaagccctggactcataaccatctgcttgctggggtaccttctcagcgccgagtgtactgtgtttctagatcacgagaacgccaataaaatattgaatagacctaagagatataacagcggtaaactggaagagtttgtacagggaaaccttgagcgcgaatgtatggaggaaaaatgcagtttcgaagaagcccgagaagttttcgagaacaccgagcgaacaacggaattctggaagcagtatgtggatggagaccagtgcgagagcaacccctgtctgaacggaggtagctgtaaggacgacatcaattcctacgaatgttggtgtccatttggcttcgaaggaaagaattgcgaattagacgtgacatgtaacataaagaatggcagatgcgaacaattctgtaaaaactcagctgacaacaaggtggtgtgcagctgtaccgagggctaccggctggcggaaaaccagaagagttgtgaaccagccgtaccgttcccctgcggacgggtatcggtgtcccagacatccaaacttacacgtgctgagacagtgttccccgatgtcgattatgtaaactctaccgaggccgagactatcctggataacataacgcagtcaactcagtccttcaatgactttactcgcgtggtgggaggagaggacgccaaaccagggcagttcccctggcaggttgtgctgaacggcaaggttgacgctttctgcggagggagtatagtcaatgaaaaatggatcgtgacagcagctcattgtgtggaaactggcgtgaaaattacggttgttgcgggagagcataatattgaggaaaccgagcacacagaacaaaagcggaacgtgattcgaatcattccccatcacaattacaatgcagccattaacaaatataaccacgacatcgcgctcctcgagctagatgagccattggtgttaaactcttacgtgacacccatctgcatagctgataaagagtacactaacatattcctgaagttcgggtctgggtacgtgagcgggtggggcagggtattccacaaagggaggtccgccctggtgctgcagtatctccgagtgccactcgtggatcgagctacgtgcctccttagcaccaagttcactatttacaacaacatgttttgtgcgggctttcacgagggaggaagagactcgtgccagggcgactctggaggtcctcatgtgacagaggttgaaggcacgtctttcctgacagggattattagctggggggaggagtgtgcaatgaagggaaagtatgggatctacacgaaagtgtctcggtacgtgaactggataaaggagaagaccaagttaacc

SEQ ID NO: 2643 - DNA, 1383 bp, Artificial Sequence
  derived and/or modified sequence
atgcagcgcgtaaatatgattatggctgagtctccggggctgattacaatttgcttgctcggttatttgttatccgcagaatgcacggtgtttcttgatcatgagaacgcaaataagattctgaatcggccgaagagatacaattcaggcaagttagaagaatttgttcaaggtaatcttgaaagagaatgtatggaagaaaaatgttcatttgaagaagctcgggaagtatttgagaacacagagcgaactaccgaattctggaaacaatatgtcgacggcgaccaatgtgagtctaatccatgcctgaatggtggttcgtgtaaagacgacattaacagctatgagtgttggtgtccgttcggtttcgaagggaaaaactgtgaactggacgtcacctgtaatattaaaaatggcagatgcgaacagttttgtaaaaatagcgcagataataaagttgtttgctcttgtacagaagggtaccgattggcagagaaccaaaaatcctgtgagccggcggtgccgttcccttgtggccgcgtgagcgtctctcagacttctaaactcacaagagcagagacagtgttcccggatgtcgattatgtaaatagtacagaagctgaaacaatcctggataatattacccagtcaacacagagctttaatgattttacgcgcgtcgtggggggcgaggacgctaaaccaggccaattcccgtggcaggttgtacttaacggaaaagttgacgcattttgcggcgggagcattgtcaacgaaaaatggatagtcacggctgctcactgcgtagagaccggagtgaaaattacagtggtagcgggcgagcacaatattgaagaaacagagcataccgaacaaaaaagaaacgtgattcgtatcatcccgcatcataactataatgccgccattaataagtacaatcatgatatcgccttactcgagcttgatgaaccgcttgttctgaactcctatgtaacgcctatatgcatcgctgacaaagagtacacaaatatcttccttaaatttggaagcggatatgtcagcggctggggacgggtttttcataaaggccgttcagctcttgtcctccagtacctgagggtaccacttgtcgacagagcaacatgtcttctttcaaccaaatttacgatctacaataacatgttttgcgcgggattccacgaaggcgggagagactcatgccaaggagattctggagggcctcacgtgacagaagtggaaggcacaagctttctgacaggaataatttcctggggtgaagaatgtgcgatgaaaggaaaatatggtatatacacaaaagtgtctcggtatgtgaattggatcaaagaaaaaacaaaacttacc

SEQ ID NO: 2644 - DNA, 1383 bp, Artificial Sequence
  derived and/or modified sequence
atgcagcgggtcaatatgatcatggcggaaagcccgggtcttatcacgatctgtctgttgggctacctgctcagcgctgaatgtaccgtgttcctggaccacgaaaatgccaacaagattctgaaccggccaaaaagatataactcggggaagttggaagaattcgtgcaagggaatcttgaaagagaatgcatggaggagaaatgttcgttcgaggaggccagggaagtgttcgaaaacactgaacggaccactgaattttggaaacaatacgtcgacggcgatcagtgcgaaagcaacccctgcttgaacgggggctcttgcaaggacgacattaactcgtacgaatgctggtgtcccttcgggtttgaaggaaagaattgcgagctggacgtcacgtgcaatatcaaaaatggaagatgcgagcaattttgcaagaacagcgctgacaataaggtcgtgtgctcctgcacggagggataccgactcgcagagaatcaaaaatcgtgtgaaccggcggtgccatttccatgcggccgggtgtccgtgtcacagacctcgaagctcactcgggctgaaactgtgttcccggatgtggactacgttaatagcactgaagccgaaactatcttggataacattacccagagcactcagagcttcaacgatttcactcgggtggtgggaggggaggatgcaaagcctggacagttcccgtggcaggtggtgcttaacggcaaggtggatgctttctgcggcggatccatcgtcaacgagaaatggattgtcacggcagcacattgcgtcgagactggcgtcaagatcactgtcgtggcaggagaacacaacatcgaggagacggagcacaccgaacagaagcgaaatgtgatcagaatcattcctcatcacaattacaacgcggccatcaataagtacaaccacgacattgcgcttctggagctcgacgaaccactggtgctgaacagctacgtgacgccgatctgcatcgccgacaaagagtacaccaacatcttcctcaagtttggttccggatacgtttcgggatgggggcgggtgttccataagggccgctccgcactcgtcttgcaatacctgcgagtgccgctggtggatcgtgctacctgcctgctttcgaccaagtttacgatatacaataacatgttctgcgccggctttcatgagggagggagggattcctgtcagggagactcaggaggaccccatgtgacggaggtggaggggacttcatttttgaccggaatcatctcttggggcgaggaatgcgccatgaaaggaaagtatggcatttacaccaaggtgtcacggtacgttaactggatcaaggaaaagactaagctgact

SEQ ID NO: 2645 - DNA, 1383 bp, Artificial Sequence
  derived and/or modified sequence
atgcagagggtgaacatgataatggcagaatcccctggtctgatcaccatatgtttgctgggatacctcctgagcgcagaatgtaccgtttttctggatcacgaaaacgcaaataagattctcaaccgccctaagaggtacaatagcggaaaacttgaggagtttgtgcagggcaatctggaacgtgaatgtatggaagagaagtgttcatttgaagaagcgagggaggtgtttgaaaacacggaaagaactactgaattttggaaacaatacgtggatggagatcaatgcgaatcgaacccgtgtctcaacggtggaagctgcaaagatgacattaactcgtacgaatgttggtgtccatttggattcgaggggaagaactgtgaacttgacgtcacgtgtaatatcaagaatggccgctgtgagcaattttgtaaaaactcggctgataacaaagtcgtgtgctcgtgtaccgaaggttacaggctcgcagagaatcagaagagctgtgaacccgctgtgccattcccatgcggaagagtgtccgtctcgcaaacttcgaaacttactcgggcagaaactgtattccctgatgtcgactacgtcaactctactgaagcagaaaccatccttgacaacataactcagtcgacccagtcgttcaacgactttactagggtggtgggaggggaagatgcaaagcctgggcaattcccatggcaagtagttctgaacggaaaagtggacgcattttgcggtggaagcattgtgaacgagaagtggatcgtcaccgcagctcattgcgtggaaacgggagtgaagattaccgtcgtggccggcgagcataacatcgaggagactgagcacactgaacagaagcggaacgtgattcgcatcattccccaccataactacaatgcggctatcaataagtataatcatgatatcgcgctcctcgaacttgacgaacccttggtgctgaactcctacgtcacccctatttgcatcgcagacaaagaatacaccaacatattcctgaagtttggttcgggctacgttagcggttggggccgtgtctttcataagggaaggtccgccctcgtgcttcaataccttcgggtgccactcgtggaccgggcaacttgccttctgtccaccaagttcactatttacaacaacatgttttgcgcaggatttcatgaaggcggtagagactcttgtcaaggggatagcggaggacctcacgtgactgaagtggaagggaccagtttcctcactggcatcataagctggggggaagagtgtgcaatgaaaggcaaatatggaatttacaccaaggtgtcgcgctacgtcaattggattaaagagaaaaccaagctcacc

SEQ ID NO: 2646 - DNA, 1383 bp, Artificial Sequence
  derived and/or modified sequence
atgcaacgcgtgaacatgatcatggcggaatccccggggctgattacgatctgccttctcggttacctgctttcggcagagtgtaccgtgtttttggatcacgaaaatgcgaacaaaatccttaaccgcccaaagaggtataacagcgggaagctggaagaatttgtgcaaggcaaccttgagcgggagtgtatggaagaaaaatgttcgttcgaagaagcaagagaggtctttgaaaatacggaaagaactaccgaattctggaagcagtacgtggacggcgaccaatgtgagtcgaacccttgcttgaacggggggtcgtgcaaggatgatatcaattcttacgagtgttggtgtccctttggtttcgaaggtaaaaactgcgaactcgatgtgacttgcaacatcaaaaacggacggtgtgaacagttctgcaagaactccgcggacaacaaggtggtctgttcatgtactgagggctaccggcttgcagagaatcagaagtcgtgtgagcctgcggttccgtttccgtgcggtagagtgtcagtgtcacaaacctcaaagctcactagagctgaaaccgtgtttcctgatgtggattacgttaattccactgaggcagagactatactggataacattactcagagtacgcaatcctttaacgacttcactcgcgttgtgggtggtgaagatgcgaagcccggacaatttccatggcaggtggtgcttaatggtaaagtcgatgcgttctgtgggggatccattgtcaacgaaaagtggatcgtcaccgccgcgcattgtgttgaaactggagtgaagattaccgtggtggcaggagaacacaatattgaagagactgaacataccgagcagaaacggaatgttatcagaatcatcccccatcataactacaacgcagcaatcaataagtacaatcacgatattgccttgctcgagctggacgaacctcttgttctgaactcctacgtcacccccatttgcattgctgacaaggaatataccaacattttcctcaaatttggttcaggctacgtgtcgggttggggtcgagtctttcacaaaggccgttcagccctggtgctccagtacctgagggtgccactggttgacagggccacgtgcctgctgtccactaagttcaccatttacaataacatgttttgcgcaggttttcatgaggggggaagagattcctgtcaaggagactcaggtggtccacatgtgactgaggtggaaggaacttcgtttcttaccgggatcatttcatggggagaagaatgtgctatgaaaggtaaatacggaatttacaccaaggtgagcaggtacgtgaactggattaaggagaaaaccaagctgacc

SEQ ID NO: 2647 - DNA, 1383 bp, Artificial Sequence
  derived and/or modified sequence
atgcagcgcgttaacatgattatggctgagtctccaggcctcataactatctgcttgctgggctacctgctctcagcagagtgcacagtgtttctggatcacgaaaatgctaataagattctcaaccgcccaaaaagatataactccggaaagctcgaggagttcgttcaggggaacctggagcgcgaatgcatggaagagaaatgcagtttcgaggaggctcgcgaggtattcgaaaacaccgagaggaccaccgagttctggaagcagtatgttgatggagatcagtgcgaatccaacccttgcctgaacggcggatcctgcaaagacgacatcaactcttatgagtgctggtgcccttttggtttcgaaggaaagaattgcgaactggatgtgacctgcaacatcaaaaacggtcgctgcgaacagttctgtaagaactccgccgataacaaagtggtctgctcctgcacagagggatatcggctcgcagaaaaccaaaaatcctgtgagcctgctgttccatttccatgtggccgagtctccgtgagccagacatccaagcttacaagagccgaaaccgtctttccagatgtcgattacgtcaactcaaccgaggccgagaccatcttggataacataactcagtccacacaatcttttaatgacttcacacgggtagtgggcggcgaggacgctaagcccggacagtttccctggcaggtggtcttgaatgggaaggtggacgccttttgtggaggcagtatcgtcaacgagaaatggatcgtgaccgcagcgcactgcgtcgaaaccggggtgaaaataacagttgtcgccggagaacacaacatagaggagaccgagcacaccgaacagaaaaggaacgtcatacgcatcattccacaccacaattacaacgcagccattaacaagtacaatcacgacatcgcattgctcgagctggatgagcctctcgtgctgaattcatatgtgactccaatttgtatcgcggataaggagtacacgaacatctttctcaagtttggaagcgggtacgtaagtggatggggtagagtgttccacaagggaagaagcgcactcgtgttgcagtacctgcgcgtaccacttgtcgacagagccacgtgccttctgtctacaaaattcactatctacaacaatatgttttgtgccggattccacgagggcgggagggattcttgccagggtgattcaggtggaccacatgtgacagaggtggagggcacctcctttctgaccggaattatctcatggggggaagagtgtgcaatgaaaggcaaatatggaatctacacaaaggtgtccaggtacgttaattggataaaggagaagactaagctgact

SEQ ID NO: 2648 - DNA, 1383 bp, Artificial Sequence
  derived and/or modified sequence
atgcaacgggtgaacatgatcatggctgagtcgcccgggctgatcacgatctgcctgctggggtacctcctttcagccgaatgtactgtgtttctggatcatgagaatgctaacaaaatcttgaaccgccctaagcgctacaactcagggaagctggaagaattcgtgcaaggaaacctcgagagagaatgcatggaagagaagtgctcttttgaagaggcgcgcgaagtgttcgaaaacaccgagagaaccaccgaattctggaaacagtacgtggacggtgaccaatgcgagtccaacccgtgcctgaacggaggctcgtgcaaagatgacatcaacagttacgaatgttggtgcccattcggattcgaaggtaagaactgtgaactggacgtgacttgcaacatcaaaaacggtcggtgcgaacagttttgcaagaattcagccgacaataaggttgtctgttcgtgtactgagggatatcggctggctgagaaccagaaatcctgtgagccagccgtgccgttcccgtgcggccgcgtgtctgtgtcccagacgagcaaacttactcgcgccgaaaccgtgttcccggacgtggactacgtgaacagcaccgaggctgaaactatcctcgacaacattactcaatcaacccagtcgttcaacgactttacccgagtggtgggaggagaagatgcgaaacctggacagttcccttggcaagtggtcctcaacggcaaggtcgacgcattctgcggggggtcgatcgtgaacgaaaagtggatcgtgaccgcggctcattgcgtggaaactggagtgaagatcactgtcgtagcgggagaacacaacatcgaagagacggaacatactgaacagaaacgcaatgtcatccggatcatcccgcaccacaactacaatgccgccatcaacaagtacaaccatgacatcgcattgctcgaactggacgagcccctggtgctgaactcgtatgtcacccctatctgtatcgcggataaggagtacactaacatttttctgaagttcgggtcaggatacgtttcgggatggggccgcgtctttcacaaggggcggtccgccctcgtgctgcaatacttgcgcgtaccattggtggatagggccacttgccttcttagcaccaagttcaccatctacaataacatgttctgcgccggattccacgaaggtgggagagactcttgccagggagactcaggaggcccccatgtgactgaggtcgagggaacttcgtttctcaccggcatcatctcatggggcgaagaatgcgcaatgaagggcaagtatgggatctatactaaggtttcgaggtacgtgaattggattaaggaaaagaccaaacttacc

SEQ ID NO: 2649 - DNA, 1383 bp, Artificial Sequence
  derived and/or modified sequence
atgcagagggtcaacatgatcatggccgaatcgcccggcctcatcactatctgcctgttgggctacttgctgtcggcagagtgcaccgtctttctggaccacgagaacgccaataagatcctgaaccggccgaaacggtataactcaggcaaactggaggaattcgtccaagggaacctcgaaagggaatgcatggaagagaaatgtagcttcgaagaagcccgagaagtgttcgagaacacggaacgcaccactgagttctggaaacagtacgttgacggagatcagtgcgagtcgaacccgtgcctgaatggtgggtcatgtaaagatgacatcaacagctatgaatgttggtgtccgtttggattcgaaggaaagaattgcgaacttgatgtgacctgcaacatcaaaaacgggagatgtgagcagttctgtaagaatagcgcagacaataaagtcgtttgctcgtgcactgagggataccggctcgccgaaaaccaaaagtcgtgcgaaccggccgtgccgtttccttgcggaagagtgtccgtgagccaaactagcaagttgacccgggcagaaactgtgttcccggatgtcgactatgtgaattcgacggaagcggaaaccatccttgacaatatcacgcaaagcacgcagtccttcaacgacttcactcgcgtggtcggaggcgaagatgcaaaacctggacaatttccatggcaggtggtcctcaacggaaaggtggacgcgttttgtggaggttcaatcgtgaacgaaaagtggatcgtgactgcggcccactgtgtggaaactggcgtcaaaatcactgtcgtggcgggcgagcacaacatcgaggaaaccgagcatactgagcagaagcgcaacgtcattcggatcatccctcaccataactacaacgcggcgatcaataagtacaaccacgatatcgccctcctggaattggacgagccccttgtcttgaactcctacgtcacccctatctgcatcgccgacaaggaatacaccaatatcttcctgaagttcggctcgggatacgtgagcggctggggccgcgttttccataaagggagatcggcgctcgttctccaatacctgagggttcctttggtggaccgcgctacctgcctcctgtcaactaagttcaccatctacaacaacatgttctgcgcgggcttccacgaaggaggacgcgatagctgtcagggagattccgggggtccacacgtgactgaggtcgagggcacctccttcctgaccggaatcatctcatggggcgaggagtgtgccatgaaaggcaagtacggcatctacactaaggtgagccgctacgtcaactggattaaggaaaagactaaacttact

SEQ ID NO: 2650 - DNA, 1383 bp, Artificial Sequence
  derived and/or modified sequence
atgcagcgcgtgaatatgatcatggctgagtctccgggtcttatcacgatctgtctcctgggatacctgctgtccgcggagtgtacggtgtttctggaccacgagaacgccaataagatcctcaatagaccgaagagatacaactcaggaaagctcgaggagtttgtccagggaaatttggagcgggaatgtatggaagagaagtgcagcttcgaagaagcaagagaagtgttcgagaacaccgagcggactactgaattctggaaacagtatgtggacggtgaccagtgcgaatctaacccgtgtctcaacggcggatcatgcaaggacgacattaactcctacgaatgctggtgcccgtttggattcgaggggaaaaactgtgaactggacgtgacttgcaacatcaagaacggcaggtgtgagcagttctgcaaaaactcagcagataacaaagtggtctgctcatgcaccgagggataccgccttgccgaaaatcaaaagtcgtgcgaaccggccgtccctttcccgtgcgggagggtgagcgtgtcgcagacgagcaagctcacccgcgccgaaaccgtgttccctgatgtggattacgtgaattcgaccgaagcggaaaccattctcgataacatcacgcaaagcacccagtcattcaatgacttcacccgggtggtgggcggggaggacgcaaaacctgggcagttcccttggcaagtggtgttgaacggaaaggtcgacgcgttctgcgggggatcaatcgtcaacgagaaatggatcgtgacggcagcccattgtgtggaaactggagtgaagatcaccgtggtggctggagagcacaatatagaagaaaccgagcatactgagcaaaagcgcaacgtcattcgcataattccccatcacaactacaacgcggcaatcaacaagtacaatcacgacatcgcgttgctggaactggatgaaccactggtgttgaattcgtacgttactcccatctgcatcgctgataaggaatataccaatatctttttgaaattcggcagcggttacgtcagcggatggggacgcgtgttccataaaggcagatcggccctggtcctgcagtacctgcgggtgccactggtcgacagggccacctgtttgttgagcaccaagttcactatctacaataacatgttctgcgcggggttccatgaaggaggtagagactcctgccagggagactcgggcggaccgcatgtgactgaggtggaagggacgagctttctcaccggaatcatttcgtggggagaagagtgcgcgatgaagggcaaatatggaatctacactaaagtctcacgctacgtgaactggatcaaggaaaagactaagctgacc

SEQ ID NO: 2651 - DNA, 1383 bp, Artificial Sequence
  derived and/or modified sequence
atgcaaagagtgaacatgatcatggcggaatcaccaggattgatcaccatctgcctcctcggctacctgctttcggcagagtgcactgtctttctcgaccatgagaacgcaaacaaaatcctcaatagaccaaagcggtacaactctggtaaattggaagaattcgtgcagggtaatctggagcgcgagtgcatggaggaaaagtgctcattcgaggaggcccgcgaagtgtttgaaaacactgaacggactaccgagttctggaagcagtacgtggatggcgaccagtgcgagtcaaatccttgcctcaacgggggctcctgcaaggacgatatcaattcctacgagtgctggtgcccgttcggattcgaaggcaagaactgcgagctcgacgtcacttgtaacatcaaaaacggaaggtgtgaacagttctgtaagaacagcgccgacaacaaagtagtgtgcagctgtaccgaaggatacagactggcggaaaaccaaaagtcatgcgagccagccgtgccatttccgtgtggtcgcgtgtcggtgagccagacgtctaaactgacccgggccgagactgtgttccccgacgtcgattatgtgaacagcaccgaggcagagactatcttggacaacatcactcaatccactcagagcttcaacgactttactagggtcgtgggaggcgaggacgcaaagccgggacagttcccgtggcaagttgttctcaacggaaaggtggatgcgttctgcggaggatcaatagtgaatgaaaagtggatcgtgaccgccgcacactgtgtggaaaccggcgtcaagataaccgtcgtcgccggagagcataacattgaagaaactgaacacactgaacagaagcgcaacgtcattcgcatcatcccgcaccacaattacaacgcggccatcaataagtacaaccatgatattgctctgctggaactcgacgagccgctcgtgctgaactcctacgtcaccccgatctgcatcgctgataaggaatacacgaacatcttcctgaaatttggctcagggtacgtgtctggctggggccgggtctttcacaaagggcgcagcgcgttggtcctgcaatacctgcgcgtgcccctggtggatcgcgccacctgtctgttgagcactaagttcactatttacaataacatgttctgcgcgggtttccatgaaggaggacgggactcctgccagggggattcaggaggtccccacgtcaccgaagtggaaggaacctcgtttctgacgggcatcatttcttggggagaggagtgtgccatgaaagggaagtatggaatctacactaaagtgtctcgctatgtgaattggatcaaggagaaaaccaaactgacc

SEQ ID NO: 2652 - DNA, 1383 bp, Artificial Sequence
  derived and/or modified sequence
atgcagagggtcaacatgataatggcagagagcccaggactcatcaccatctgccttttgggctacttgctgtctgcagagtgtactgtgttcctggaccacgagaatgcaaataagatcctcaaccgccctaagaggtataattctgggaagctagaagagttcgtgcagggcaatcttgaaagagaatgcatggaggagaaatgtagtttcgaggaagcccgcgaggttttcgagaacacggaacgcactactgagttctggaaacagtatgtggacggagatcagtgtgagtctaacccctgtttgaacggcggctcttgcaaggatgacattaattcgtatgaatgttggtgcccgtttggcttcgaagggaaaaattgtgagttggatgtgacctgtaacattaagaacgggaggtgtgagcagttttgtaaaaattctgccgacaataaagtcgtctgcagttgcaccgaaggttacagactggccgaaaatcagaagtcctgcgaacctgctgtcccttttccttgtggcagagtaagcgtgtcacaaacctccaaacttactcgcgccgaaaccgtcttcccagatgttgattatgtgaattccacagaggccgaaacgattcttgacaacattacacagtcaactcagtccttcaacgatttcactcgtgtagtgggaggggaggatgcaaagccggggcagttcccttggcaggtcgtccttaatggtaaggttgacgcattctgcgggggaagcatcgtcaatgagaagtggatcgtgacagcagcccactgtgtcgaaactggcgttaaaatcacagtggtagccggtgaacacaatattgaagagactgagcatactgagcagaagcggaatgtgatccgaattataccgcaccataactataacgcggcaatcaataagtacaatcatgatatagcactactggaactggatgagccattggttttaaactcttacgtcacccccatttgcatagctgataaggagtataccaacatcttcctaaaattcggcagcgggtatgtgagtggctggggccgggtcttccataagggccgatctgctctggtgcttcagtaccttcgcgtccccctggtcgacagggccacttgcttgcttagcactaagtttacaatttacaataacatgttctgtgctggatttcatgagggcgggcgcgactcctgtcagggagatagcgggggccctcacgtgaccgaggtagaaggcaccagctttttgaccggtatcatcagttggggcgaagagtgtgctatgaaaggaaaatacgggatctacacaaaagtatctaggtatgtgaattggatcaaggagaagacgaagctcact

SEQ ID NO: 2653 - DNA, 1383 bp, Artificial Sequence
  derived and/or modified sequence
atgcagcgtgttaacatgatcatggccgaatctcccggtctaattacaatttgcttgctcggctacctcctgtccgccgagtgcaccgtcttcctcgatcatgagaacgctaacaagatcctgaaccgtcccaaacgttacaactcaggcaagcttgaggagttcgtccagggtaacctggaacgtgaatgtatggaggagaagtgcagttttgaggaggcccgtgaagtcttcgagaacaccgaacgcacgacagagttctggaagcagtatgtggacggtgatcagtgcgagtccaacccctgtctgaatggtgggtcatgtaaagacgacatcaactcttacgaatgctggtgcccgtttggtttcgaagggaagaactgtgagctcgacgtcacttgcaacatcaagaacggtcgttgtgaacagttctgcaagaacagtgccgacaacaaagttgtctgctcctgtacggaggggtatcgcctggccgaaaatcagaagtcctgcgaacctgcggtcccctttccctgtggtcgggtcagcgttagccagacaagcaagcttacccgtgccgaaaccgtctttcctgacgtcgactatgttaactccaccgaagcagaaaccatcttggacaatatcactcaaagcacccagtcattcaacgactttacgcgtgtagtcggcggcgaggacgctaagcccggacagtttccgtggcaggttgttttgaatggtaaggtcgatgcattttgtgggggatcgattgttaacgagaagtggatcgtgactgcggctcactgcgtagagaccggcgtcaagatcactgtcgttgccggcgagcacaacattgaggagactgagcataccgaacagaagcgcaacgtcatccgtatcatccctcaccacaattataacgctgctatcaacaagtataaccacgatatcgctttgctggagctggacgagcctctggttctaaacagctacgtcacccctatctgcatcgcggacaaggagtacacaaacatcttcctcaagttcgggtcgggttacgtcagcggttggggtcgtgtctttcataaggggcgtagcgcccttgtgcttcaataccttcgtgtccctctcgtggatcgcgccacgtgccttctctcgactaagttcactatttacaacaatatgttctgtgcgggattccacgagggcggccgagacagttgccagggcgactcaggtggtcctcacgtcaccgaggtcgaggggacctctttcctgaccggcataatctcatggggcgaagaatgcgcaatgaagggcaagtacggcatttatactaaggtgagtagatatgtcaattggattaaggagaagaccaagttgacc

SEQ ID NO: 2654 - DNA, 1383 bp, Artificial Sequence
  derived and/or modified sequence
atgcagcgcgtgaacatgattatggccgagtctcccgggctgattactatttgtttgcttggctatctactctcagccgagtgcaccgtcttcctcgatcacgagaatgcaaataagatccttaatcggcccaagaggtacaattcaggcaagctcgaagaattcgtgcagggtaacctcgagagagaatgtatggaggaaaagtgttcctttgaagaggcacgggaggtgtttgagaacactgagaggacaacggaattctggaagcagtacgtggacggggatcagtgtgagtctaatccttgcctcaatgggggctcgtgcaaggatgatatcaattcatacgaatgttggtgtccatttggatttgaaggcaaaaactgtgaacttgacgtaacatgcaacataaaaaacggacgatgcgaacagttttgcaagaatagtgccgacaacaaagtagtttgctcctgtacggagggttacagattagcggaaaatcagaaaagttgtgagcctgctgttcctttcccttgtggacgcgtcagcgtgtcccagacctctaagctcactagggccgagacggttttccctgacgtggattatgtgaattccactgaggccgagaccatactggacaacatcacacagagtacccagtctttcaacgactttactagggtcgtgggtggggaagacgccaagcctggccagttcccatggcaggtggtcctaaatgggaaggtcgatgctttctgtgggggctccatagtgaatgagaagtggatcgtgactgcagcacattgtgtcgaaactggcgtgaagatcaccgtggtcgctggagagcacaacatcgaggagacagaacacaccgaacaaaaacggaacgtgatcaggattataccccatcataactataacgcagctatcaacaagtacaaccatgacatagcactcctcgagttagacgagccacttgttctgaactcctatgtgaccccaatctgtatagccgacaaagaatacactaacatcttcctgaaattcggaagtggctatgtatctggatggggtagggtattccataaggggcgatcagcattggtactgcagtacctgagggtacctctggtggatcgagccacatgtcttctgtccaccaagttcactatctacaacaacatgttttgtgctggttttcacgagggaggaagagactcctgccagggggacagtggcgggcctcacgtgaccgaggtcgagggaacctcattcttaactgggattatctcttggggtgaggaatgcgctatgaagggaaaatatggcatttacacaaaagtcagtcgctatgtaaactggatcaaagaaaaaacaaagctgaca

SEQ ID NO: 2655 - DNA, 1383 bp, Artificial Sequence
  derived and/or modified sequence
atgcaacgcgttaatatgatcatggccgaatctcccggcctcatcactatctgtctcttggggtatctgctctccgcggaatgcaccgtttttctcgaccatgaaaacgccaacaaaatcctcaaccggccaaagcggtataactcagggaaactcgaggagttcgttcagggtaacttggagagagagtgcatggaagagaagtgctctttcgaagaggctcgcgaggtatttgaaaataccgaacgcaccaccgaattttggaagcagtacgttgacggggaccagtgtgagagcaatccttgcctcaacgggggtagctgcaaagatgatatcaatagctatgagtgttggtgccctttcggattcgaggggaaaaactgtgagttggacgtcacctgtaacatcaagaatggccgctgtgaacagttctgcaagaatagcgccgataacaaggtcgtttgcagttgcacggaaggatatagactagccgaaaatcagaagagttgtgagcccgccgtgcctttcccctgcggacgggtgtccgtctctcaaacctcgaagttaaccagggccgagaccgtcttccccgacgtcgactatgtcaactccacagaggccgagactatcctggacaacattacacagtccacgcaaagcttcaatgacttcacgcgggtggtgggtggagaagatgccaagcctggtcagttcccatggcaggtagttctgaacgggaaagtggacgctttttgcgggggatctattgtaaatgagaaatggatagtaactgctgcgcattgcgtcgaaacaggagtgaaaattacagtggtggcgggggaacataacatcgaagaaactgagcacacggagcaaaaaagaaacgtgatcaggatcataccgcaccataactataatgctgccattaataagtataaccatgatatcgcactgttagagctggatgaacccctggtgcttaactcgtacgtgacgccaatctgcattgcggacaaggagtacactaacatcttccttaagtttgggtcagggtacgtttcggggtggggccgagtgttccataagggccggtcagccctcgtgctccagtatctgcgggtcccgcttgtggacagggccacctgcctgctctcaactaaatttacgatctataacaatatgttttgcgctggcttccatgaaggcggtcgtgactcttgccagggcgactccgggggacctcatgtgactgaggtcgaggggacgtccttcttaacaggcatcatttcttggggcgaagagtgtgcaatgaaaggtaaatacggcatctacaccaaagtgtcccgctacgtgaactggatcaaggagaagaccaagctgaca

SEQ ID NO: 2656 - DNA, 1383 bp, Artificial Sequence
  derived and/or modified sequence
atgcaacgggtcaatatgatcatggcggaatcaccgggcctcatcactatctgcctgctgggataccttctgtccgcggaatgcactgtgttcttggaccatgagaacgcaaacaaaattctgaacaggcctaaacgctacaacagcggaaagctcgaggaattcgtgcagggaaaccttgagcgcgaatgcatggaggaaaagtgcagcttcgaagaggcgcgcgaggtttttgaaaacacggagagaaccaccgagttctggaagcaatacgtggacggggaccagtgtgaaagcaacccgtgcttgaacggaggatcatgcaaggacgacatcaactcttacgaatgttggtgcccgttcggatttgagggcaagaactgcgagctggatgtgacctgcaacatcaagaacggccgctgtgagcaattctgtaagaacagcgcggataacaaggtggtgtgtagctgcaccgagggttaccggctcgcagaaaatcaaaagtcgtgtgagccggccgtgccttttccatgtggaagggtgtcggtgtctcagacctcgaaacttactagagcggaaaccgtgttcccggatgtcgattacgtgaattccacggaggcagaaactatccttgacaacatcacccaatcgacccagagcttcaatgactttactcgagtggtcggaggagaggacgccaaaccgggtcagtttccgtggcaggtggtgctgaatggaaaggtggatgctttctgcggagggtcaatcgtcaacgagaagtggatcgtgaccgccgcccactgcgtggaaacgggagtgaagatcaccgtggtagcgggtgagcacaatatcgaggaaaccgaacatactgaacaaaagcgcaacgtgatccgcatcatcccgcaccacaactacaatgcggctatcaacaagtacaatcatgacatagccctgctcgagctcgacgagccgctcgtgctcaactcctacgtcacgcctatctgcatcgcggacaaagaatacaccaacatcttcctcaagtttggaagcggatacgtgtccggatgggggcgcgtgttccacaaaggaaggagcgccctggtcctgcagtacctgcgcgtgccgctggtggatcgggctacgtgcttgttgagcactaagttcaccatttacaacaatatgttttgcgctggttttcacgaaggtggacgcgactcgtgtcaaggagatagcggaggaccacacgtcaccgaggtggaaggcacgtcattcctgactggcatcatctcgtggggggaggaatgcgccatgaagggtaagtacggcatctataccaaggtgagcagatacgtcaattggatcaaagaaaagaccaagctgact

SEQ ID NO: 2657 - DNA, 1383 bp, Artificial Sequence
  derived and/or modified sequence
atgcagagagtgaacatgattatggctgaatcccccggacttattaccatctgcctgcttggctatttgctgtcagcggagtgcacagtcttcctggatcacgagaacgctaataaaattttgaaccgcccaaaacgctacaacagcggaaagctggaggagtttgtacagggcaaccttgagcgggaatgtatggaggagaagtgcagttttgaagaggcccgggaggtgttcgaaaacactgagaggactacagagttctggaagcagtatgtggacggagaccagtgcgaatcaaacccctgcttgaatggaggttcctgtaaagatgacatcaattcttacgagtgctggtgcccatttggctttgagggaaagaactgtgagcttgatgtcacctgcaatatcaagaacggaaggtgcgagcagttctgcaagaatagcgcagacaataaggttgtgtgtagttgtacagagggatacaggctggccgaaaatcaaaagagctgtgagccggctgtcccatttccatgcggacgcgttagcgtgagccagacctctaagctcacacgagccgaaaccgtattcccggacgtggactacgtcaattccacagaggctgagactatcttggataatattacacagtctacccagagtttcaacgattttacccgcgtcgtcggaggagaggatgctaagcctggtcagtttccctggcaagtcgtgctcaatggaaaagtggacgcgttctgcggtggctcaatcgtgaacgagaaatggatagtgaccgccgcccactgcgtggagactggagtgaagatcactgttgtcgcaggcgaacataacatcgaggagacagagcataccgaacagaaacgcaatgtaattcgaattattccgcatcacaattacaatgccgcgatcaataagtacaaccatgacattgcccttctcgagcttgatgaaccgttggtgctgaactcttacgtgacgccaatttgtattgccgacaaggagtataccaatatctttctaaagtttgggtccggttatgtctctggttggggccgggttttccataaggggcgttctgccttggttctgcagtacttgagagtgcctttggtggaccgggccacatgcttgttgagcacaaaattcaccatctacaacaatatgttttgcgctggattccacgaaggaggtcgtgacagttgccaaggtgactctggagggccacatgtcacagaagtggagggcacgtcttttctcaccggaatcattagctggggggaggaatgcgcaatgaaaggcaaatacggcatttatactaaggtttctcgttacgtaaactggattaaggaaaaaaccaaactgaca

SEQ ID NO: 2658 - DNA, 1383 bp, Artificial Sequence
  derived and/or modified sequence
atgcaaagggttaacatgattatggctgagtcacccggcctcatcaccatatgcctactgggctatttactgtctgctgagtgtacagtttttctcgatcacgagaatgccaacaagatcctgaatcgacccaagcgctacaatagtggcaagctagaggaattcgtccagggtaacctggaacgcgagtgtatggaagagaaatgctccttcgaggaggccagagaggtcttcgaaaatacagaaaggaccacagagttttggaagcagtatgtggatggcgaccagtgcgaatctaacccatgcctgaatgggggctcttgtaaagacgatatcaacagttacgaatgctggtgcccttttggattcgaaggtaagaattgcgaattggacgtgacatgtaacattaagaatggtaggtgcgaacagttctgtaagaattccgccgacaataaggtggtgtgttcatgcaccgagggttacagattggccgaaaatcagaagtcttgcgaaccagcagtcccctttccctgcggccgcgtatctgtcagccaaacctccaagctcacccgcgctgaaaccgtgtttccagatgtcgattatgtgaactccactgaggccgagacaatactggacaacatcacacaatctacacagtcatttaacgactttaccagagttgtggggggcgaagatgctaaacctgggcagtttccctggcaggttgtactgaatgggaaagttgacgccttttgtggaggaagtattgttaacgaaaagtggattgtgaccgccgcccattgcgttgagaccggggtcaagattactgtcgtagctggcgaacataatatcgaagaaacagagcataccgagcagaagcgcaatgtgattcggataataccccaccataactataacgccgccatcaataaatacaatcacgacattgccctgttagagctggatgaaccattagttctgaactcttacgtgacccccatatgcattgcagataaagaatacacaaatatcttcctgaagtttggctcaggatatgtcagcggctggggccgggtgtttcataagggccgctctgcattagtactgcagtacctgcgagttccactggttgacagagccacatgcttgctatccactaagtttaccatttacaacaacatgttttgcgccggctttcatgaggggggcagggattcctgccagggcgattctggagggcctcacgttactgaggtcgaggggacttcctttctcactggcattatttcttggggggaggaatgcgccatgaagggaaagtacgggatttacaccaaggtgtccaggtatgtgaattggatcaaggagaaaaccaaattgaca

SEQ ID NO: 2659 - DNA, 1383 bp, Artificial Sequence
  derived and/or modified sequence
atgcaacgcgtgaacatgattatggcagaatcaccgggactcatcaccatttgccttctgggatacctgttgtcagccgagtgtaccgtgttcctggatcatgaaaatgcgaacaagattctcaaccggcctaagagatacaactcgggtaaactggaggagttcgtgcaaggaaacctcgaaagggaatgtatggaagaaaagtgcagctttgaagaggccagagaggtctttgaaaacactgaaagaacgactgagttttggaagcagtacgtcgacggagatcaatgtgagagcaatccttgtcttaatggcggaagctgcaaggacgacattaactcatacgaatgttggtgtccatttgggtttgaaggcaagaactgtgagcttgatgtgacttgcaacataaagaacggtaggtgtgaacagttctgtaagaactccgcagacaacaaagtggtgtgttcctgcactgaaggttaccggcttgccgaaaatcaaaaaagctgtgagccagctgttcctttcccttgcggaagagtgtcggtgtcacagacctccaagctgaccagagcagaaacggtgttccctgatgtggactacgtgaattcaactgaagcagagacgattcttgataacattactcaatcgacccaatcgttcaatgactttactagagtggtgggcggagaggacgccaagccagggcaattcccctggcaagtggtcctgaatggtaaggttgatgcgttctgtgggggatcaattgtgaacgagaagtggattgtcaccgcggcacactgtgtggaaaccggggtgaagataaccgtggtggcaggggaacacaatatcgaggaaactgaacatactgagcaaaagagaaatgtcattcgtatcattccccatcacaactacaacgccgccatcaacaagtacaaccacgacatagcgttgcttgagttggatgagcccctcgtgttgaacagctacgttactcctatctgtattgcagataaagaatacaccaacatttttctgaaattcggttctggatatgtgtcaggatggggacgggtgttccacaagggacgcagcgcactggtgctccagtaccttcgggtcccattggtggaccgggcaacgtgcttgctgtccactaagtttaccatatacaataacatgttttgtgcaggtttccacgagggagggcgcgattcgtgtcagggggactcgggaggtcctcatgttacggaagtggaaggtactagcttccttaccggtattatctcgtggggggaagagtgcgcgatgaagggcaagtacggaatctacaccaaggtatcccgatacgttaactggatcaaggaaaagaccaagctcacg

SEQ ID NO: 2660 - DNA, 1383 bp, Artificial Sequence
  derived and/or modified sequence
atgcagagggtcaatatgatcatggcagagtctcctggcctgataacaatctgtttgcttggttacctgttgagtgctgagtgcactgtattcctggaccatgaaaacgctaacaagatccttaaccggcccaaacggtataacagcggcaagttagaggagtttgtccaaggaaaccttgagcgggagtgcatggaggaaaaatgctcgttcgaggaagccagggaagtatttgaaaacacggagcgtacgaccgagttctggaaacagtacgtcgatggcgaccagtgcgagtcaaacccctgcctcaacggggggagttgcaaggacgatattaacagctacgagtgttggtgcccatttggcttcgagggcaagaattgtgagctagacgttacgtgcaacatcaagaacggccgatgtgagcagttctgtaaaaactcggcggataataaagtggtgtgctcctgcacagagggatacagactcgcagaaaaccagaagtcgtgcgagcctgcagtgcctttcccatgcgggcgtgtctctgtctcgcagacgtcgaaacttacgcgggccgaaactgtctttcctgatgtcgattatgtcaacagcactgaggccgagactatcttggataatattacccagtctactcaatcatttaatgattttacccgcgtcgtcgggggcgaggacgcgaagccaggtcagtttccgtggcaggtggtgttgaacggcaaggtcgacgcgttctgtggtggctctatcgtcaatgaaaagtggatcgttacagcggcccattgtgtggaaaccggtgtcaagataacagttgtcgctggagaacataatatagaggaaactgagcatacagagcaaaagagaaatgttattcgaattatcccgcaccacaattacaacgccgctatcaacaagtacaaccatgatattgctctccttgaactagacgagccactggtgttgaactcctacgttactccaatttgcatagccgacaaggaatataccaacatctttctgaaattcgggtccgggtacgttagcggctggggcagagtcttccacaagggtagatcggctcttgttcttcaatacctccgtgtacctctggtcgaccgcgcgacatgcctcttatcgaccaaattcaccatctataacaacatgttctgcgcaggttttcatgaaggcggaagggactcctgccagggggacagcgggggaccccatgtcacggaggttgagggcacttcctttctaaccggtatcatttcgtggggcgaagaatgcgccatgaaaggcaaatacggtatctacacaaaggtatctagatacgtaaattggatcaaggagaagactaagctcact

SEQ ID NO: 2661 - DNA, 1383 bp, Artificial Sequence
  derived and/or modified sequence
atgcagcgcgtgaatatgatcatggccgaatcccccgggcttatcaccatctgcctgctcggctacctcctcagcgcggaatgcactgtgttcctcgatcacgaaaacgcaaataagatccttaatcggccgaaaagatacaactccggcaagctcgaagaattcgttcaaggcaacctcgagcgggaatgtatggaggagaagtgttcgttcgaggaggcaagggaggttttcgagaatactgagcggaccactgaattctggaaacagtacgtcgatggtgaccagtgcgaatcgaacccttgcctgaacggaggctcctgcaaagacgacatcaactcatacgaatgttggtgcccgtttggattcgaagggaagaactgtgagctggacgtgacgtgcaacatcaaaaatggaagatgcgagcaattctgcaagaactcggcagataacaaagtcgtctgcagctgcaccgaaggttaccgcctggccgaaaaccagaaatcatgcgagccggcagtgcccttcccatgcggccgcgtgtccgtctcccagacgtcaaagctgacccgcgccgaaaccgtgtttccagacgtggactacgtgaactcaaccgaggcggaaactattctcgacaacatcactcagtcgacgcagtcattcaacgacttcacccgggtcgtgggaggcgaggatgccaagcctggccagtttccatggcaagtggtgcttaatggcaaggtggacgccttctgtggagggagcatcgtgaatgagaagtggattgtgactgccgcacattgtgtggaaaccggcgtgaagatcaccgtggtggccggtgaacacaacatcgaggagactgaacacacggaacaaaagcgcaacgtgatcagaatcatcccacatcacaattacaatgcggcgatcaacaagtacaatcatgatatcgccctgctggaactggacgaaccgttggtgctgaactcctacgtgactcctatctgcatcgccgacaaggaatacaccaatatcttcctgaagttcggaagcggatacgtgtcgggatgggggcgggtgtttcacaagggacgcagcgcgctcgtcctgcagtacctgcgggtgcctctggtcgatcgcgcgacgtgccttctctctaccaaattcaccatctacaacaatatgttctgcgcagggttccacgagggcggaagggactcctgccagggggactcaggaggaccgcatgtgactgaggtggaaggaacctcgttcttgactggaatcatctcgtggggcgaggaatgcgccatgaaagggaagtacggaatctacaccaaggtgtccagatacgtgaactggattaaggaaaagactaaactgacc

SEQ ID NO: 2662 - DNA, 1383 bp, Artificial Sequence
  derived and/or modified sequence
atgcagagagtgaacatgattatggcggaatctcctggactcatcacaatatgcctcctggggtatctcctgagcgctgaatgcaccgttttcctggatcacgaaaacgcgaataagattcttaaccgccccaaacgctacaattctggtaagctcgaggagttcgtccaaggcaacctcgagcgcgagtgtatggaagagaagtgttctttcgaagaggctcgtgaggtgtttgaaaataccgaaaggactacggaattttggaaacaatacgtcgatggagaccagtgcgagtccaacccctgcctgaatggaggcagctgtaaggatgacattaatagttacgagtgctggtgccccttcggctttgaaggaaagaattgcgagttggacgttacctgcaatatcaagaacggaaggtgcgagcagttctgtaaaaattctgccgataacaaggttgtgtgctcttgtaccgaggggtataggttagccgagaatcagaagagctgtgagcctgccgtgccgtttccttgcgggcgggtttcagtgtcacagacaagcaagctcacgcgagctgagacggtattcccagatgtggactatgtgaactctactgaagccgagacgattctcgacaacattacccaaagcacacaatcttttaatgattttacaagagtagtgggcggtgaagacgctaaacccggacaatttccgtggcaggtagttcttaacggtaaggttgatgccttctgtggcggttccatagtgaacgaaaaatggatcgtgaccgccgctcactgcgtggagaccggggtaaagataaccgtggtggccggggagcacaatattgaggagaccgagcatactgagcagaagaggaacgttattagaataattcctcaccataattacaatgctgcaattaataagtacaaccacgatatcgccctgctggagttggacgagcccttggtgcttaattcttatgtcacccccatctgcatcgcagataaagaatatactaacattttcttgaagtttggttcagggtacgtatctggctggggccgagtctttcataagggaaggtccgccctggtgttgcagtacctgagggtccctctggtggatagagcaacctgtctcctgtccacaaaatttacgatctataacaatatgttctgtgctgggttccatgaagggggcagagatagttgccaaggagattctggcggtccacatgtgacagaagtcgaaggtacgagctttcttaccggcattatcagttggggagaggaatgtgccatgaaagggaaatacggcatttacacaaaagtgtctcgctacgtcaattggatcaaagaaaaaaccaaactgacc

SEQ ID NO: 2663 - DNA, 1383 bp, Artificial Sequence
  derived and/or modified sequence
atgcagcgtgtgaacatgataatggcggagagcccaggcttgataacaatttgtctattagggtatcttctgtctgccgagtgcactgttttcctcgatcatgagaacgcgaataaaatcttaaatcggcccaagcgctacaacagtgggaagctggaggagttcgttcagggcaacctggagagagaatgtatggaagagaagtgttcgttcgaggaagcaagagaggtcttcgaaaatacagagagaaccactgagttttggaagcagtatgtggatggcgaccagtgtgagtcaaatccatgtctgaatgggggtagctgcaaggatgatattaattcctatgaatgttggtgccctttcgggttcgagggcaagaattgcgagcttgatgtcacgtgtaatattaagaatggccggtgcgagcagttttgtaaaaacagtgctgacaacaaggtggtctgttcatgcactgagggctaccgcctggccgagaatcagaagtcttgtgaacctgcagtgccgtttccctgtggaagggtctcagtgtcccagaccagcaagctgactcgggccgagactgttttccctgatgtcgattacgtgaacagtacggaggctgaaaccattcttgataacattacgcaatcaacacaatcatttaatgattttaccagagtcgtcgggggagaggacgccaagcccggacagttcccttggcaagtagttctcaacggaaaagtcgatgctttctgcgggggatctatcgtaaatgagaagtggatcgtgaccgccgcgcattgcgttgagacgggggttaaaattacggtggtagccggcgagcacaacatcgaggaaaccgagcacaccgagcagaaaaggaacgtgatccgaatcataccccaccacaactacaatgccgccattaacaaatacaatcatgatattgcactccttgaactggatgaaccgttggtgctcaattcctacgtgactcctatatgcatagcagacaaagaatatactaatatcttcctcaagttcgggagcgggtatgtttccggatgggggcgggtttttcataaggggcgctccgccctcgtgctccaatacctccgcgtgccattagttgatcgagccacttgcctcctcagcactaagttcacaatctataataacatgttttgtgcaggtttccacgagggtggacgagattcatgtcaaggcgacagcggcggtccccatgttaccgaggttgaaggaacgtcattcctcacagggattatttcctggggtgaggagtgtgctatgaaaggtaagtacgggatatacactaaagtgagtagatatgtgaattggatcaaagagaaaactaaacttacc

SEQ ID NO: 2664 - DNA, 1383 bp, Artificial Sequence
  derived and/or modified sequence
atgcagagagtgaatatgatcatggctgagtcccctgggctgattactatttgcctgttgggttacctactatctgccgaatgtaccgtattcctagatcatgagaacgccaacaagatcttaaatcgacctaaacgatataattcgggtaagttagaggagttcgtccagggaaatctcgaacgagagtgtatggaggagaaatgctcattcgaggaagctagggaggtattcgagaacactgagcggaccaccgaattctggaagcagtacgtagacggagaccaatgtgaatcgaacccctgccttaatggcggatcctgcaaggatgacatcaatagctacgaatgttggtgccctttcggtttcgagggcaaaaactgtgaattagacgttacctgtaatatcaagaacggccggtgtgagcaattctgcaagaattccgcggataataaggtagtgtgcagttgtaccgagggctaccgcttggccgagaatcaaaagtcctgcgagcctgccgtgcccttcccttgtggccgcgtgtcagtaagtcagacttctaagctgacacgagcagagaccgttttcccggatgtcgactacgtgaattcaaccgaagcggagactattctagataatattacccagagcactcagagcttcaacgacttcacccgcgtcgtgggcggcgaagatgccaagcccgggcaatttccatggcaggtggttcttaatggcaaagtggacgccttctgcgggggatcaattgtgaacgagaaatggatcgtgacagccgctcactgcgtggagactggcgtaaagatcactgtggtcgccggggagcacaacatcgaggagacagagcacacggaacagaagaggaacgtgattcgaattatccctcatcacaactataacgccgcaatcaacaaatacaaccacgatattgcgctcctcgaactcgacgagcccctcgtcttgaattcttatgtgaccccgatttgtatcgctgacaaggaatacacaaatatctttctcaaatttggctctggctatgtgtcagggtggggccgggtgttccataaaggccgttcagcactggtcctgcagtatttgcgcgttcccctggtagaccgcgcaacttgcctgttgtccactaagttcaccatatacaataatatgttttgtgctggatttcacgaaggcgggagggattcttgccagggtgattcaggggggccccatgtcaccgaggtggaaggtacatcttttctgacagggataatctcttggggtgaggaatgtgctatgaagggtaaatatggcatctacacgaaagtgtccaggtacgtgaactggatcaaggagaaaactaagcttaca

SEQ ID NO: 2665 - DNA, 1383 bp, Artificial Sequence
  derived and/or modified sequence
atgcagcgcgtcaacatgattatggcagaatcgcccgggctgataaccatatgtcttttggggtacttgttgtccgcagaatgtactgtctttctggatcacgaaaacgctaacaaaatccttaatcgtcctaaacggtacaactccggaaaactcgaagaattcgttcagggaaaccttgagcgcgagtgtatggaagaaaaatgttcgttcgaagaagccagagaggtgttcgaaaacacggagcggactacggaattttggaagcagtatgttgacggggaccagtgtgaatcgaacccatgcctgaatggtggttcttgcaaggatgacattaacagctatgaatgctggtgccccttcggattcgagggcaagaactgtgagttggatgtgacttgtaacattaagaacgggagatgtgaacagttctgtaagaattccgctgataacaaggtggtgtgtagctgcaccgaaggttacaggctcgccgaaaaccagaagtcctgtgagcctgcagtcccttttccatgtggtcgagtctccgtgtctcaaacttccaaacttactcgcgcagagactgtgttccccgacgtcgactacgtgaattcaactgaggcggaaactattctcgacaacataacccaatccacgcagtcgtttaacgactttacccgggtggtgggaggtgaggacgccaaacccggacagtttccatggcaggtggtgctgaatggaaaagtggatgcgttttgtggggggtcaatcgtgaacgagaagtggattgtgaccgcagcacattgtgttgaaacgggtgtgaagatcaccgttgtggcgggtgaacacaacattgaagaaactgagcataccgaacagaaacgcaacgtgatccgcatcatccctcaccacaactataacgcagcgatcaataagtacaatcatgatatagccctgctggaattggacgagccacttgtgcttaatagctacgtcacccctatttgcatcgcagataaggagtacaccaacattttcttgaagtttggatcaggttacgtttcaggatggggaagagtctttcataagggacgttccgcactggtgctccaataccttagagtgcctctggtggatagagcaacctgtctgctgtccacgaagtttaccatttacaacaatatgttctgcgcaggttttcacgagggaggccgcgattcgtgtcagggcgattcggggggtcctcatgtgaccgaagtcgagggaaccagctttcttactgggatcatttcatggggtgaggaatgcgccatgaagggtaagtacggaatatacaccaaggtgtcgcgctacgtgaattggatcaaggaaaagaccaaactgacc

SEQ ID NO: 2666 - DNA, 1383 bp, Artificial Sequence
  derived and/or modified sequence
atgcaacgggtcaatatgataatggctgaaagtcccgggctgatcaccatctgtttgctcggttatctcctgtctgcagagtgtacggtcttcttggatcatgagaacgccaacaagatcctgaacaggcctaaacgctacaactccggtaaattggaggagttcgtgcagggcaacctggaacgggagtgcatggaagagaaatgtagcttcgaggaggccagggaggttttcgagaacaccgaacggactacggagttctggaagcagtacgtggatggagatcagtgtgagtctaatccctgtctcaacgggggtagttgcaaagacgatattaacagctacgagtgctggtgtcctttcggatttgaaggaaagaattgcgagttggatgtgacttgcaatattaagaatggtcggtgcgaacagttttgcaagaacagcgcagacaataaagttgtttgctcatgcacagagggatatcgccttgcagagaatcagaagtcttgtgagccggccgtgccgtttccctgcggccgggtatctgtatcccagaccagcaaactgacccgggccgagaccgtgtttcccgatgtggactatgttaactccactgaggccgagacaattctggacaacatcactcagagtacccagtcctttaacgattttactagagttgtgggcggtgaggacgcgaagcccggtcaattcccatggcaagtggtcctgaacgggaaggtggacgccttttgtggcggatctatcgtgaacgaaaagtggattgtcacagccgcacactgtgttgaaacaggggttaaaattaccgtcgtggccggggagcataacatcgaggaaacagaacacacagagcagaaaagaaacgtgattcgcataatccctcaccataactacaacgctgcaatcaataaatataatcacgacattgctctgctggagctcgatgaaccgttggtgctgaatagctatgtaaccccaatctgcatcgccgacaaagagtataccaatatcttcctgaagttcggcagcggctacgtctccggatggggaagggtattccacaaaggtcggagtgcccttgtgcttcagtacctccgggtcccgctggtggatagggcaacttgcctgctcagtactaaatttaccatttacaacaacatgttctgtgcaggatttcacgagggcgggagggacagctgtcaaggcgactctggtggcccccacgtcacggaggtggaaggaacctcctttcttacaggtatcatctcctggggggaggagtgtgcaatgaagggaaaatatgggatatatacgaaagtctcccgctatgtgaattggatcaaggaaaaaaccaagctgact

SEQ ID NO: 2667 - DNA, 1386 bp, Artificial Sequence
  derived and/or modified sequence
atgcagagggtgaacatgatcatggcagagtccccaggcctgattaccatatgcttgcttggctacctgcttagcgccgagtgcaccgtgtttctggaccatgagaatgctaataaaatcttgaaccgcccaaaacgctacaacagcggcaagctcgaagaatttgttcagggtaacctggagcgagagtgcatggaagagaagtgtagtttcgaggaagcgagggaggtctttgagaataccgagaggactactgaattttggaaacagtacgtagatggggaccagtgtgaaagcaatccttgccttaacgggggaagctgcaaagacgatatcaattcatatgagtgttggtgtccattcgggtttgaaggaaaaaattgtgaattggatgtgacctgtaatataaaaaatggacgctgcgagcagttctgcaagaacagtgctgacaataaagttgtttgcagttgtaccgaaggctaccgtcttgcagaaaatcagaagtcttgtgaacccgccgtccctttcccatgcgggagagtttccgtctctcagacaagcaagctgactcgggccgaaactgtctttccggatgtagactatgtgaactctaccgaagccgaaacaatcctcgacaatataacgcagtctacacagtcctttaatgattttacacgggtagtggggggtgaagatgctaagcccggtcagtttccttggcaggttgtgttaaacggaaaggttgatgccttctgtgggggcagtattgtaaacgaaaagtggatagtcactgccgcgcactgcgtggagacgggcgtcaagataactgtcgtggcaggcgaacataatatagaagaaacggagcacactgaacagaagcgaaacgtgatcagaattatccctcaccacaactataacgcagcgattaataagtataaccacgatattgcccttctagagctggacgaacccctcgtcctaaatagctacgtgacacccatctgcattgcggacaaggagtacactaacattttcctgaaattcggatccgggtatgtcagcggatggggccgggttttccataaaggccgatccgccctggtcctccagtatttacgggtcccactggtggatcgagcgacttgtcttcggtctactaaatttaccatctataacaatatgttctgtgccggatttcacgagggaggccgtgactcctgccaaggcgactccggcgggcctcatgtgacggaggtggagggcacctctttcctcaccgggatcatttcatggggagaagagtgcgctatgaagggaaaatacggaatttacactaaggttagccggtatgtgaactggatcaaggagaaaaccaagctgacgtag

SEQ ID NO: 2668 - DNA, 1386 bp, Artificial Sequence
  derived and/or modified sequence
atgcagagggtgaacatgatcatggccgagagccctggcctcatcaccatctgcctgctgggctacctgctgtctgcagaatgtactgtgttcctggaccatgaaaatgccaacaagatcctgaaccggcccaagcgctacaacagcggcaagctggaggagtttgtgcagggcaacctggagcgggagtgcatggaggagaagtgcagctttgaggaggcccgggaggtgtttgaaaatacagagaggaccacagagttctggaagcagtatgtggatggagaccagtgtgagagcaacccctgcctgaatggaggcagctgcaaggatgacatcaacagctatgagtgctggtgcccctttggatttgagggcaagaactgtgagctggatgtgacctgcaacatcaagaatggccgctgtgagcagttctgcaagaacagcgctgacaacaaggtggtgtgcagctgcacagagggctaccgcctggccgagaaccagaagagctgtgagcctgctgtgcccttcccctgtggccgggtgtctgtgtcccagaccagcaagctgaccagggctgagaccgtcttcccagatgtggactatgtgaacagcacagaagctgagaccatcctggacaacatcacccagagcacccagagcttcaatgacttcaccagggtggtgggcggagaagatgccaagccaggccagttcccctggcaggtggtgctgaatggcaaggtggatgccttctgtggcggcagcatcgtgaatgagaagtggatcgtgacagctgcccactgtgtggagactggagtgaagatcaccgtggtggccggggagcacaacatcgaggagacagagcacacagagcagaagagaaatgtcatccgcatcatcccccaccacaactacaatgctgccatcaacaagtacaaccacgacatcgccctgctggagctggatgagcccctggtgctgaacagctatgtgacccccatctgcatcgctgacaaggagtacaccaacatcttcctgaagtttggcagcggctacgtgtctggctggggccgggtcttccacaagggccgcagcgccctggtgctgcagtacctgcgggtgcccctggtggaccgggccacctgcctgcggagcaccaagttcaccatctacaacaacatgttctgtgccggcttccacgagggcggccgggacagctgccagggcgacagcggcggcccccacgtgacagaggtggagggcaccagcttcctgaccggcatcatctcctggggcgaggagtgtgccatgaagggcaagtatggcatctacaccaaggtgagccgctacgtgaactggatcaaggagaagaccaagctgacctag

SEQ ID NO: 2669 - DNA, 1386 bp, Artificial Sequence
  derived and/or modified sequence
atgcagcgggtgaacatgatcatggccgagagccccggcctgatcaccatatgtctgctggggtatctgctgtctgcggaatgcacggtgttcctggatcatgaaaatgctaataagattctcaatcggccaaagcgctataattccgggaaactggaggagttcgtccaggggaacctcgaacgtgaatgcatggaggagaaatgctccttcgaggaagctcgggaggtgtttgagaacactgagaggaccactgagttctggaagcagtacgttgatggagaccagtgcgaatccaatccttgcctcaatggcggcagctgcaaagacgatatcaacagctacgaatgttggtgcccttttgggtttgaaggaaagaattgtgagctggatgtgacgtgcaatataaaaaatggaagatgtgaacagttctgcaagaacagtgctgacaacaaagtcgtgtgtagttgcactgagggctatcggctcgcagagaaccaaaaatcatgtgaacccgccgtgcccttcccatgcgggagagtctctgtgagtcagaccagcaaattgacaagagctgagacagtattccccgacgtagactacgtcaactccacagaggccgagacaatcctggacaatatcacacaaagcacgcagtctttcaacgattttactcgggtcgttggcggagaagacgcgaagcctggccagtttccttggcaggtagtgctgaacggtaaagtggacgccttctgcggagggtctattgtcaacgagaaatggatcgtcacagctgcccactgtgtggaaacgggagttaagattaccgtagtggcaggggagcacaacatcgaggagacggaacacacggagcagaagcggaacgtgattcggataatccctcatcacaattataacgccgccataaataagtataatcacgatatcgcgctgctggaactggatgaacccctcgtcctgaactcctacgtgacacccatctgtatcgcggacaaggagtatacaaacatcttccttaagttcggctccggatacgtatctgggtgggggcgcgtttttcataaaggcagatctgcattggtcctgcagtacctgcgcgtgcccctcgtcgacagagctacctgcctgagaagcaccaagtttaccatttacaacaatatgttctgcgcagggttccacgagggggggagagattcctgtcagggagattcaggagggcctcatgtgacagaggtggagggtacaagtttcctgacaggcataatttcatggggagaggagtgcgccatgaagggaaaatatggtatatacactaaggtgtcacgttatgtgaactggattaaggaaaaaacgaagctgacctag

SEQ ID NO: 2670 - DNA, 1386 bp, Artificial Sequence
  derived and/or modified sequence
atgcagagggttaatatgatcatggctgagagtcccggactaattacgatctgtttattggggtatttattgtcagcagagtgtacggttttcctggatcatgaaaatgctaacaaaattctaaatagaccgaagcggtataattctggtaaactggaggagtttgtgcagggaaatctggagcgggaatgcatggaagagaagtgcagctttgaggaagctcgggaggtgtttgaaaatacagaacggactacggagttctggaaacagtatgtagacggggatcagtgcgaatctaatccgtgccttaatgggggttcctgtaaggatgatatcaattcatatgagtgttggtgccctttcgggttcgagggcaagaattgtgagctcgacgtaacttgcaacattaaaaatggtcgctgtgagcaattttgcaagaatagcgccgataataaagtcgtctgtagctgtacagagggatacagactggctgagaatcagaagagctgcgaacccgcagtgccgttcccctgtgggagggtgtctgtttcccaaacatctaagctaacccgcgctgagacagtgttcccagacgtcgattatgtcaatagcacggaagccgaaactatcctcgataacataacacagtccacacagagtttcaatgactttactcgtgttgttgggggagaggacgccaaacccggacagtttccctggcaggttgtcctgaatggaaaagtagacgccttctgcggcggatctatagtcaacgaaaagtggatcgttaccgctgcacattgtgtggagacgggggtcaaaataactgttgtggccggagaacacaacatcgaggaaaccgaacacacagagcagaagcgaaatgtgatcaggataatcccgcatcacaactacaacgctgcaattaataagtacaaccatgacatagccctgttagagctagatgaaccactcgttctgaactcctacgttaccccaatctgcattgctgataaagagtatacaaacatattcctaaagtttgggtccgggtacgtatcaggttgggggagagtgttccacaaggggagatctgctctggtgctccagtacttaagagttccactggtggaccgggcaacctgtctgcgaagcaccaagttcacaatctacaacaacatgttttgtgcagggttccacgaagggggtcgagactcatgccagggcgactctggcggacctcatgtgacagaggtggagggcacatccttcctgaccggaattatttcatggggcgaggaatgcgctatgaaggggaagtacggaatatacacgaaagtgtcccgttatgtaaattggataaaggaaaagaccaaactgacttag

SEQ ID NO: 2671 - DNA, 1386 bp, Artificial Sequence
  derived and/or modified sequence
atgcagcgcgttaacatgatcatggcagaaagtcctggccttatcacaatatgtcttcttggatacctgttgagcgcagaatgcactgtatttctcgaccacgagaatgcaaataaaatccttaatcgacctaagaggtataattccggcaaacttgaggagttcgtgcaaggcaatcttgaacgcgaatgcatggaagagaaatgcagtttcgaggaagccagagaggtatttgaaaacaccgaacgtacaactgaattttggaagcaatacgtggatggggaccagtgtgagtcaaacccatgtctgaacggagggagttgcaaagatgatatcaactcttacgagtgctggtgcccatttgggttcgagggcaagaactgtgaattagatgtgacttgcaatatcaaaaatggccggtgtgaacagttctgtaaaaactcagccgacaataaagtcgtctgctcatgtactgaagggtaccgcctggccgaaaatcagaagagctgtgaacccgctgtgccctttccgtgcggacgtgtctctgtgtcacagacctcgaagctgacgcgagcagagacagtgttccctgatgtggactacgtgaacagcacagaggcggagacgatactcgataacatcacacagagcactcagtcatttaacgattttacaagggtagtaggaggtgaggacgcaaaacccggacagtttccttggcaggttgtactgaatgggaaagtagatgcgttttgcggtggttcaatcgtgaacgaaaaatggattgtgacagccgctcattgtgtggaaactggagtgaaaataaccgtagtcgccggagaacacaacattgaagagaccgaacatacagagcaaaagcgcaacgttatacggatcattcctcaccataactataatgccgcaataaacaagtataatcacgacatagcacttctggaactcgacgagcccctggtactgaattcttacgtgacaccaatttgcatcgctgacaaagagtacaccaacatatttctaaagtttggtagcggatacgtgtcaggctggggtagagtgtttcataagggtcgttcagccctagttctgcagtacctcagagttccactggtcgatagagctacttgcttaagaagtacaaaatttactatctacaataacatgttctgtgccggctttcatgaaggagggagagactcatgtcagggagatagcggaggccctcacgttaccgaagtggaagggacgagttttttgaccggcataatcagctggggcgaggaatgtgcaatgaaaggtaagtacggcatctacactaaggtttccaggtacgttaactggatcaaggagaagaccaagctgacatag

SEQ ID NO: 2672 - DNA, 1386 bp, Artificial Sequence
  derived and/or modified sequence
atgcagagagttaacatgatcatggcggaaagtccagggttgataacaatttgtttgctaggctacctgttgagtgccgagtgcacggtgttcctcgaccacgaaaatgcaaacaagatcctgaatagacccaaaaggtataacagtggaaagttggaggaattcgtacaaggcaacctggagagagaatgtatggaagaaaaatgtagcttcgaggaagctcgggaggtcttcgagaacaccgaacgtacaacggaattttggaagcagtacgtggatggagaccaatgcgagagcaatccctgccttaacggcggatcctgtaaagatgacattaattcgtacgaatgctggtgcccctttgggttcgaaggcaagaattgtgaattggatgtgacctgcaatataaagaatgggcgatgtgaacagttctgtaagaattccgcagataacaaggtggtgtgcagctgtaccgagggctacagactggctgagaaccagaaatcttgtgagccagcagtgccgtttccctgcggtagagtgagtgtgtcccagacaagtaaattgactagggccgagaccgtcttccccgatgttgactacgtgaacagcacagaggcggagacgatactcgataacatcacacagagcactcagtcatttaacgattttacaagggtagtaggaggtgaggacgcaaaacccggacagtttccttggcaggttgtactgaatgggaaagtagatgcgttttgcggtggttcaatcgtgaacgaaaaatggattgtgacagccgctcattgtgtggaaactggagtgaaaataaccgtagtcgccggagaacacaacattgaagagaccgaacatacagagcaaaagcgcaacgttatacggatcattccccaccacaactacaatgcagccatcaacaaatacaaccatgatattgcgctgttagaacttgacgaacccctcgtccttaatagttatgtaacacctatttgtattgctgacaaggaatacacaaacatcttcctgaaattcggctctggatacgtgtcagggtggggaagggtgttccacaagggccggtcagctctcgttctacaatatctgcgagtgccacttgttgacagagccacatgtctccgctccactaagttcactatttataataacatgttctgcgccggattccatgagggagggcgagatagctgccagggggattcaggcggcccacacgttacagaggttgaaggtacatcatttctgaccggcattatctcatggggcgaagaatgtgcaatgaaaggcaagtatgggatttataccaaggtgagcagatacgttaactggataaaggagaagactaagctgacgtag

SEQ ID NO: 2673 - DNA, 1386 bp, Artificial Sequence
  derived and/or modified sequence
atgcagagagtgaacatgatcatggccgagagccccggcctgatcaccatctgcctgctgggctacctgctgagcgccgagtgcaccgtgttcctggaccacgagaacgccaacaagatcctgaacagacccaagagatacaacagcggcaagctggaggagttcgtgcagggcaacctggagagagagtgcatggaggagaagtgcagcttcgaggaggccagagaggtgttcgagaacaccgagagaaccaccgagttctggaagcagtacgtggacggcgaccagtgcgagagcaacccctgcctgaacggcggcagctgcaaggacgacatcaacagctacgagtgctggtgccccttcggcttcgagggcaagaactgcgagctggacgtgacctgcaacatcaagaacggcagatgcgagcagttctgcaagaacagcgccgacaacaaggtggtgtgcagctgcaccgagggctacagactggccgagaaccagaagagctgcgagcccgccgtgcccttcccctgcggcagagtgagcgtgagccagaccagcaagctgaccagagccgagaccgtgttccccgacgtggactacgtgaacagcaccgaggccgagaccatcctggacaacatcacccagagcacccagagcttcaacgacttcaccagagtggtgggcggcgaggacgccaagcccggccagttcccctggcaggtggtgctgaacggcaaggtggacgccttctgcggcggcagcatcgtgaacgagaagtggatcgtgaccgccgcccactgcgtggagaccggcgtgaagatcaccgtggtggccggcgagcacaacatcgaggagaccgagcacaccgagcagaagagaaacgtgatcagaatcatcccccaccacaactacaacgccgccatcaacaagtacaaccacgacatcgccctgctggagctggacgagcccctggtgctgaacagctacgtgacccccatctgcatcgccgacaaggagtacaccaacatcttcctgaagttcggcagcggctacgtgagcggctggggcagagtgttccacaagggcagaagcgccctggtgctgcagtacctgagagtgcccctggtggacagagccacctgcctgagaagcaccaagttcaccatctacaacaacatgttctgcgccggcttccacgagggcggcagagacagctgccagggcgacagcggcggcccccacgtgaccgaggtggagggcaccagcttcctgaccggcatcatcagctggggcgaggagtgcgccatgaagggcaagtacggcatctacaccaaggtgagcagatacgtgaactggatcaaggagaagaccaagctgacctag

SEQ ID NO: 2674 - DNA, 1549 bp, Artificial Sequence
  derived and/or modified sequence
gggaaataagagagaaaagaagagtaagaagaaatataagagccacctgacagctgatcaactaaatttaggctgaatcgccgggactcatcacaataagcctctagggttatctcttgtcggtagataataccgtgttcttgtaacacgaaaacgcgataaaaataattaatcgcccgaagtaatataactccgggtaaattgaggagtttgtgcaggtaaatcttgaacgagtaagctgagaggagaataactcctttgaggaggcgagggaagtagttgataaataggagcgaacaacggagttttggaagcaataggtagtgagggaccagtgtgagtcgaatccgtgcctctaagggggattaggtaaagtaaacatcaatagcttaaataactggtgcccgtaagggtttgaagggaagaactgtgagctggtagtgacgtgcaacatctaaaacggacgctgtgagcagttaagtaagtaaacggctgacaataagtaggttaactcgtgcacagtaagattaaggcttaaggagaactgaaaatcgtgcgagcccgcagttgagttagcttgtgggtaggtgagcgtgtcacagactagcaagttgacgagagcgtgaactgtattccccgacgtggatagcgtcaacagcataaaagcctaaacaatcctcgataacatcacgctaagcactcagtcctaataaaactttacgagggtcgtaggtggtgaggacgcgaaacccggtcagttcccctgacaggtggtattgaacggtgaagtcgtaaccttttaaggaggttccattgtcaacgtagagtgtagtgtcacagcgtgacactgcgtagaaacaggagtgaaaattaaggtagtggcgtaggagcataacattgaagagataaagcactaggaacaaaagcgaataatcatcagtaacatttgacaccataactataacgcggcaatagataagtactaacacgacatcgcacttttggtaattgactaactatataaacttaatttaaacgtcacccctatttgtattgccgtgaaatagttaaataacatcttcttgaaattcggctaagggtacgtatcgggctgtaacagagtgttcttagagggtagataagcactggtgttgcaatacctcagggtgtaactcgtggtaagtgacacttgtctgcggtccaccaaatagactagcttagacaattaattctgtgcgggatttgattaaggtgggagagatagctgcctgagagactcagggggtccctgagtgacggataacgaggggacgtcatttctgacgggaatttagtctaagggagaggatataacgtagaaggggaaattaggcatctacactaaagtgtcacggttaatcaattaaatcaaggaaaagactgaactcacgtgataataggctggagcctcggtggccatgcttcttgccccttgggcctccccccagcccctcctccccttcctgcacccgtacccccgtggtctttgaataaagtctgagtgggcggc

SEQ ID NO: 2675 - RNA, 1536 nt, Artificial Sequence
  derived and/or modified sequence
gggaaauaagagagaaaagaagaguaagaagaaauauaagagccaccaaugcagcgcgucaacaugauuauggccgaaucgccgggacucaucacaaucugccucuuggguuaucucuugucggcagaauguaccguguucuuggaucacgaaaacgcgaacaaaauucuuaaucgcccgaagcgguauaacuccgggaaacuugaggaguuugugcagggcaaucuugaacgagagugcauggaggagaaaugcuccuuugaggaggcgagggaaguguuugaaaacacagagcgaacaacggaguuuuggaagcaauacguagauggggaccagugugagucgaauccgugccucaaugggggaucauguaaagaugacaucaauagcuaugaaugcuggugcccguuuggguuugaagggaagaacugugagcuggaugugacgugcaacaucaaaaacggacgcugugagcaguuuuguaagaacucggcugacaauaagguaguaugcucgugcacagagggauaccggcuggcggagaaccaaaaaucgugcgagcccgcagucccguucccuugugggagggugagcgugucacagacuagcaaguugacgagagcggagacuguauuccccgacguggacuacgucaacagcaccgaagccgaaacaauccucgauaacaucacgcagagcacucaguccuucaaugacuuuacgagggucguagguggugaggacgcgaaacccggucaguuccccuggcaggugguauugaacggaaaagucgaugccuuuuguggagguuccauugucaacgagaaguggauugucacagcggcacacugcguagaaacaggagugaaaaucacgguaguggcgggagagcauaacauugaagagacagagcacacggaacaaaagcgaaaugucaucagaaucauuccacaccauaacuauaacgcggcaaucaauaaguacaaucacgacaucgcacuuuuggagcuugacgaaccuuuggugcuuaauucguacgucaccccuauuuguauugccgacaaagaguauacaaacaucuucuugaaauucggcuccggguacguaucgggcuggggcagaguguuccauaaggguagauccgcacugguguugcaauaccucagggugccccucguggaucgagccacuugucugcgguccaccaaauucacaaucuacaacaauauguucugugcgggauuccaugaaggugggagagauagcugccagggagacucaggggguccccacgugacggaagucgaggggacgucauuucugacgggaauuaucucauggggagaggaaugugcgaugaaggggaaauauggcaucuacacuaaagugucacgguaugucaauuggaucaaggaaaagacgaaacucacgugaucagccagcgcugccuucugcggggcuugccuucuggccaugcccuucuucucucccuugcaccuguaccucuuggucuuugaauaaagccugaguaggaag

SEQ ID NO: 2676 - RNA, 1571 nt, Artificial Sequence
  derived and/or modified sequence
gggaaauaagagagaaaagaagaguaagaagaaauauaagagccaccaugcagcgcgucaacaugauuauggccgaaucgccgggacucaucacaaucugccucuuggguuaucucuugucggcagaauguaccguguucuuggaucacgaaaacgcgaacaaaauucuuaaucgcccgaagcgguauaacuccgggaaacuugaggaguuugugcagggcaaucuugaacgagagugcauggaggagaaaugcuccuuugaggaggcgagggaaguguuugaaaacacagagcgaacaacggaguuuuggaagcaauacguagauggggaccagugugagucgaauccgugccucaaugggggaucauguaaagaugacaucaauagcuaugaaugcuggugcccguuuggguuugaagggaagaacugugagcuggaugugacgugcaacaucaaaaacggacgcugugagcaguuuuguaagaacucggcugacaauaagguaguaugcucgugcacagagggauaccggcuggcggagaaccaaaaaucgugcgagcccgcagucccguucccuugugggagggugagcgugucacagacuagcaaguugacgagagcggagacuguauuccccgacguggacuacgucaacagcaccgaagccgaaacaauccucgauaacaucacgcagagcacucaguccuucaaugacuuuacgagggucguagguggugaggacgcgaaacccggucaguuccccuggcaggugguauugaacggaaaagucgaugccuuuuguggagguuccauugucaacgagaaguggauugucacagcggcacacugcguagaaacaggagugaaaaucacgguaguggcgggagagcauaacauugaagagacagagcacacggaacaaaagcgaaaugucaucagaaucauuccacaccauaacuauaacgcggcaaucaauaaguacaaucacgacaucgcacuuuuggagcuugacgaaccuuuggugcuuaauucguacgucaccccuauuuguauugccgacaaagaguauacaaacaucuucuugaaauucggcuccggguacguaucgggcuggggcagaguguuccauaaggguagauccgcacugguguugcaauaccucagggugccccucguggaucgagccacuugucugcgguccaccaaauucacaaucuacaacaauauguucugugcgggauuccaugaaggugggagagauagcugccagggagacucaggggguccccacgugacggaagucgaggggacgucauuucugacgggaauuaucucauggggagaggaaugugcgaugaaggggaaauauggcaucuacacuaaagugucacgguaugucaauuggaucaaggaaaagacgaaacucacgugauaauaggcuggagccucgguggccaugcuucuugccccuugggccuccccccagccccuccuccccuuccugcacccguaccccccaaacaccauugucacacuccaguggucuuugaauaaagucugagugggcggc

SEQ ID NO: 2677 - RNA, 1556 nt, Artificial Sequence
  derived and/or modified sequence
gggaaauaagagagaaaagaagaguaagaagaaauauaagagccaccaugcagcgcgucaacaugauuauggccgaaucgccgggacucaucacaaucugccucuuggguuaucucuugucggcagaauguaccguguucuuggaucacgaaaacgcgaacaaaauucuuaaucgcccgaagcgguauaacuccgggaaacuugaggaguuugugcagggcaaucuugaacgagagugcauggaggagaaaugcuccuuugaggaggcgagggaaguguuugaaaacacagagcgaacaacggaguuuuggaagcaauacguagauggggaccagugugagucgaauccgugccucaaugggggaucauguaaagaugacaucaauagcuaugaaugcuggugcccguuuggguuugaagggaagaacugugagcuggaugugacgugcaacaucaaaaacggacgcugugagcaguuuuguaagaacucggcugacaauaagguaguaugcucgugcacagagggauaccggcuggcggagaaccaaaaaucgugcgagcccgcagucccguucccuugugggagggugagcgugucacagacuagcaaguugacgagagcggagacuguauuccccgacguggacuacgucaacagcaccgaagccgaaacaauccucgauaacaucacgcagagcacucaguccuucaaugacuuuacgagggucguagguggugaggacgcgaaacccggucaguuccccuggcaggugguauugaacggaaaagucgaugccuuuuguggagguuccauugucaacgagaaguggauugucacagcggcacacugcguagaaacaggagugaaaaucacgguaguggcgggagagcauaacauugaagagacagagcacacggaacaaaagcgaaaugucaucagaaucauuccacaccauaacuauaacgcggcaaucaauaaguacaaucacgacaucgcacuuuuggagcuugacgaaccuuuggugcuuaauucguacgucaccccuauuuguauugccgacaaagaguauacaaacaucuucuugaaauucggcuccggguacguaucgggcuggggcagaguguuccauaaggguagauccgcacugguguugcaauaccucagggugccccucguggaucgagccacuugucugcgguccaccaaauucacaaucuacaacaauauguucugugcgggauuccaugaaggugggagagauagcugccagggagacucaggggguccccacgugacggaagucgaggggacgucauuucugacgggaauuaucucauggggagaggaaugugcgaugaaggggaaauauggcaucuacacuaaagugucacgguaugucaauuggaucaaggaaaagacgaaacucacgugauaauaggcuggagccucgguggccaugcuucuugccccuugggccuccccccagccccuccuccccuuccugcacccguacccccacacuccguggucuuugaauaaagucugagugggcggc

SEQ ID NO: 2678 - RNA, 1564 nt, Artificial Sequence
  derived and/or modified sequence
gggaaauaagagagaaaagaagaguaagaagaaauauaagagccaccaugcagcgcgucaacaugauuauggccgaaucgccgggacucaucacaaucugccucuuggguuaucucuugucggcagaauguaccguguucuuggaucacgaaaacgcgaacaaaauucuuaaucgcccgaagcgguauaacuccgggaaacuugaggaguuugugcagggcaaucuugaacgagagugcauggaggagaaaugcuccuuugaggaggcgagggaaguguuugaaaacacagagcgaacaacggaguuuuggaagcaauacguagauggggaccagugugagucgaauccgugccucaaugggggaucauguaaagaugacaucaauagcuaugaaugcuggugcccguuuggguuugaagggaagaacugugagcuggaugugacgugcaacaucaaaaacggacgcugugagcaguuuuguaagaacucggcugacaauaagguaguaugcucgugcacagagggauaccggcuggcggagaaccaaaaaucgugcgagcccgcagucccguucccuugugggagggugagcgugucacagacuagcaaguugacgagagcggagacuguauuccccgacguggacuacgucaacagcaccgaagccgaaacaauccucgauaacaucacgcagagcacucaguccuucaaugacuuuacgagggucguagguggugaggacgcgaaacccggucaguuccccuggcaggugguauugaacggaaaagucgaugccuuuuguggagguuccauugucaacgagaaguggauugucacagcggcacacugcguagaaacaggagugaaaaucacgguaguggcgggagagcauaacauugaagagacagagcacacggaacaaaagcgaaaugucaucagaaucauuccacaccauaacuauaacgcggcaaucaauaaguacaaucacgacaucgcacuuuuggagcuugacgaaccuuuggugcuuaauucguacgucaccccuauuuguauugccgacaaagaguauacaaacaucuucuugaaauucggcuccggguacguaucgggcuggggcagaguguuccauaaggguagauccgcacugguguugcaauaccucagggugccccucguggaucgagccacuugucugcgguccaccaaauucacaaucuacaacaauauguucugugcgggauuccaugaaggugggagagauagcugccagggagacucaggggguccccacgugacggaagucgaggggacgucauuucugacgggaauuaucucauggggagaggaaugugcgaugaaggggaaauauggcaucuacacuaaagugucacgguaugucaauuggaucaaggaaaagacgaaacucacgugauaauaggcuggagccucgguggccaugcuucuugccccuugggccuccccccagccccuccuccccuuccugcacccguaccccccaaacaccauugucaguggucuuugaauaaagucugagugggcggc

SEQ ID NO: 2679 - RNA, 1554 nt, Artificial Sequence
  derived and/or modified sequence
gggaaauaagagagaaaagaagaguaagaagaaauauaagagccaccaugcagcgcgucaacaugauuauggccgaaucgccgggacucaucacaaucugccucuuggguuaucucuugucggcagaauguaccguguucuuggaucacgaaaacgcgaacaaaauucuuaaucgcccgaagcgguauaacuccgggaaacuugaggaguuugugcagggcaaucuugaacgagagugcauggaggagaaaugcuccuuugaggaggcgagggaaguguuugaaaacacagagcgaacaacggaguuuuggaagcaauacguagauggggaccagugugagucgaauccgugccucaaugggggaucauguaaagaugacaucaauagcuaugaaugcuggugcccguuuggguuugaagggaagaacugugagcuggaugugacgugcaacaucaaaaacggacgcugugagcaguuuuguaagaacucggcugacaauaagguaguaugcucgugcacagagggauaccggcuggcggagaaccaaaaaucgugcgagcccgcagucccguucccuugugggagggugagcgugucacagacuagcaaguugacgagagcggagacuguauuccccgacguggacuacgucaacagcaccgaagccgaaacaauccucgauaacaucacgcagagcacucaguccuucaaugacuuuacgagggucguagguggugaggacgcgaaacccggucaguuccccuggcaggugguauugaacggaaaagucgaugccuuuuguggagguuccauugucaacgagaaguggauugucacagcggcacacugcguagaaacaggagugaaaaucacgguaguggcgggagagcauaacauugaagagacagagcacacggaacaaaagcgaaaugucaucagaaucauuccacaccauaacuauaacgcggcaaucaauaaguacaaucacgacaucgcacuuuuggagcuugacgaaccuuuggugcuuaauucguacgucaccccuauuuguauugccgacaaagaguauacaaacaucuucuugaaauucggcuccggguacguaucgggcuggggcagaguguuccauaaggguagauccgcacugguguugcaauaccucagggugccccucguggaucgagccacuugucugcgguccaccaaauucacaaucuacaacaauauguucugugcgggauuccaugaaggugggagagauagcugccagggagacucaggggguccccacgugacggaagucgaggggacgucauuucugacgggaauuaucucauggggagaggaaugugcgaugaaggggaaauauggcaucuacacuaaagugucacgguaugucaauuggaucaaggaaaagacgaaacucacgugauaauaggcugccuucugcggggcuugccuucuggccaugcccuucuucucucccuugcaccuguaccucucaaacaccauugucacacuccauggucuuugaauaaagccugaguaggaag

SEQ ID NO: 2680 - RNA, 1539 nt, Artificial Sequence
  derived and/or modified sequence
gggaaauaagagagaaaagaagaguaagaagaaauauaagagccaccaugcagcgcgucaacaugauuauggccgaaucgccgggacucaucacaaucugccucuuggguuaucucuugucggcagaauguaccguguucuuggaucacgaaaacgcgaacaaaauucuuaaucgcccgaagcgguauaacuccgggaaacuugaggaguuugugcagggcaaucuugaacgagagugcauggaggagaaaugcuccuuugaggaggcgagggaaguguuugaaaacacagagcgaacaacggaguuuuggaagcaauacguagauggggaccagugugagucgaauccgugccucaaugggggaucauguaaagaugacaucaauagcuaugaaugcuggugcccguuuggguuugaagggaagaacugugagcuggaugugacgugcaacaucaaaaacggacgcugugagcaguuuuguaagaacucggcugacaauaagguaguaugcucgugcacagagggauaccggcuggcggagaaccaaaaaucgugcgagcccgcagucccguucccuugugggagggugagcgugucacagacuagcaaguugacgagagcggagacuguauuccccgacguggacuacgucaacagcaccgaagccgaaacaauccucgauaacaucacgcagagcacucaguccuucaaugacuuuacgagggucguagguggugaggacgcgaaacccggucaguuccccuggcaggugguauugaacggaaaagucgaugccuuuuguggagguuccauugucaacgagaaguggauugucacagcggcacacugcguagaaacaggagugaaaaucacgguaguggcgggagagcauaacauugaagagacagagcacacggaacaaaagcgaaaugucaucagaaucauuccacaccauaacuauaacgcggcaaucaauaaguacaaucacgacaucgcacuuuuggagcuugacgaaccuuuggugcuuaauucguacgucaccccuauuuguauugccgacaaagaguauacaaacaucuucuugaaauucggcuccggguacguaucgggcuggggcagaguguuccauaaggguagauccgcacugguguugcaauaccucagggugccccucguggaucgagccacuugucugcgguccaccaaauucacaaucuacaacaauauguucugugcgggauuccaugaaggugggagagauagcugccagggagacucaggggguccccacgugacggaagucgaggggacgucauuucugacgggaauuaucucauggggagaggaaugugcgaugaaggggaaauauggcaucuacacuaaagugucacgguaugucaauuggaucaaggaaaagacgaaacucacgugauaauaggcugccuucugcggggcuugccuucuggccaugcccuucuucucucccuugcaccuguaccucuacacuccuggucuuugaauaaagccugaguaggaag

SEQ ID NO: 2681 - RNA, 1547 nt, Artificial Sequence
  derived and/or modified sequence
gggaaauaagagagaaaagaagaguaagaagaaauauaagagccaccaugcagcgcgucaacaugauuauggccgaaucgccgggacucaucacaaucugccucuuggguuaucucuugucggcagaauguaccguguucuuggaucacgaaaacgcgaacaaaauucuuaaucgcccgaagcgguauaacuccgggaaacuugaggaguuugugcagggcaaucuugaacgagagugcauggaggagaaaugcuccuuugaggaggcgagggaaguguuugaaaacacagagcgaacaacggaguuuuggaagcaauacguagauggggaccagugugagucgaauccgugccucaaugggggaucauguaaagaugacaucaauagcuaugaaugcuggugcccguuuggguuugaagggaagaacugugagcuggaugugacgugcaacaucaaaaacggacgcugugagcaguuuuguaagaacucggcugacaauaagguaguaugcucgugcacagagggauaccggcuggcggagaaccaaaaaucgugcgagcccgcagucccguucccuugugggagggugagcgugucacagacuagcaaguugacgagagcggagacuguauuccccgacguggacuacgucaacagcaccgaagccgaaacaauccucgauaacaucacgcagagcacucaguccuucaaugacuuuacgagggucguagguggugaggacgcgaaacccggucaguuccccuggcaggugguauugaacggaaaagucgaugccuuuuguggagguuccauugucaacgagaaguggauugucacagcggcacacugcguagaaacaggagugaaaaucacgguaguggcgggagagcauaacauugaagagacagagcacacggaacaaaagcgaaaugucaucagaaucauuccacaccauaacuauaacgcggcaaucaauaaguacaaucacgacaucgcacuuuuggagcuugacgaaccuuuggugcuuaauucguacgucaccccuauuuguauugccgacaaagaguauacaaacaucuucuugaaauucggcuccggguacguaucgggcuggggcagaguguuccauaaggguagauccgcacugguguugcaauaccucagggugccccucguggaucgagccacuugucugcgguccaccaaauucacaaucuacaacaauauguucugugcgggauuccaugaaggugggagagauagcugccagggagacucaggggguccccacgugacggaagucgaggggacgucauuucugacgggaauuaucucauggggagaggaaugugcgaugaaggggaaauauggcaucuacacuaaagugucacgguaugucaauuggaucaaggaaaagacgaaacucacgugauaauaggcugccuucugcggggcuugccuucuggccaugcccuucuucucucccuugcaccuguaccucucaaacaccauugucauggucuuugaauaaagccugaguaggaag

SEQ ID NO: 2682 - RNA, 1549 nt, Artificial Sequence
  derived and/or modified sequence
gggaaauaagagagaaaagaagaguaagaagaaauauaagagccaccaugcagcgcgucaacaugauuauggccgaaucgccgggacucaucacaaucugccucuuggguuaucucuugucggcagaauguaccguguucuuggaucacgaaaacgcgaacaaaauucuuaaucgcccgaagcgguauaacuccgggaaacuugaggaguuugugcagggcaaucuugaacgagagugcauggaggagaaaugcuccuuugaggaggcgagggaaguguuugaaaacacagagcgaacaacggaguuuuggaagcaauacguagauggggaccagugugagucgaauccgugccucaaugggggaucauguaaagaugacaucaauagcuaugaaugcuggugcccguuuggguuugaagggaagaacugugagcuggaugugacgugcaacaucaaaaacggacgcugugagcaguuuuguaagaacucggcugacaauaagguaguaugcucgugcacagagggauaccggcuggcggagaaccaaaaaucgugcgagcccgcagucccguucccuugugggagggugagcgugucacagacuagcaaguugacgagagcggagacuguauuccccgacguggacuacgucaacagcaccgaagccgaaacaauccucgauaacaucacgcagagcacucaguccuucaaugacuuuacgagggucguagguggugaggacgcgaaacccggucaguuccccuggcaggugguauugaacggaaaagucgaugccuuuuguggagguuccauugucaacgagaaguggauugucacagcggcacacugcguagaaacaggagugaaaaucacgguaguggcgggagagcauaacauugaagagacagagcacacggaacaaaagcgaaaugucaucagaaucauuccacaccauaacuauaacgcggcaaucaauaaguacaaucacgacaucgcacuuuuggagcuugacgaaccuuuggugcuuaauucguacgucaccccuauuuguauugccgacaaagaguauacaaacaucuucuugaaauucggcuccggguacguaucgggcuggggcagaguguuccauaaggguagauccgcacugguguugcaauaccucagggugccccucguggaucgagccacuugucugcgguccaccaaauucacaaucuacaacaauauguucugugcgggauuccaugaaggugggagagauagcugccagggagacucaggggguccccacgugacggaagucgaggggacgucauuucugacgggaauuaucucauggggagaggaaugugcgaugaaggggaaauauggcaucuacacuaaagugucacgguaugucaauuggaucaaggaaaagacgaaacucacgugauaauaggcuggagccucgguggccaugcuucuugccccuugggccuccccccagccccuccuccccuuccugcacccguacccccguggucuuugaauaaagucugagugggcggc

SEQ ID NO: 2683 - RNA, 1532 nt, Artificial Sequence
  derived and/or modified sequence
gggaaauaagagagaaaagaagaguaagaagaaauauaagagccaccaugcagcgcgucaacaugauuauggccgaaucgccgggacucaucacaaucugccucuuggguuaucucuugucggcagaauguaccguguucuuggaucacgaaaacgcgaacaaaauucuuaaucgcccgaagcgguauaacuccgggaaacuugaggaguuugugcagggcaaucuugaacgagagugcauggaggagaaaugcuccuuugaggaggcgagggaaguguuugaaaacacagagcgaacaacggaguuuuggaagcaauacguagauggggaccagugugagucgaauccgugccucaaugggggaucauguaaagaugacaucaauagcuaugaaugcuggugcccguuuggguuugaagggaagaacugugagcuggaugugacgugcaacaucaaaaacggacgcugugagcaguuuuguaagaacucggcugacaauaagguaguaugcucgugcacagagggauaccggcuggcggagaaccaaaaaucgugcgagcccgcagucccguucccuugugggagggugagcgugucacagacuagcaaguugacgagagcggagacuguauuccccgacguggacuacgucaacagcaccgaagccgaaacaauccucgauaacaucacgcagagcacucaguccuucaaugacuuuacgagggucguagguggugaggacgcgaaacccggucaguuccccuggcaggugguauugaacggaaaagucgaugccuuuuguggagguuccauugucaacgagaaguggauugucacagcggcacacugcguagaaacaggagugaaaaucacgguaguggcgggagagcauaacauugaagagacagagcacacggaacaaaagcgaaaugucaucagaaucauuccacaccauaacuauaacgcggcaaucaauaaguacaaucacgacaucgcacuuuuggagcuugacgaaccuuuggugcuuaauucguacgucaccccuauuuguauugccgacaaagaguauacaaacaucuucuugaaauucggcuccggguacguaucgggcuggggcagaguguuccauaaggguagauccgcacugguguugcaauaccucagggugccccucguggaucgagccacuugucugcgguccaccaaauucacaaucuacaacaauauguucugugcgggauuccaugaaggugggagagauagcugccagggagacucaggggguccccacgugacggaagucgaggggacgucauuucugacgggaauuaucucauggggagaggaaugugcgaugaaggggaaauauggcaucuacacuaaagugucacgguaugucaauuggaucaaggaaaagacgaaacucacgugauaauaggcugccuucugcggggcuugccuucuggccaugcccuucuucucucccuugcaccuguaccucuuggucuuugaauaaagccugaguaggaag

SEQ ID NO: 2684 - protein, 132 aa, Artificial Sequence
  derived and/or modified sequence
MAFDSTWKVDRSENYDKFMEKMGVNIVKRKLAAHDNLKLTITQEGNKFTVKESSTFRNIEVVFELGVTFNYNLADGTELRGTWSLEGNKLIGKFKRTDNGNELNTVREIIGDELVQTYVYEGVEAKRIFKKD

SEQ ID NO: 2685 - DNA, 2478 bp, Artificial Sequence
  derived and/or modified sequence
ctaattcttgaaataagtatgcccacaaactgtaatttaagacagaataggtatgcttctcatgttttaattcagttgaatttcagaagatctcaggaatgtacagaacgagaattaagaattaattaataagaattaattaattgcttgacatagttaggtgatttcctgaactttaagcttccacatcacagtatgaagttggttctaagataagaaatataataaattctcgcccaaggacagacctgaatctctagctgcctagaggctgactcaactgaaatcatggcgtttgacagcacttggaaggtagaccggagtgaaaactatgacaagttcatggaaaaaatgggtgttaatatagtgaaaaggaagcttgcagctcatgacaatttgaagctgacaattacacaagaaggaaataaattcacagtcaaagaatcaagcacttttcgaaacattgaagttgtttttgaacttggtgtcacctttaattacaatctagcagacggaactgaactcagggggacctggagccttgagggaaataaacttattggaaaattcaaacggacagacaatggaaacgaactgaatactgtccgagaaattataggtgatgaactagtccagacttatgtatatgaaggagtagaagccaaaaggatctttaaaaaggattgagcattattcttggcgcacagtccaaaatacaaattggacagaagatctatattgtaccagaactatttatttcaccccatcaagtataaggttactgattgattggtccttttataaacattggtatatttccattcatgccaaagcaaaagaagtaaaagctaattaggatttaatttgttttatattctctaagatatatatttactaaaagaatttgtgacattttaaaaaacaaaaataaatattgcgtccatgttgctttatatgtagccttgccttttaaaagaaaaagtatgtgaatatgaattgacagactgttttcgtagagagagggtcttactctttcactcaggctggaatgtagtggagagatcatagctcactgtaacctcaaactcctggactcatgcaatcttcctgcctcaggcttctgagtagctaggactatgggtacattccacagtgcccagctaatttttgttttgttttctttttattttttttagagatggggtcttgctatattgcccaggctggtcttgaacccctggcctcaagcaatcctcctgcctcagcctctcaagttgttttttttctttacatttgataaactaaaagcataggctgcatatgagtctttaacatcttgaactggttgtgaataattttctggcactggttgtaagtaatatctattattataaaaataatatatgctcaaccagaaaacttagaaataagaaacacaaatgtaaaataagtatttccataactcataatccagagataattgccattctgattttgatagatatcctctcagctctcttccctgggggcagatatttcccaatacataccactttgaataggatgataggaaataaatgatgtactacattaaattaaattattgtattacatttttgtacacatcagtcattcccacgcttggctgaaaatcaggatcatctgagaaacttaaacaatttctgcattcttaatctccactgttattctattatatcagaatcgctaatagaaccaagaattctagaaaatttcctggtgattctgatgcagcctgtccactaacttgtctttgagaacaatggagatatcagttatcaatgttatttttaaccacccccttcttttttgttgttgtgggttttttcacataaacacatacattgccaattttccagggctcaaaaagtttccttttattcatattttcacatgacgtaaaattttatgtgcttcacataattgtattttagcagggtacatattaggggatggagagggggtacaatttttaagcatttgcagctgcaactctatagacttttgacaaattctttttcacactgatgtagataacagcttaacatttacatagttcttactacttgccacacactgttctaagtggtatatacatatgacatatatattaaaatgtaggaagaaaaatgtttgagtacctgatgaaaatgaatagagagtatgtaatctttgaaagctgaatactgcgtgttctcacttataagtgggagctaaataatgtatacacatggacacaccagagtgtagaataatagacactggagacttggaagagttggagggttggcagggggcgatgataatttacttaatgggtacaatgtacattattcagggggtgatggttacagcccagactttaccactatgcaatatatcaatgtaacaaaactatacttgtactccttaaatttatataaaaataccttaaatcta

SEQ ID NO: 2686 - DNA, 399 bp, Artificial Sequence
  derived and/or modified sequence
atggcctttgattccacctggaaggtggacaggagcgaaaattacgataaattcatggagaaaatgggcgttaacatagtgaagcggaagctggcagctcacgataatctgaaactgacaattacgcaagagggtaacaagtttactgttaaagagagtagcacttttaggaatattgaggtcgtgtttgaactgggagtgacattcaattacaacctggccgatgggactgagctccggggcacctggagtttggaaggcaacaaactcatcggcaagttcaagcggaccgataatggaaacgagttaaacactgtgcgggagatcataggtgacgagctggtgcagacttacgtctacgaaggagttgaggcgaagagaatatttaaaaaggattag

SEQ ID NO: 2687 - DNA, 399 bp, Artificial Sequence
  derived and/or modified sequence
atggcctttgacagcacctggaaggtggacagaagtgaaaattatgacaagttcatggagaagatgggcgtgaacatcgtgaagaggaagctggccgcccatgacaacctgaagctgaccatcacccaggagggcaacaagttcaccgtgaaggagagcagcaccttcagaaatattgaggtggtgtttgagctgggcgtgaccttcaactacaacctggctgatggaacagagctgcggggcacctggagcctggagggcaacaagctgattggcaagttcaagaggacagacaatggaaatgagctgaacacagtgcgggagatcattggagatgagctggtgcagacctacgtgtatgagggcgtggaggccaagaggatcttcaagaaggactag

SEQ ID NO: 2688 - DNA, 399 bp, Artificial Sequence
  derived and/or modified sequence
atggccttcgacagcacctggaaggtggaccggagcgagaactacgataagtttatggaaaaaatgggcgtgaacatagtcaagagaaagctggccgctcacgataacctgaagctcacaatcacccaagagggaaataagtttactgtcaaggaatcctccactttccggaatattgaggtggtcttcgaactgggcgttaccttcaactataacctagccgacgggacagagttgcgcgggacatggagtctggaagggaataaacttataggtaagtttaagcgcacagataatggtaacgaactgaataccgtgagggagatcataggcgatgaattagtccaaacctacgtgtatgaaggtgtagaagccaagcggattttcaaaaaagattag

SEQ ID NO: 2689 - DNA, 399 bp, Artificial Sequence
  derived and/or modified sequence
atggcatttgattccacctggaaagtggaccggagcgagaattatgacaagttcatggagaagatgggcgtcaacatcgtgaaacggaaattggcagcccacgacaatctgaaactgactattactcaagaagggaataagtttaccgttaaggagtccagtacatttcggaacatcgaggttgtcttcgaattgggcgtgacatttaattacaacttggccgacgggactgaacttaggggcacatggtcattagagggcaataagttaatcgggaaattcaagcgcactgacaacggaaatgaattgaacacggtgagagagatcattggcgacgaactggtacagacctacgtgtatgagggggtggaagccaaaagaatctttaaaaaggactag

SEQ ID NO: 2690 - DNA, 399 bp, Artificial Sequence
  derived and/or modified sequence
atggccttcgacagcacctggaaggtggacagaagcgagaactacgacaagttcatggagaagatgggcgtgaacatcgtgaagagaaagctggccgcccacgacaacctgaagctgaccatcacccaggagggcaacaagttcaccgtgaaggagagcagcaccttcagaaacatcgaggtggtgttcgagctgggcgtgaccttcaactacaacctggccgacggcaccgagctgagaggcacctggagcctggagggcaacaagctgatcggcaagttcaagagaaccgacaacggcaacgagctgaacaccgtgagagagatcatcggcgacgagctggtgcagacctacgtgtacgagggcgtggaggccaagagaatcttcaagaaggactag

SEQ ID NO: 2691 - protein, 1455 aa, Artificial Sequence
  derived and/or modified sequence
MSDSWVPNSASGQDPGGRRRAWAELLAGRVKREKYNPERAQKLKESAVRLLRSHQDLNALLLEVEGPLCKKLSLSKVIDCDSSEAYANHSSSFIGSALQDQASRLGVPVGILSAGMVASSVGQICTAPAETSHPVLLTVEQRKKLSSLLEFAQYLLAHSMFSRLSFCQELWKIQSSLLLEAVWHLHVQGIVSLQELLESHPDMHAVGSWLFRNLCCLCEQMEASCQHADVARAMLSDFVQMFVLRGFQKNSDLRRTVEPEKMPQVTVDVLQRMLIFALDALAAGVQEESSTHKIVRCWFGVFSGHTLGSVISTDPLKRFFSHTLTQILTHSPVLKASDAVQMQREWSFARTHPLLTSLYRRLFVMLSAEELVGHLQEVLETQEVHWQRVLSFVSALVVCFPEAQQLLEDWVARLMAQAFESCQLDSMVTAFLVVRQAALEGPSAFLSYADWFKASFGSTRGYHGCSKKALVFLFTFLSELVPFESPRYLQVHILHPPLVPGKYRSLLTDYISLAKTRLADLKVSIENMGLYEDLSSAGDITEPHSQALQDVEKAIMVFEHTGNIPVTVMEASIFRRPYYVSHFLPALLTPRVLPKVPDSRVAFIESLKRADKIPPSLYSTYCQACSAAEEKPEDAALGVRAEPNSAEEPLGQLTAALGELRASMTDPSQRDVISAQVAVISERLRAVLGHNEDDSSVEISKIQLSINTPRLEPREHMAVDLLLTSFCQNLMAASSVAPPERQGPWAALFVRTMCGRVLPAVLTRLCQLLRHQGPSLSAPHVLGLAALAVHLGESRSALPEVDVGPPAPGAGLPVPALFDSLLTCRTRDSLFFCLKFCTAAISYSLCKFSSQSRDTLCSCLSPGLIKKFQFLMFRLFSEARQPLSEEDVASLSWRPLHLPSADWQRAALSLWTHRTFREVLKEEDVHLTYQDWLHLELEIQPEADALSDTERQDFHQWAIHEHFLPESSASGGCDGDLQAACTILVNALMDFHQSSRSYDHSENSDLVFGGRTGNEDIISRLQEMVADLELQQDLIVPLGHTPSQEHFLFEIFRRRLQALTSGWSVAASLQRQRELLMYKRILLRLPSSVLCGSSFQAEQPITARCEQFFHLVNSEMRNFCSHGGALTQDITAHFFRGLLNACLRSRDPSLMVDFILAKCQTKCPLILTSALVWWPSLEPVLLCRWRRHCQSPLPRELQKLQEGRQFASDFLSPEAASPAPNPDWLSAAALHFAIQQVREENIRKQLKKLDCEREELLVFLFFFSLMGLLSSHLTSNSTTDLPKAFHVCAAILECLEKRKISWLALFQLTESDLRLGRLLLRVAPDQHTRLLPFAFYSLLSYFHEDAAIREEAFLHVAVDMYLKLVQLFVAGDTSTVSPPAGRSLELKGQGNPVELITKARLFLLQLIPRCPKKSFSHVAELLADRGDCDPEVSAALQSRQQAAPDADLSQEPHLF

SEQ ID NO: 2692 - DNA, 4368 bp, Artificial Sequence
  derived and/or modified sequence
atgagcgacagctgggtgcccaacagcgccagcggccaggaccccggcggcagaagaagagcctgggccgagctgctggccggcagagtgaagagagagaagtacaaccccgagagagcccagaagctgaaggagagcgccgtgagactgctgagaagccaccaggacctgaacgccctgctgctggaggtggagggccccctgtgcaagaagctgagcctgagcaaggtgatcgactgcgacagcagcgaggcctacgccaaccacagcagcagcttcatcggcagcgccctgcaggaccaggccagcagactgggcgtgcccgtgggcatcctgagcgccggcatggtggccagcagcgtgggccagatctgcaccgcccccgccgagaccagccaccccgtgctgctgaccgtggagcagagaaagaagctgagcagcctgctggagttcgcccagtacctgctggcccacagcatgttcagcagactgagcttctgccaggagctgtggaagatccagagcagcctgctgctggaggccgtgtggcacctgcacgtgcagggcatcgtgagcctgcaggagctgctggagagccaccccgacatgcacgccgtgggcagctggctgttcagaaacctgtgctgcctgtgcgagcagatggaggccagctgccagcacgccgacgtggccagagccatgctgagcgacttcgtgcagatgttcgtgctgagaggcttccagaagaacagcgacctgagaagaaccgtggagcccgagaagatgccccaggtgaccgtggacgtgctgcagagaatgctgatcttcgccctggacgccctggccgccggcgtgcaggaggagagcagcacccacaagatcgtgagatgctggttcggcgtgttcagcggccacaccctgggcagcgtgatcagcaccgaccccctgaagagattcttcagccacaccctgacccagatcctgacccacagccccgtgctgaaggccagcgacgccgtgcagatgcagagagagtggagcttcgccagaacccaccccctgctgaccagcctgtacagaagactgttcgtgatgctgagcgccgaggagctggtgggccacctgcaggaggtgctggagacccaggaggtgcactggcagagagtgctgagcttcgtgagcgccctggtggtgtgcttccccgaggcccagcagctgctggaggactgggtggccagactgatggcccaggccttcgagagctgccagctggacagcatggtgaccgccttcctggtggtgagacaggccgccctggagggccccagcgccttcctgagctacgccgactggttcaaggccagcttcggcagcaccagaggctaccacggctgcagcaagaaggccctggtgttcctgttcaccttcctgagcgagctggtgcccttcgagagccccagatacctgcaggtgcacatcctgcacccccccctggtgcccggcaagtacagaagcctgctgaccgactacatcagcctggccaagaccagactggccgacctgaaggtgagcatcgagaacatgggcctgtacgaggacctgagcagcgccggcgacatcaccgagccccacagccaggccctgcaggacgtggagaaggccatcatggtgttcgagcacaccggcaacatccccgtgaccgtgatggaggccagcatcttcagaagaccctactacgtgagccacttcctgcccgccctgctgacccccagagtgctgcccaaggtgcccgacagcagagtggccttcatcgagagcctgaagagagccgacaagatcccccccagcctgtacagcacctactgccaggcctgcagcgccgccgaggagaagcccgaggacgccgccctgggcgtgagagccgagcccaacagcgccgaggagcccctgggccagctgaccgccgccctgggcgagctgagagccagcatgaccgaccccagccagagagacgtgatcagcgcccaggtggccgtgatcagcgagagactgagagccgtgctgggccacaacgaggacgacagcagcgtggagatcagcaagatccagctgagcatcaacacccccagactggagcccagagagcacatggccgtggacctgctgctgaccagcttctgccagaacctgatggccgccagcagcgtggccccccccgagagacagggcccctgggccgccctgttcgtgagaaccatgtgcggcagagtgctgcccgccgtgctgaccagactgtgccagctgctgagacaccagggccccagcctgagcgccccccacgtgctgggcctggccgccctggccgtgcacctgggcgagagcagaagcgccctgcccgaggtggacgtgggcccccccgcccccggcgccggcctgcccgtgcccgccctgttcgacagcctgctgacctgcagaaccagagacagcctgttcttctgcctgaagttctgcaccgccgccatcagctacagcctgtgcaagttcagcagccagagcagagacaccctgtgcagctgcctgagccccggcctgatcaagaagttccagttcctgatgttcagactgttcagcgaggccagacagcccctgagcgaggaggacgtggccagcctgagctggagacccctgcacctgcccagcgccgactggcagagagccgccctgagcctgtggacccacagaaccttcagagaggtgctgaaggaggaggacgtgcacctgacctaccaggactggctgcacctggagctggagatccagcccgaggccgacgccctgagcgacaccgagagacaggacttccaccagtgggccatccacgagcacttcctgcccgagagcagcgccagcggcggctgcgacggcgacctgcaggccgcctgcaccatcctggtgaacgccctgatggacttccaccagagcagcagaagctacgaccacagcgagaacagcgacctggtgttcggcggcagaaccggcaacgaggacatcatcagcagactgcaggagatggtggccgacctggagctgcagcaggacctgatcgtgcccctgggccacacccccagccaggagcacttcctgttcgagatcttcagaagaagactgcaggccctgaccagcggctggagcgtggccgccagcctgcagagacagagagagctgctgatgtacaagagaatcctgctgagactgcccagcagcgtgctgtgcggcagcagcttccaggccgagcagcccatcaccgccagatgcgagcagttcttccacctggtgaacagcgagatgagaaacttctgcagccacggcggcgccctgacccaggacatcaccgcccacttcttcagaggcctgctgaacgcctgcctgagaagcagagaccccagcctgatggtggacttcatcctggccaagtgccagaccaagtgccccctgatcctgaccagcgccctggtgtggtggcccagcctggagcccgtgctgctgtgcagatggagaagacactgccagagccccctgcccagagagctgcagaagctgcaggagggcagacagttcgccagcgacttcctgagccccgaggccgccagccccgcccccaaccccgactggctgagcgccgccgccctgcacttcgccatccagcaggtgagagaggagaacatcagaaagcagctgaagaagctggactgcgagagagaggagctgctggtgttcctgttcttcttcagcctgatgggcctgctgagcagccacctgaccagcaacagcaccaccgacctgcccaaggccttccacgtgtgcgccgccatcctggagtgcctggagaagagaaagatcagctggctggccctgttccagctgaccgagagcgacctgagactgggcagactgctgctgagagtggcccccgaccagcacaccagactgctgcccttcgccttctacagcctgctgagctacttccacgaggacgccgccatcagagaggaggccttcctgcacgtggccgtggacatgtacctgaagctggtgcagctgttcgtggccggcgacaccagcaccgtgagcccccccgccggcagaagcctggagctgaagggccagggcaaccccgtggagctgatcaccaaggccagactgttcctgctgcagctgatccccagatgccccaagaagagcttcagccacgtggccgagctgctggccgacagaggcgactgcgaccccgaggtgagcgccgccctgcagagcagacagcaggccgcccccgacgccgacctgagccaggagccccacctgttctag

SEQ ID NO: 2693 - DNA, 4368 bp, Artificial Sequence
  derived and/or modified sequence
atgtccgactcctgggtgccaaacagcgcaagcggtcaggatcccggtggtcgccggcgtgcctgggccgaactgttggctgggagggttaaaagggaaaagtacaacccagagagagcccagaagctgaaagagtccgccgtgagactgctacgtagtcatcaggatttaaacgccttgcttctcgaagtcgaaggaccactctgtaaaaagcttagcctgtctaaggtgatcgactgtgacagctctgaggcttacgctaatcacagctccagtttcatcggaagcgcgctgcaggaccaggcttccaggttgggcgtacccgtgggcatcctgagtgccgggatggtggcctcctccgtggggcagatttgcacggctcccgccgaaacaagccatcctgtactgctgacagtggaacagcggaaaaaactctcctccctgctggaattcgcacaatatttgctcgcccattccatgttcagtcgcctcagtttttgtcaggagctgtggaagatccagagctctctcctgctggaggctgtgtggcacctgcatgtgcaagggattgtcagcctccaggaattactcgagtcacaccctgacatgcatgcagtcggctcttggcttttccgtaacctctgctgtctgtgcgagcagatggaagcctcctgtcaacatgcagatgttgccagagcaatgctcagtgatttcgtccaaatgtttgttctgcgaggttttcagaagaatagcgacctcagaaggaccgtggaaccggaaaagatgcctcaggtaacagttgacgttttacaaagaatgttgatatttgccctcgatgcactcgccgccggagtgcaagaggaatcctccacccataaaatagtgcgatgttggttcggcgtcttttccggtcacactctcggctcggtaatttccacagaccccctgaagcgattcttttctcacacactgacccagatccttacccactcccccgtgctgaaagcctcggacgctgtccagatgcagagggaatggtctttcgcaaggacgcatcctttacttacaagtttgtacagacgcttatttgtgatgctcagtgcggaagagctggtcggacatctgcaagaagtcctcgagacgcaagaagtgcactggcagcgggtgctaagtttcgtgagtgctctagtggtgtgcttccctgaggcccaacaactgctggaggactgggttgctcgcctgatggcgcaagccttcgaatcctgccagctcgactccatggttacggccttcttagtggtgaggcaagccgcgctcgagggcccttccgccttcctgtcgtatgccgattggttcaaggccagttttggatcaaccaggggctatcacggttgttccaaaaaagccctggtttttctgttcacctttctgtcagaactcgtgccattcgaatctccaaggtacctgcaagtgcacatcctgcatcccccacttgtgccaggaaaataccggagccttttaaccgactacatatctctagcgaagacgcgtctggccgatctgaaggtttccattgaaaacatgggcctgtacgaggatttgtcctctgctggagacatcaccgaaccccacagtcaggccctccaagatgtcgaaaaagcgatcatggtgttcgagcataccggaaacattcccgtgacagtcatggaggcgtctatctttaggcgcccttactacgtgagccacttcctgccagccctcctgacgccccgagtgctgcccaaagtgcccgactcccgcgtcgccttcatcgagagcctgaagcgcgccgataaaattcccccttctttgtattctacatactgtcaggcttgtagcgctgctgaggagaagcctgaagacgccgcactgggggttagagctgagcctaactccgcagaggagcctttgggccagctgacggctgctttaggggagctaagggcaagcatgactgacccatcccagcgggacgtcatttcggcacaggtggcagtgatttcagagaggctcagagccgtcctgggccataatgaggacgactctagcgtggagatctcaaaaatacagctctctatcaatacgcctaggcttgagccacgagagcatatggcagtagatctactgttaacatctttttgccaaaatttgatggcagcctcgtcagttgcgccgcccgagagacagggtccatgggccgcactgtttgtccggaccatgtgcggccgcgtgcttcccgcagtacttacacgcctgtgtcagcttttacgccaccagggccctagtctgtccgctccccacgtcctggggctcgcggctctggccgttcacctaggtgaaagccggtccgctctccccgaagttgatgttgggccacccgcccctggcgccggactgccagtccccgcactcttcgacagtcttctgacctgtagaaccagggattctcttttcttttgccttaagttttgtactgccgccatctcatacagcttgtgcaaattctcgagtcaaagtcgcgatactttgtgttcttgcctttcaccaggcttaataaagaaattccagttcctaatgttccggctcttttcggaagcccgccaaccgctgagcgaagaagacgtggccagcctttcttggaggccactgcatctgccctctgctgattggcaacgggctgcattgtctctgtggacacaccgaaccttcagggaggttctgaaggaagaggatgtgcaccttacttatcaggattggctccatctggaattggagattcagccagaagcagatgctctcagcgatacggagcggcaggacttccatcagtgggctattcatgaacacttcctgccagagtcctccgccagtggaggatgtgatggagatctccaggctgcttgcaccatactagtcaatgcgttgatggatttccatcagagcagccgaagttacgatcattcagagaactcagacctggtttttggtggaaggacaggaaatgaggatattatatctagactccaggagatggtggcggaccttgagctgcagcaagatcttatcgtgcccctgggccacacacctagtcaggagcacttcttgttcgagatttttagacggagactccaggctctgacctcaggctggagcgtcgcagctagtttgcagcgacaacgcgaactactgatgtacaaacggatattgctgcgcctgcctagcagtgttctctgcggctccagcttccaggctgagcaacccatcactgcacgctgtgagcaattctttcatctggtgaactctgaaatgagaaacttctgctcccatggcggggctctgacccaagacatcactgctcacttcttcaggggccttctaaatgcatgcctcaggagtagggacccatccctgatggtcgactttatcctggccaaatgccagactaagtgccctctgattctgacaagtgccctcgtgtggtggccttccctcgaacctgtgctgctgtgtcgctggagacgccattgccagagccccctgcctagggagctccagaaactacaagaagggcggcagttcgcttcagatttcttatcacctgaggccgcttcaccagcacctaatcccgactggttaagcgccgcggccctgcacttcgcaatccaacaggtgcgcgaagagaacataagaaaacagttgaaaaagctggattgtgaacgggaggaattgctcgtctttctcttcttttttagtttgatgggcctcttatcaagccatcttacaagcaattctacgacagacctgcccaaggccttccatgtctgcgccgccatcctggaatgccttgaaaagaggaagatcagttggctggcattgtttcagttgactgagtctgatttaagactgggccgactgctgctgagggtcgcacccgaccagcacacaagactgctccccttcgctttctacagcctattgtcatactttcacgaggacgcagccattcgcgaggaagcctttctgcatgttgccgtggacatgtaccttaagctggtgcaactcttcgtggccggcgacacctccacagttagcccacccgctggaagatcactggagctgaaggggcaaggcaatcctgtagagctgatcacaaaggcccggctgtttttactccagctaatacccagatgccccaagaagtctttttcccacgtggcagagttactggcagatagaggcgactgcgaccctgaagtttccgctgcactgcaatcccgccagcaggctgccccagatgccgatctaagccaagaacctcacttgttctag
